United States Patent Application Publication US 2021/0260178 A1 - sequence listing, part 17

SEQ ID NO: 28124 - RNA, 1476 nt, Artificial Sequence
  derived and/or modified CDS sequence (opt1) from LASV(G1442-SLE-2011;Clade IV)__AIT17180__GPCmut5
augggccagaucgugaccuucuuccaggaggucccccacgugaucgaggaggugaugaacaucguccugaucgcccucagcauccuggccgugcugaaggggcucuacaacguggcgaccugcggccugaucgggcuggucacguuccuccugcugugcggccgcuccugcaccaccacccucuacaaggggguguacgagcugcagacgcuggagcucaacauggagacccugaacaugaccaugccgcugagcugcaccaagaacaacucccaccacuacauccgggugggcaacgagacgggccucgagcugacccugaccaacaccagcaucaucaaccacaaguucugcaaccucuccgacgcccacaagaagaaccuguacgaccacgcccugaugagcaucaucuccacguuccaccucagcauccccaacuucaaccaguacgaggccauguccugcgacuucaacgggggcaagaucagcguccaguacaaccugucccacagcuacgccggggacgcggccaaccacugcggcaccguggccaacggggugcugcagaccuucaugcgcauggccuggggcggcuccuacaucgcgcucgacagcgggugcggcaacugggacugcaucaugaccuccuaccaguaccugaucauccagaacacgaccugggacgaccacugccaguucagccggcccucccccaucggguaccugggccuccugagccagcgcacccgggacgucuacaucucccgccggcugcucggcaccuucacguggacccugagcgacagcgaggggaaggacaccccgggcggguacugccugacccgcuggaugcucaucgaggccgagcugaagugcuucggcaacacggccguggccaagugcaacgagaagcacgacgaggaguucugcgacaugcugcggcuguucgacuucaacaagcaggccauccagcgccugaaggcgcccgcccagauguccauccagcugaucaacaaggccgugaacgcccucaucaacgaccagcugaucaugaagaaccaccuccgggacaucaugugcauccccuacugcaacuacagcaaguacugguaccucaacaacaccgccaccgggaagaccucccugcccaagugcuggcugaucagcaacggcuccuaccucaacgagacgcacuucagcgacgacaucgagcaggaggcggacaacaugaucaccgagaugcugcagaaggaguacauggagcgccagggcaagaccccgcuggggcuggucgaccucuucguguucuccaccagcuucuaccugaucuccaucuuccugcaccucgugaagauccccacgcaccggcacaucgucggcaagagcugccccaagccccaccgccugaaccacauggggaucugcuccugcggccuguacaagcagccgggggugcccgugcgguggaagcgcuga

SEQ ID NO: 28125 - RNA, 1476 nt, Artificial Sequence
  derived and/or modified CDS sequence (opt1) from LASV(G3010-SLE-2013;Clade IV)__AIT17344__GPCmut5
augggccagaucgugaccuucuuccaggaggucccccacgugaucgaggaggugaugaacaucguccugaucgcccucagcauccuggccgugcugaaggggcucuacaacuucgcgaccugcggccugguggggcuggucacguuccuccugcugugcggccgcuccugcaccaccagccucuacaaggggguguacgagcugcagacccuggagcucaacauggagacgcugaacaugaccaugccgcuguccugcaccaagaacaacagccaccacuacaucauggugggcaacgagaccggccucgagcugacgcugaccaacaccuccaucaucaaccacaaguucugcaaccucagcgacgcccacaagaagaaccuguacaaccacgcccugauguccaucaucagcaccuuccaccucuccauccccaacuucaaccaguacgaggccaugagcugcgacuucaacgggggcaagaucuccguccaguacaaccugagccacuccuacgccggggacgcggccagccacugcggcacgguggccaacggggugcugcagaccuucaugcggauggccuggggcggcuccuacaucgcgcucgacagcgggugcggcaagugggacugcaucaugaccuccuaccaguaccugaucauccagaacaccacgugggaggaccacugccaguucagccgccccucccccaucggguaccugggccuccugagccagcggacccgcgacaucuacaucagccggcgccugcucggcaccuucaccuggacgcuguccgacagcgaggggaaggacaccccgggcggguacugccugacccgguggaugcucaucgaggccgagcugaagugcuucggcaacaccgccgucgccaagugcaacgagaagcacgacgaggaguucugcgacaugcugcgccucuucgacuucaacaagcaggccauccagcggcugaagacgcccgcgcagauguccauccagcugaucaacaaggccgugaacgcccucaucaacgaccagcugaucaugaagaaccaccuccgcgacaucaugugcauccccuacugcaacuacagcaaguacugguaccugaaccacaccaccaccgggaagacgucccugcccaagugcuggcuggugagcaacggcuccuaccucaacgagacccacuucagcgacgacaucgagcagcaggccgacaacaugaucaccgagaugcugcagaaggaguacauggagcggcagggcaagaccccgcuggggcuggucgaccucuucguguucuccacgagcuucuaccugaucuccaucuuccugcaccucgugaagauccccacccaccgccacaucgucggcaagagcugccccaagccccaccggcugaaccacauggggaucugcuccugcggccuguacaagcagccgggggugcccgugcgcuggaagcgguga

SEQ ID NO: 28126 - RNA, 1476 nt, Artificial Sequence
  derived and/or modified CDS sequence (opt1) from LASV(G502-SLE-2009;Clade IV)__AIT17126__GPCmut5
augggccagaucgugaccuucuuccaggaggucccccacgugaucgaggaggugaugaacaucguccugaucgcccucagcauccuggccgugcugaaggggcucuacaacuucgcgaccugcggccugguggggcugcucacguuccugcugcucugcggccgcuccugcaccaccgggcuguacaagggcgucuacgagcugcagacccucgagcugaacauggagacgcugaacaugaccaugccgcucagcugcaccaagaacaacucccaccacuacaucauggugggcaacgagaccgggcuggagcugacgcucaccaacaccagcaucaucaaccacaaguucugcaaccuguccgacgcccacaagaagaaccuguacgaccacgcccucaugagcaucaucuccaccuuccaccugagcauccccaacuucaaccaguacgaggccauguccugcgacuucaacggcgggaagaucagcgugcaguacaaccugucccacagcuacgccggcgacgcggccgaccacugcgggacggucgccaacggcgugcuccagaccuucaugcggauggccuggggcggguccuacaucgcgcuggacagcggcugcgggcgcugggacugcaucaugaccuccuaccaguaccugaucauccagaacaccacgugggaggaccacugccaguucagccggcccucccccaucggcuaccucggccugcugagccagcgcacccgggacaucuacaucucccgccggcuccuggggaccuucaccuggacgcugagcgacagcgagggcaaggacacccccgggggcuacugccucacccgcuggaugcugaucgaggccgagcugaagugcuucgggaacaccgccguggccaagugcaacgagaagcacgacgaggaguucugcgacaugcuccggcuguucgacuucaacaagcaggccauccagcgccugaaggcgccggcccagauguccauccagcucaucaacaaggccgucaacgcccugaucaacgaccagcuggugaugaagaaccaccuccgggacaucaugugcauccccuacugcaacuacagccgcuacugguaccugaaccacacgaccaccggccggaccucccugcccaagugcuggcucgugagcaacggcuccuaccugaacgagacgcacuucagcgacgacaucgagcagcaggccgacaacaugaucaccgagaugcugcagaaggaguacauggagcgccaggggaagaccccgcugggccucgucgaccuguucguguucuccaccagcuucuaccugaucuccaucuuccuccaccuggugaagauccccacgcaccggcacaucgucggcaagagcugccccaagccccaccgccugaaccacauggggaucugcuccugcgggcucuacaagcagccgggcgugcccgugaaguggaagcgguga

SEQ ID NO: 28127 - RNA, 1476 nt, Artificial Sequence
  derived and/or modified CDS sequence (opt1) from LASV(G733-SLE-2010;Clade IV)__AIT17154__GPCmut5
augggccagaucgugaccuucuuccaggaggucccccacgugaucgaggaggugaugaacaucguccugaucgcccucagcauccuggccgugcugaaggggcucuacaacuucgcgaccugcggcaucguggggcuggucuccuuccugcuccugugcggccgcagcugcacgaccucccuguacaaggggguguacgagcuccagacccuggagcugaacauggagacccucaacaugacgaugccgcugagcugcaccaagaacaacucccaccacuacaucauggugggcaacgagaccggccuggagcucacccugacgaacaccagcaucaucaaccacaaguucugcaaccuguccgacgcccacaagaagaaccucuacgaccacgcccugaugagcaucaucuccaccuuccaccugagcauccccaacuucaaccaguacgaggccauguccugcgacuucaacgggggcaagaucagcguccaguacaaccucucccacagcuacgccggggacgcggccaaccacugcggcaccaucgccaacggggugcugcagacguucaugcggauggccuggggcggcuccuacaucgcgcuggacagcgggugcgaccgcugggacugcaucaugaccuccuaccaguaccucaucauccagaacaccaccugggaggaccacugccaguucagccggcccucccccaucggcuaccuggggcugcucagccagcgcacgcgggacaucuacaucagccgccggcugcugggcaccuucaccuggacccucuccgacagcgagggcaaggacacgcccgggggcuacugccugacccgcuggaugcugaucgaggccgagcucaagugcuucgggaacaccgccguggccaagugcaacgagaagcacgacgaggaguucugcgacaugcugcggcuguucgacuucaacaagcaggccauccagcgccucaaggcgccggcccagauguccauccagcugaucaacaaggccgucaacgcccugaucaacgaccagcucaucaugaagaaccaccuccgggacaucaugugcauccccuacugcaacuacagcaaguacugguaccugaaccacaccacgaccggcaagaccucccugcccaagugcuggcuggugagcaacggguccuaccugaacgagacccacuucagcgacgacaucgagcagcaggccgacaacaugaucacggagaugcuccagaaggaguacauggagcgccagggcaagaccccgcugggccugguggaccuguucgucuucuccaccagcuucuaccucaucuccaucuuccugcaccuggugaagauccccacccaccggcacguggucggcaagagcugccccaagccccaccgccucaaccacauggggaucugcuccugcgggcuguacggccagccgggggugcccgugaaguggaagcgguga

SEQ ID NO: 28128 - RNA, 1476 nt, Artificial Sequence
  derived and/or modified CDS sequence (opt1) from MOPV/LASV reassortant(IGS-1;Clade IV)__AFY05576__GPCmut5
augggccagaucgugaccuucuuccaggaggucccccacgugaucgaggaggugaugaacaucguccugaucgcccucagcgugcuggccgugcugaaggggcucuacaacuucgcgaccugcggccuggucgggcuggugacguuccuccugcugugcggccgcuccugcaccaccagccucuacaaggggguguacgagcugcagacccuggagcucaacauggagacgcugaacaugaccaugccgcuguccugcaccaagaacaacagccaccacuacaucauggucggcaacgagaccggccucgagcugacgcugaccaacaccuccaucaucaaccacaaguucugcaaccucagcgacgcccacaagaagaaccuguacgaccacgcccugauguccaucaucagcaccuuccaccucuccauccccaacuucaaccaguacgaggccaugagcugcgacuucaacgggggcaagaucuccgugcaguacaaccugagccacuccuacgccggggacgcggccaaccacugcggcacgguggccaacgggguccugcagaccuucaugcggauggccuggggcggcagcuacaucgcgcucgacuccgggugcggcaacugggacugcaucaugaccagcuaccaguaccugaucauccagaacaccacgugggaggaccacugccaguucucccgccccagccccaucggguaccugggccuccugucccagcggacccgcgacaucuacaucagccggcgccugcucggcaccuucaccuggacgcugagcgacuccgagggggaggacaccccgggcggguacugccugacccgguggaugcucaucgaggccgagcugaagugcuucggcaacaccgccguggccaagugcaacgagaagcacgacgaggaguucugcgacaugcugcgccucuucgacuucaacaagcaggccauccagcggcugaaggcgcccgcccagaugagcauccagcugaucaacaaggccgugaacgcccucaucaacgaccagcugaucaugaagaaccaccuccgcgacaucaugugcauccccuacugcaacuacuccaaguacugguaccugaaccacacgaccaccgggcggaccagccugcccaagugcuggcuggucuccaacggcagcuaccucaacgagacgcacuucuccgacgacaucgagcagcaggccgacaacaugaucaccgagaugcugcagaaggaguacauggagcgccagggcaagaccccgcuggggcugguggaccucuucguguucagcaccuccuucuaccugaucagcaucuuccugcaccucgucaagauccccacgcaccggcacaucgugggcaaguccugccccaagccccaccgccugaaccacauggggaucugcagcugcggccuguacaagcagccgggggugcccgucaaguggaagcgguga

SEQ ID NO: 28129 - RNA, 1476 nt, Artificial Sequence
  derived and/or modified CDS sequence (opt1) from LASV(LM765-SLE-2012;Clade IV)__AIT17814__GPCmut5
augggccagaucgugaccuucuuccaggaggucccccacgugaucgaggaggugaugaacaucguccugaucgcccucagcauccuggccgugcugaaggggcucuacaacuucgcgaccugcggccugguggggcuggucacguuccuccugcugugcggccgcuccugcaccaccagccucuacaaggggguguacgagcugcagacccuggagcucaacauggagacgcugaacaugaccaugccgcuguccugcaccaagaacaacagccaccacuacaucauggugggcaacgagaccggccucgagcugacgcugaccaacaccuccaucaucgaccacaaguucugcaaccucagcgacgcccaccggaagaaccuguacgaccacgcccugauguccaucaucagcaccuuccaccucuccauccccaacuucaaccaguacgaggccaugagcugcgacuucaacgggggcaagaucuccguccaguacaaccugagccacuccuacgccaaggacgcggccgaccacugcgggacgguggccaacggcgugcugcagaccuucaugcgcauggccuggggcgggagcuacaucgcgcucgacuccggcugcgggcggugggacugcaucaugaccagcuaccaguaccugaucauccagaacaccacgugggaggaccacugccaguucucccgccccagccccaucggcuaccuggggcuccugucccagcggacccgcgacaucuacaucagccggcgccugcucggcaccuucaccuggacgcugagcgacuccgagggcaaggacacccccgggggcuacugccugacccgguggaugcucaucgaggccgagcugaagugcuucgggaacaccgccgucgccaagugcaacgagaagcacgacgaggaguucugcgacaugcugcgccucuucgacuucaacaagcaggccauccagcggcugaaggcgccggcccagaugagcauccagcugaucaacaaggccgugaacgcccucaucaacgaccagcugaucaugaagaaccaccuccgcgacaucaugugcauccccuacugcaacuacuccaaguacugguaccugaaccacacgaccaccggcaagaccagccugcccaagugcuggcugguguccaacgggagcuaccucaacgagacgcacuucuccgacgacaucgagcagcaggccgacaacaugaucaccgagaugcugcagaaggaguacauggagcggcagggcaagaccccgcugggccuggucgaccucuucguguucagcaccuccuucuaccugaucagcaucuuccugcaccucgugaagauccccacgcaccgccacaucgucgggaagcccugccccaagccgcaccggcugaaccacaugggcaucugcuccugcgggcuguacaagcagcccggcgugcccgugaaguggaagcgcuga

SEQ ID NO: 28130 - RNA, 1476 nt, Artificial Sequence
  derived and/or modified CDS sequence (opt1) from LASV(LM776-SLE-2012;Clade IV)__AIT17824__GPCmut5
augggccagaucgugaccuucuuccaggaggucccccacgugaucgaggaggugaugaacaucguccugaucgcccucagcauccuggccgugcugaaggggcucuacaacuucgcgaccugcggccugguggggcuggucacguuccuccugcugugcggccgcuccugcaccaccagcguguacaaggggguguacgagcuccagacccuggagcugaacauggagacgcucaacaugaccaugccgcuguccugcaccaagaacaacagccaccacuacaucauggucggcaacgagaccggccuggagcucacgcugaccaacaccuccaucaucaaccacaaguucugcaaccugagcgacgcccacaagaagaaccucuacgaccacgcccugauguccaucaucagcaccuuccaccuguccauccccaacuucaaccaguacgaggccaugagcugcgacuucaacgggggcaagaucuccgugcaguacaaccucagccacuccuacgccggggacgcggccaaccacugcggcacgguggccaacgggguccugcagaccuucaugcggauggccuggggcggcagcuacaucgcgcuggacuccgggugcggcaagugggacugcaucaugaccagcuaccaguaccucaucauccagaacaccacgugggaggaccacugccaguucucccgccccagccccaucggguaccugggccugcucucccagcggacccgcgacaucuacaucagccggcgccugcugggcaccuucaccuggacgcucagcgacuccgaggggaaggacaccccgggcggguacugccugacccgguggaugcugaucgaggccgagcucaagugcuucggcaacaccgccguggccaagugcaacgagaagcacgacgaggaguucugcgacaugcugcgccuguucgacuucaacaagcaggccauccagcggcucaaggcgcccgcccagaugagcauccagcugaucaacaaggccgugaacgcccugaucaacgaccagcucaucaugaagaaccaccuccgcgacaucaugugcauccccuacugcaacuacuccaaguacugguaccugaaccacacgaccaccgggaagaccagccugcccaagugcuggcuggucuccaacggcagcuaccugaacgagacgcacuucuccgacgacaucgagcagcaggccgacaacaugaucaccgagaugcuccagaaggaguacauggagcggcagggcaagaccccgcuggggcugguggaccuguucguguucagcaccuccuucuaccucaucagcaucuuccugcaccuggucaagauccccacgcaccgccacaucgugggcaaguccugccccaagccccaccggcucaaccacauggggaucugcagcugcggccuguacaagcagccgggggugcccguccgcuggaagcgguga

SEQ ID NO: 28131 - RNA, 1476 nt, Artificial Sequence
  derived and/or modified CDS sequence (opt1) from LASV(Mad39;Clade IV)__ANH09722__GPCmut5
augggccagaucgugaccuucuuccaggaggucccccacgugaucgaggaggugaugaacaucguccugaucgcccucagcauccuggccgugcugaaggggcucuacaacguggcgaccugcggccugaucgggcuggucacguuccuccugcugugcggccgcuccugcaccaccacccucuacaaggggguguacgagcugcaggcccuggagcucaacauggagacgcugaacaugaccaugccgcugagcugcaccaagaacaacucccaccacuacauccgggugggcaacgagaccggccucgagcugacgcugaccaacaccagccucaucaaccacaaguucugcaaccuguccgacgcccacaagaagaaccuguacgaccacgcccucaugagcaucaucuccaccuuccaccugagcauccccaacuucaaccaguacgaggccauguccugcgacuucaacgacgggaagaucagcguccaguacaaccugucccacacguacgcgggcgacaccgccaaccacugcgggaccguggccaacggcgugcuccagaccuucaugcgcauggccuggggcgggagcuacaucgcgcuggacuccggcugcgggggcugggacugcaucaugacgagcuaccaguaccugaucauccagaacaccaccugggaggaccacugccaguucucccggcccagccccaucggguaccucggccugcugucccagcgcacccgggacaucuacaucagccgccggcuccugggcacguucaccuggacccuguccgacagcgaggggaaggacaccccgggcggguacugccucacgcgcuggaugcugaucgaggccgagcugaagugcuucggcaacaccgccgucgccaagugcaacgagaagcacgacgaggaguucugcgacaugcuccggcuguucgacuucaacaagcaggccauccagcgccugaaggcgcccgcccagaugagcauccagcucaucaacaaggccgugaacgcccugaucaacgaccagcugaucaugaagaaccaccuccgggacaucaugugcauccccuacugcaacuacuccaaguacugguaccugaaccacaccgugaccgggaagacgagccugcccaagugcuggcucgucuccaacggcagcuaccugaacgagacccacuucuccgacgacaucgagcagcaggccgacaacaugaucaccgagaugcugcagaaggaguacauggagcgccagggcaagaccccgcuggggcucguggaccuguucguguucagcacguccuucuaccugaucagcaucuuccuccaccuggucaagauccccacccaccggcacguggugggcaagcccugccccaagccgcaccgccugaaccacauggggaucugcuccugcggcuucuacaagcagcccgggguccccgugcgguggaagcgcuga

SEQ ID NO: 28132 - RNA, 1476 nt, Artificial Sequence
  derived and/or modified CDS sequence (opt1) from LASV(Z0947-SLE-2011;Clade IV)__AIT17840__GPCmut5
augggccagaucgugaccuucuuccaggaggucccccacgugaucgaggaggugaugaacaucguccugaucgcccucagcauccuggccgugcugaaggggcucuacaacuucgcgaccugcggccugguggggcuggucacguuccuccugcugugcggccgcuccugcaccaucagccucuacaaggggguguacgagcugcagacccuggagcucaacauggagacccugaacaugacgaugccgcuguccugcaccaagaacaacagccaccacuacaucauggugggcaacgagaccggccucgagcugacccugacgaacaccuccaucaucaaccacaaguucugcaaccucagcgacgcccacaagaagaaccuguacgaccacgcccugauguccaucaucagcaccuuccaccucuccauccccaacuucaaccaguacgaggccaugagcugcgacuucaacgggggcaagaucuccguccaguacaaccugagccacuccuacgccggggacgcggccaaccacugcggcaccguggccaacggggugcugcagacguucaugcggauggccuggggcggcagcuacaucgcgcucgacuccgggugcgaccgcugggacugcaucaugaccagcuaccaguaccugaucauccagaacaccaccugggaggaccacugccaguucucccggcccagccccaucggcuaccuggggcuccugucccagcgcacgcgggacaucuacaucagccgccggcugcucggcaccuucaccuggacccugagcgacuccgagggcaaggacacgcccgggggcuacugccugacccgcuggaugcucaucgaggccgagcugaagugcuucgggaacaccgccgucgccaagugcaacgagaagcacgacgaggaguucugcgacaugcugcggcuguucgacuucaacaagcaggccauccagcgccugaaggcgccggcccagaugagcauccagcugaucaacaaggccgugaacgcccucaucaacgaccagcugaucaugaagaaccaccuccgggacaucaugugcauccccuacugcaacuacuccaaguacugguaccucaaccacaccacgaccggcaagaccagccugcccaagugcuggcugguguccaacgggagcuaccucaacgagacccacuucuccgacgacaucgagcagcaggccgacaacaugaucacggagaugcugcagaaggaguacauggagcgccagggcaagaccccgcugggccuggucgaccucuucguguucagcaccuccuucuaccugaucagcaucuuccugcaccucgugaagauccccacccaccggcacaucgucgggaagcccugccccaagccgcaccgccugaaccacaugggcaucugcuccugcgggcuguacaagcagcccggcgugcccgugaaguggaagcgguga

SEQ ID NO: 28133 - RNA, 1476 nt, Artificial Sequence
  derived and/or modified CDS sequence (opt4) from LASV(Josiah;Clade IV)__NP_694870__GPCmut5
augggccagaucgugaccuucuuccaggaggugccccacgugaucgaggaggugaugaacaucgugcugaucgcccugagcgugcuggccgugcugaagggccuguacaacuucgccaccugcggccuggugggccuggugaccuuccugcugcugugcggcagaagcugcaccaccagccuguacaagggcguguacgagcugcagacccuggagcugaacauggagacccugaacaugaccaugccccugagcugcaccaagaacaacagccaccacuacaucauggugggcaacgagaccggccuggagcugacccugaccaacaccagcaucaucaaccacaaguucugcaaccugagcgacgcccacaagaagaaccuguacgaccacgcccugaugagcaucaucagcaccuuccaccugagcauccccaacuucaaccaguacgaggccaugagcugcgacuucaacggcggcaagaucagcgugcaguacaaccugagccacagcuacgccggcgacgccgccaaccacugcggcaccguggccaacggcgugcugcagaccuucaugagaauggccuggggcggcagcuacaucgcccuggacagcggcugcggcaacugggacugcaucaugaccagcuaccaguaccugaucauccagaacaccaccugggaggaccacugccaguucagcagacccagccccaucggcuaccugggccugcugagccagagaaccagagacaucuacaucagcagaagacugcugggcaccuucaccuggacccugagcgacagcgagggcaaggacacccccggcggcuacugccugaccagauggaugcugaucgaggccgagcugaagugcuucggcaacaccgccguggccaagugcaacgagaagcacgacgaggaguucugcgacaugcugagacuguucgacuucaacaagcaggccauccagagacugaaggcccccgcccagaugagcauccagcugaucaacaaggccgugaacgcccugaucaacgaccagcugaucaugaagaaccaccugagagacaucaugugcauccccuacugcaacuacagcaaguacugguaccugaaccacaccaccaccggcagaaccagccugcccaagugcuggcuggugagcaacggcagcuaccugaacgagacccacuucagcgacgacaucgagcagcaggccgacaacaugaucaccgagaugcugcagaaggaguacauggagagacagggcaagaccccccugggccugguggaccuguucguguucagcaccagcuucuaccugaucagcaucuuccugcaccuggugaagauccccacccacagacacaucgugggcaagagcugccccaagccccacagacugaaccacaugggcaucugcagcugcggccuguacaagcagcccggcgugcccgugaaguggaagagauga

SEQ ID NO: 28134 - RNA, 1473 nt, Artificial Sequence
  derived and/or modified CDS sequence (opt4) from LASV(LP;Clade I)__AAF86701__GPCmut5
augggccagaucaucaccuucuuccaggaggugccccacgugaucgaggaggugaugaacaucgugcugaucgcccugagccugcuggccauccugaagggccuguacaacaucgccaccugcggcaucaucggccugguggccuuccuguuccugugcggcaagagcugcagccugacccugaagggcggcuacgagcugcagacccuggagcugaacauggagacccugaacaugaccaugccccugagcugcaccaagaacagcagccaccacuacaucagagugggcaacgagaccggccuggagcugacccugaccaacaccagcaucaucaaccacaaguucugcaaccugagcgacgcccacaagaagaaccuguacgaccacgcccugaugagcaucaucagcaccuuccaccugagcauccccaacuucaaccaguacgaggccaugagcugcgacuucaacggcggcaagaucagcgugcaguacaaccugagccacagcuacgccggcgacgccgccgagcacugcggcaccguggccaacggcgugcugcagaccuucaugagaauggccuggggcggcagauacaucgcccuggacagcggcugcggcaacugggacugcaucaugaccagcuaccaguaccugaucauccagaacaccaccugggaggaccacugccaguucagcagacccagccccaucggcuaccugggccugcugagccagagaaccagagacaucuacaucagcagaagacugcugggcaccuucaccuggacccugagcgacagcgagggcaacgagacccccggcggcuacugccugaccagauggaugcugaucgaggccgagcugaagugcuucggcaacaccgccguggccaagugcaacgagaagcacgacgaggaguucugcgacaugcugagacuguucgacuucaacaagcaggccaucagaagacugaaggcccccgcccagaugagcauccagcugaucaacaaggccgugaacgcccugaucaacgaccagcugaucaugaagaaccaccugagagacaucaugugcauccccuacugcaacuacagcaaguacugguaccugaaccacaccagcagcggcagaaccagccugcccaagugcuggcugaucagcaacggcagcuaccugaacgagacccaguucagcgacgacaucgagcagcaggccgacaacaugaucaccgagaugcugcagaaggaguacaucgagagacagggcaagaccccccugggccugguggacaucuucaucuucagcaccagcuucuaccugaucagcaucuuccugcaccugaucaagauccccacccacagacacaucgugggcaagcccugccccaagccccacagacugaaccacaugggcgugugcagcugcggccuguacaagcaccccggcgugcccaccaaguggaagagauga

SEQ ID NO: 28135 - RNA, 1473 nt, Artificial Sequence
  derived and/or modified CDS sequence (opt4) from LASV(803213;Clade II)__AAF86703__GPCmut5
augggccagaucaucaccuucuuccaggaggugccccacgugaucgaggaggugaugaacaucgugcugaucgcccugagccugcuggccauccugaagggcaucuacaacguggccaccugcggccuguucggccugaucagcuuccugcugcugugcggcagaagcugcagcgugaccuacaagggcguguacgagcugcagacccuggagcugaacauggccaaccugaacaugaccaugccccugagcugcaccaagaacaacagccaccacuacaucauggugggcaacgagaccggccuggagcugacccugaccaacaccagcaucaucaaccacaaguucugcaaccugagcgacgcccacaagaagaaccuguacgaccacgcccugaugagcaucaucagcaccuuccaccugagcauccccaacuucaaccaguacgaggccaugagcugcgacuucaacggcggcaagaucagcgugcaguacaaccugagccacagcuucgccguggacgccgccaaccacugcggcaccaucgccaacggcgugcugcagaccuucaugagaauggccuggggcggcagcuacaucgcccuggacagcggcugcggcaacugggacugcaucaugaccagcuaccaguaccugaucauccagaacaccaccugggaggaccacugccaguucagcagacccagccccaucggcuaccugggccugcugagccagagaaccagagacaucuacaucagcagaagacugcugggcaccuucaccuggacccugagcgacagcgagggcaacgaggcccccggcggcuacugccugaccagauggaugcugaucgaggccgagcugaagugcuucggcaacaccgccguggccaagugcaacgagaagcacgacgaggaguucugcgacaugcugagacuguucgacuucaacaagcaggccaucaagagacugaagacccccgcccagaugagcauccagcugaucaacaaggccgugaacgcccugaucaacgaccagcugaucaugaagaaccaccugagagacaucaugugcauccccuacugcaacuacagcagauacugguaccugaaccacaccgugaccggcaagaccagccugcccagaugcuggcuggugagcaacggcagcuaccugaacgagacccacuucagcgacgacaucgagcagcaggccgacaacaugaucaccgagaugcugcagaaggaguacauggacagacagggcaagaccccccugggccugguggaccuguucguguucagcaccagcuucuaccugaucagcaucuuccugcaccuggugaagauccccacccacagacacaucgugggcaagcccugccccaagccccacagacugaaccacaugggcaucugcagcugcggccuguacaagcaccccggcgugcccgugaaguggaagagauga

SEQ ID NO: 28136 - RNA, 1473 nt, Artificial Sequence
  derived and/or modified CDS sequence (opt4) from LASV(GA391;Clade III)__CAA36645__GPCmut5
augggccagaucgugaccuucuuccaggaggugccccacgugaucgaggaggugaugaacaucgugcugaucgcccugagcauccuggccauccugaagggccuguacaacguggccaccugcggccugaucggccuggugaccuuccugcugcugagcggcagaagcugcagccugaucuacaagggcaccuacgagcugcagacccuggagcugaacauggagacccugaacaugaccaugccccugagcugcaccaagaacaacagccaccacuacaucagagugggcaacgagaccggccuggagcugacccugaccaacaccagcauccugaaccacaaguucugcaaccugagcgacgcccacaagagaaaccuguacgaccacagccugaugagcaucaucagcaccuuccaccugagcauccccaacuucaaccaguacgaggccaugagcugcgacuucaacggcggcaagaucaccgugcaguacaaccugagccacagcuucgccguggacgccgccggccacugcggcacccuggccaacggcgugcugcagaccuucaugagaauggccuggggcggcagcuacaucgcccuggacagcggcugcggcaacugggacugcaucaugaccagcuaccaguaccugaucauccagaacaccaccugggacgaccacugccaguucagcagacccagccccaucggcuaccugggccugcugagccagagaaccagagacaucuacaucagcagaagacugcugggcaccuucaccuggacccugagcgacagcgagggcaacgagacccccggcggcuacugccugaccagauggaugcugaucgaggccgagcugaagugcuucggcaacaccgccguggccaagugcaacgagaagcacgacgaggaguucugcgacaugcugagacuguucgacuucaacaagcaggccaucagaagacugaagacccccgcccagaugagcauccagcugaucaacaaggccgugaacgcccugaucaacgaccagcugaucaugaagaaccaccugagagacaucaugugcauccccuacugcaacuacagcagauacugguaccugaaccacaccagcaccggcaagaccagccugcccagaugcuggcugaucagcaacggcagcuaccugaacgagaccaaguucagcgacgacaucgagcagcaggccgacaacaugaucaccgagaugcugcagaaggaguacaucgacagacagggcaagaccccccugggccugguggaccuguucguguucagcaccagcuucuaccugaucagcaucuuccugcaccuggugaagauccccacccacagacacaucgugggcaagcccugccccaagccccacagacugaaccacaugggcaucugcagcugcggccuguacaagcagcccggcgugcccgugagauggaagagauga

SEQ ID NO: 28137 - RNA, 1476 nt, Artificial Sequence
  derived and/or modified CDS sequence (opt4) from LASV(AV;Clade V)__CCA30314__GPCmut5
augggccagaucgugaccuucuuccaggaggugccccacgugaucgaggaggugaugaacaucgugcugaucgcccugagcauccuggccgugcugaagggccuguacaacaucgccaccugcggccugaucggccugaucaccuuccugcugcugugcggcagaagcugcagcagcaaccuguacaagggcguguacgagcugcagagccuggaccugaacauggagacccugaacaugaccaugccccugagcugcaccaagaacaacagccaccacuacaucagagugggcaacgacaccggccuggagcugacccugaccaacaccagcauccugaaccacaaguucugcaaccugagcgacgcccacaagaaggaccuguacgaccacgcccugaugagcaucaucagcaccuuccaccugagcauccccaacuucaaccaguacgaggccaugagcugcgacuucaacggcggcaagaucagcgugcaguacaaccugagccacagcuacgccaucgacgccgccaaccacugcggcaccguggccaacggcauccugcagaccuucaugagaauggccuggggcggcagcuacaucgcccuggacagcggcugcggcaacugggacugcaucaugaccagcuaccaguaccugaucauccagaacaccaccugggagaaccacugccaguucagcagacccagccccaucggcuaccugggccugcugagccagagaaccagagacaucuacaucagcagaagacugcugggcaccuucaccuggacccugagcgacagcgagggcaacgccacccccggcggcuacugccugaccagauggaugcugaucgaggccgagcugaagugcuucggcaacaccgccguggccaagugcaacgagaagcacgacgaggaguucugcgacaugcugagacuguucgacuucaacaagcaggccaucagcagacugaagagccccgcccagaugagcauccagcugaucaacaaggccgugaacgcccugaucaacgaccagcugaucaugaagaaccaccugagagacaucaugugcauccccuacugcaacuacagcaaguacugguaccugaaccacaccaucaccggcaagaccagccugcccaagugcuggcuggugagcaacggcagcuaccugaacgagacccacuucagcgacgacaucgagcagcaggccgacaacaugaucaccgagaugcugcagaaggaguacauggagagacagggcaagaccccccugggccugguggaccuguucguguucagcaccagcuucuaccugaucagcaucuuccugagacuggugaagauccccacccacagacacaucgugggcaagcccugccccaagccccacagacugaaccacaugggcaucugcagcugcggccuguacaagcagcccggcgugcccgugagauggaagagauga

SEQ ID NO: 28138 - RNA, 1473 nt, Artificial Sequence
  derived and/or modified CDS sequence (opt4) from LASV(Togo/2016/7082;Clade VI)__AMR44577__GPCmut5
augggccagaucaucaccuucuuccaggaggugccccacgugaucgaggaggugaugaacaucgugcugaucgcccugagccugcuggccauccugaagggcguguacaacguggccaccugcggcaucaucggccuggugaccuuccuguuccugugcggcagaagcugcagccugaucuacaagggcagcuacgagcugcagacccuggagcugaacauggagacccugaacaugaccaugccccugagcugcaccaagaacagcagccaccacuacaucagagugggcaacgagaccggccuggagcugacccugaccaacaccagcaucaucaaccacaaguucugcaaccugagcgacgcccacaagagaaaccuguacgaccacgcccugaugagcauccugagcaccuuccaccugagcauccccaacuucaaccaguacgaggccaugagcugcgacuucaacggcggcaagaucagcgugcaguacaaccugagccacgccuacgccguggacgccgccgagcacugcggcaccguggccaacggcgugcugcagaccuucaugagaauggccuggggcggcagcuacaucgcccuggacagcggcugcggcaacugggacugcaucaugaccagcuaccaguaccugaucauccagaacaccaccugggaggaccacugccaguucagcagacccagccccaucggcuaccugggccugcugagccagagaaccagagacaucuacaucagcagaagacugcugggcaccuucaccuggacccugagcgacagcgagggcaacgagacccccggcggcuacugccugaccagauggaugcugaucgaggccgagcugaagugcuucggcaacaccgccguggccaagugcaacgagaagcacgacgaggaguucugcgacaugcugagacuguucgacuucaacaagcaggccauccagagacugaagagccccgcccagaugagcauccagcugaucaacaaggccgugaacgcccugaucaacgaccagcugaucaugaagaaccaccugagagacaugaugugcauccccuacugcaacuacagcaaguacugguaccugaaccacaccagcagcggcagaaccagccugcccaagugcuggcuggugagcaacggcagcuaccugaacgagacccacuucagcgacgacaucgagcagcaggccgacaacaugaucaccgagaugcugcagaaggaguacaucgacagacagggcaagaccccccugggccugguggaccuguucguguucagcaccagcuucuaccugaucagcaucuuccugcaccugaucaagauccccacccacagacacaucgugggcaagcccugccccaagccccacagacugaaccacaugggcaucugcagcugcggccuguacaagcagcccggcgugcccaccagauggaagagauga

SEQ ID NO: 28139 - RNA, 1473 nt, Artificial Sequence
  derived and/or modified CDS sequence (opt4) from LASV(KAK-428;Clade n.d. (VII))__ANH09740__GPCmut5
augggccagaucgugaccuucuuccaggaggugccccacgugaucgaggaggugaugaacaucgugcugaucgcccugagccugcuggccauccugaagggccuguacaacuucgccaccugcggcgugaucggccugaucaccuuccugcugcugugcggcagaagcugcagcgccaccuacaagggccaguacgagcugcagacccuggagcugaacauggagagccugaacaugaccaugccccugagcugcaccaagaacaacagccaccacuacaucagagccggcaacaacaccggccuggagcugacccugaccaacaccagcaucaucagccacaaguucugcaaccugagcgacgcccacaagaagaaccuguacgaccacacccugaugagcaucaucaccaccuuccaccugagcauccccaacuucaaccaguacgaggccaugagcugcgacuucaacggcggcaagaucagcauccaguacaaccugagccacagcuacgccggcgacgccgcccagcacugcggcaccguggccaacggcgugcugcagaccuucaugagaauggccuggggcggcagcuaccuggcccuggacagcggcugcagaggcugggacugcaucaucagcagcuaccaguaccugaucauccagaacaccaccugggacgaccacugccaguucagcagacccagccccaucggcuaccugggcuucgugagccagaagaccagagacaucuacaucagcagaagacugcugggcaccuucaccuggacccugagcgacagcgagggccacgacaugcccggcggcuacugccugaccagauggaugcugaucgaggccgaccugaagugcuucggcaacaccgccguggccaagugcaacgagaagcacgacgaggaguucugcgacauguggagacuguucgacuucaacaagcaggccauccagagacugaaggcccccgcccagaugaacauccagcugaucaacaaggccgugaacgcccugaucaacgaccagcugaugaugaagaaccaccugagagacaucaugugcauccccuacugcaacuacagcaaguucugguaccugaacaacaccaccaccggcagaaccagccugcccagaugcuggcugaucagcaacggcagcuaccugaacgagacccacuucagcgacgacaucgagcagcaggccgacaacaugaucaccgagaugcugcagaaggaguacauggacagacagggcaagaccccccugggccugguggaccuguucguguucagcaccagcuucuaccugaucaccaucuuccugcaccuggugaagauccccacccacagacacaucgugggcaagcccugccccaagccccacagacugaaccacaugggcaucugcagcugcggccuguacaagcagcccggcgugcccgugagauggaagagauga

SEQ ID NO: 28140 - RNA, 1473 nt, Artificial Sequence; identical to SEQ ID NO: 28134
  derived and/or modified CDS sequence (opt4) from LASV(Pinneo-NIG-1969;Clade I)__AIT17836__GPCmut5

SEQ ID NO: 28141 - RNA, 1473 nt, Artificial Sequence
  derived and/or modified CDS sequence (opt4) from LASV(ISTH0009-NIG-2011;Clade II)__AIT17404__GPCmut5
augggccagaucaucaccuucuuccaggaggugccccacgugaucgaggaggugaugaacaucgugcugaucgcccugagccugcuggccauccugaagggcaucuacaacguggccaccugcggccuguucggccuggugagcuuccugcugcugugcggcagaagcugcagcaccaccuacaagggcguguacgagcugcagacccuggagcuggacauggccagccugaacaugaccaugccccugagcugcaccaagaacaacagccaccacuacaucauggugggcaacgagaccggccuggagcugacccugaccaacaccagcaucaucaaccacaaguucugcaaccugagcgacgcccacaagaagaaccuguacgaccacgcccugaugagcaucaucagcaccuuccaccugagcauccccaacuucaaccaguacgaggccaugagcugcgacuucaacggcggcaagaucagcgugcaguacaaccugagccacgccuacgccguggacgccgccaaccacugcggcaccaucgccaacggcgugcugcagaccuucaugagaauggccuggggcggcagcuacaucgcccuggacagcggcugcggcagcugggacugcaucaugaccagcuaccaguaccugaucauccagaacaccaccugggaggaccacugccaguucagcagacccagccccaucggcuaccugggccugcugagccagagaaccagagacaucuacaucagcagaagacugcugggcaccuucaccuggacccugagcgacagcgagggcaacgagacccccggcggcuacugccugaccagauggaugcugaucgaggccgagcugaagugcuucggcaacaccgccguggccaagugcaacgagaagcacgacgaggaguucugcgacaugcugagacuguucgacuucaacaagcaggccaucagaagacugaagacccccgcccagaugagcauccagcugaucaacaaggccgugaacgcccugaucaacgaccagcugaucaugaagaaccaccugagagacaucaugugcauccccuacugcaacuacagcaaguacugguaccugaaccacaccgugaccggcaagaccagccugcccagaugcuggcuggugagcaacggcagcuaccugaacgagacccacuucagcgacgacaucgagcagcaggccgacaacaugaucaccgagcugcugcagaaggaguacauggacagacagggcaagaccccccugggccugguggaccuguucguguucagcaccagcuucuaccugaucagcaucuuccugcaccugaucaagauccccacccacagacacaucaccggcaagcccugccccaagccccacagacugaaccacaugggcaucugcagcugcggccuguacaagcaccccggcgugcccgugaaguggaagagauga

SEQ ID NO: 28142 - RNA, 1473 nt, Artificial Sequence
  derived and/or modified CDS sequence (opt4) from LASV(ISTH2010-NIG-2012;Clade II)__AIT17482__GPCmut5
augggccagaucaucaccuucuuccaggaggugccccacgugaucgaggaggugaugaacaucgugcugaucgcccugagccugcuggccauccugaagggcaucuacaacguggccaccugcggccuguucggccuggugagcuuccugcugcugugcggcagaagcugcagcaccaccuacaagggcguguacgagcugcagacccuggagcuggacauggccagccugaacaugaccaugccccugagcugcaccaagaacaacagccaccacuacaucauggugggcaacgagaccggccuggagcugacccugaccaacaccagcaucaucaaccacaaguucugcaaccugagcgacgcccacaagaagaaccuguacgaccacgcccugaugagcaucaucagcaccuuccaccugagcauccccaacuucaaccaguacgaggccaugagcugcgacuucaacggcggcaagaucagcgugcaguacaaccugagccacgccuacgccguggacgccgccaaccacugcggcaccaucgccaacggcgugcugcagaccuucaugagaauggccuggggcggcagcuacaucgcccuggacagcggcugcggcagcugggacugcaucaugaccagcuaccaguaccugaucauccagaacaucaccugggaggaccacugccaguucagcagacccagccccaucggcuaccugggccugcugagccagagaaccagagacaucuacaucagcagaagacugcugggcaccuucaccuggacccugagcgacagcgagggcaacgagacccccggcggcuacugccugaccagauggaugcugaucgaggccgagcugaagugcuucggcaacaccgccguggccaagugcaacgagaagcacgacgaggaguucugcgacaugcugagacuguucgacuucaacaagcaggccaucagaagacugaagacccccgcccagaugagcauccagcugaucaacaaggccgugaacgcccugaucaacgaccagcugaucaugaagaaccaccugagagacaucaugugcauccccuacugcaacuacagcaaguacugguaccugaaccacaccgugaccggcaagaccagccugcccagaugcuggcuggugagcaacggcagcuaccugaacgagacccacuucagcgacgacaucgagcagcaggccgacaacaugaucaccgagcugcugcagaaggaguacaucgacagacagggcaagaccccccugggccugguggaccuguucguguucagcaccagcuucuaccugaucagcaucuuccugcaccuggugaagauccccacccacagacacguggugggcaagcccugccccaagccccacagacugaaccacaugggcaucugcagcugcggccuguacaagcaccccggcgugcccgugaaguggaagagauga

SEQ ID NO: 28143 - RNA, 1473 nt, Artificial Sequence
  derived and/or modified CDS sequence (opt4) from LASV(Lassa virus/H.sapiens-wt/NGA/2015/ISTH_0543;Clade II)__AVO03639__GPCmut5
augggccagaucaucaccuucuuccaggaggugccccacgugaucgaggaggugaugaacaucgugcugaucgcccugagccugcuggccauccugaagggcaucuacaacguggccaccugcggccuguucggccuggugagcuuccugcugcugugcggcagaagcugcagcaccaccuacaagggcguguacgagcugcagacccuggagcuggacauggccaaccugaacaugaccaugccccugagcugcaccaagaacaacagccaccacuacaucauggugggcaacgagaccggccuggagcugacccugaccaacaccagcaucaucaaccacaaguucugcaaccugagcgacgcccacaagaagaaccuguacgaccacgcccugaugagcaucaucagcaccuuccaccugagcauccccaacuucaaccaguacgaggccaugagcugcgacuucaacggcggcaagaucagcgugcaguacaaccugagccacaccuacgccguggacgccgccaaccacugcggcaccaucgccaacggcgugcugcagaccuucaugagaauggccuggggcggcagcuacaucgcccuggacagcggcugcggcagcugggacugcaucaugaccagcuaccaguaccuggugauccagaacaccaccugggaggaccacugccaguucagcagacccagccccaucggcuaccugggccugcugagccagagaaccagagacaucuacaucagcagaagacugcugggcaccuucaccuggacccugagcgacagcgagggcaacgagacccccggcggcuacugccugaccagauggaugcugaucgaggccgagcugaagugcuucggcaacaccgccguggccaagugcaacgagaagcacgacgaggaguucugcgacaugcugagacuguucgacuucaacaagcaggccaucagaagacugaagacccccgcccagaugagcauccagcugaucaacaaggccgugaacgcccugaucaacgaccagcugaucaugaagaaccaccugagagacaucaugugcauccccuacugcaacuacagcaaguacugguaccugaaccacaccgugaccggcaagaccagccugcccagaugcuggcuggugagcaacggcagcuaccugaacgagacccacuucagcgacgacaucgagcagcaggccgacaacaugaucaccgagcugcugcagaaggaguacaucgacagacagggcaagaccccccugggccugguggaccuguucguguucagcaccagcuucuaccugaucagcaucuuccugcaccuggugaagauccccacccacagacacaucaccggcaagcccugccccaagccccacagacugaaccacaugggcaucugcagcugcggccuguacaagcaccccggcgugcccgugaaguggaagagauga

SEQ ID NO: 28144 - RNA, 1473 nt, Artificial Sequence
  derived and/or modified CDS sequence (opt4) from LASV(Lassa virus/H.sapiens-wt/NGA/2016/ISTH_0009;Clade II)__AVO03571__GPCmut5
augggccagaucaucaccuucuuccaggaggugccccacgugaucgaggaggugaugaacaucgugcugaucgcccugagccugcuggccauccugaagggcaucuacaacguggccaccugcggccugcugggccuggugagcuuccugcugcugugcggcagaagcugcagcaccaccuacaagggcguguacgagcugcagacccuggagcuggacauggccagccugaacaugaccaugccccugagcugcaccaagaacaacagccaccacuacaucauggugggcaacgagaccggccuggagcugacccugaccaacaccagcaucaucaaccacaaguucugcaaccugagcgacgcccacaagaagaaccuguacgaccacgcccugaugagcaucaucagcaccuuccaccugagcauccccaacuucaaccaguacgaggccaugagcugcgacuucaacggcggcagaaucagcgugcaguacaaccugagccacagcuacgccguggacgccgccaaccacugcggcaccaucgccaacggcgugcugcagaccuucaugagaauggccuggggcggcagcuacaucgcccuggacagcggcugcggcagcugggacugcaucaugaccagcuaccaguaccugaucauccagaacaccaccugggaggaccacugccaguucagcagacccagccccaucggcuaccugggccugcugagccagagaaccagagacaucuacaucagcagaagacugcugggcaccuucaccuggacccugagcgacagcgagggcaacgagacccccggcggcuacugccugaccagauggaugcugaucgaggccgagcugaagugcuucggcaacaccgccguggccaagugcaacgagaagcacgacgaggaguucugcgacaugcugagacuguucgacuucaacaagcaggccaucagaagacugaagacccccgcccagaugagcauccagcugaucaacaaggccgugaacgcccugaucaacgaccagcugaucaugaagaaccaccugagagacaucaugugcauccccuacugcaacuacagcaaguacugguaccugaaccacaccgugaccggcaagaccagccugcccagaugcuggcuggugagcaacggcagcuaccugaacgagacccacuucagcgacgacaucgagcagcaggccgacaacaugaucaccgagcugcugcagaaggaguacaucgacagacagggcaagaccccccugggccugguggaccuguucguguucagcaccagcuucuaccugaucagcaucuuccugcaccuggugaagauccccacccacagacacaucaccggcaagcccugccccaagccccacagacugaaccacaugggcaucugcagcugcggccuguacaaccaccccggcgugcccgugaaguggaagagauga

SEQ ID NO: 28145 - RNA, 1473 nt, Artificial Sequence
  derived and/or modified CDS sequence (opt4) from LASV(Lassa virus/H.sapiens-wt/NGA/2016/ISTH_0017;Clade II)__AVO03567__GPCmut5
augggccagaucaucaccuucuuccaggaggugccccacgugaucgaggaggugaugaacaucgugcugaucgcccugagccugcuggccauccugaagggcaucuacaacguggccaccugcggccuguucggccuggugagcuuccugcugcugugcggcagaagcugcagcaccaccuacaagggcguguacgagcugcagacccuggagcuggacauggccagccugaacaugaccaugccccugagcugcaccaagaacaacagccaccacuacaucauggugggcaacgagaccggccuggagcugacccugaccaacaccagcaucaucaaccacaaguucugcaaccugagcgacgcccacaagaagaaccuguacgaccacgcccugaugagcaucaucagcaccuuccaccugagcauccccaacuucaaccaguacgaggccaugagcugcgacuucaacggcggcaagaucagcgugcaguacaaccugagccacaccuacgccaucgacgccgccaaccacugcggcaccaucgccaacggcgugcugcagaccuucaugagaauggccuggggcggcagcuacaucgcccuggacagcggcugcggcagcugggacugcaucaugaccagcuaccaguaccugaucauccagaacaccaccugggaggaccacugccaguucagcagacccagccccaucggcuaccugggccugcugagccagagaaccagagacaucuacaucagcagaagacugcugggcaccuucaccuggacccugagcgacagcgagggcaacgagacccccggcggcuacugccugaccagauggaugcugaucgaggccgagcugaagugcuucggcaacaccgccguggccaagugcaacgagaagcacgacgaggaguucugcgacaugcugagacuguucgacuucaacaagcaggccaucagaagacugaagacccccgcccagaugagcauccagcugaucaacaaggccgugaacgcccugaucaacgaccagcugaucaugaagaaccaccugagagacaucaugugcauccccuacugcaacuacagcaaguacugguaccugaaccacaccgugaccggcaagaccagccugcccagaugcuggcuggugagcaacggcagcuaccugaacgagacccacuucagcgacgacaucgagcagcaggccgacaacaugaucaccgagcugcugcagaaggaguacauggacagacagggcaagaccccccugggccugguggaccuguucguguucagcaccagcuucuaccugaucagcaucuuccugcaccuggugagaauccccacccacagacacgugaucggcaagcccugccccaagccccacagacugaaccacaugggcaucugcagcugcggccuguacaagcaccccggcgugcccgugaaguggaagagauga

SEQ ID NO: 28146 - RNA, 1473 nt, Artificial Sequence
  derived and/or modified CDS sequence (opt4) from LASV(Lassa virus/H.sapiens-wt/NGA/2018/ISTH_0959;Clade II)__AVV65099__GPCmut5
augggccagaucaucaccuucuuccaggaggugccccacgugaucgaggaggugaugaacaucgugcugaucgcccugagccugcuggccauccugaagggcaucuacaacguggugaccugcggccuguucggccuggugagcuuccugcugcugugcggcagaagcugcagcaccaccuacaagggcguguacgagcugcagacccuggagcuggacauggccagccugaacaugaccaugccccugagcugcaccaagaacaacagccaccacuacaucauggugggcaacgagaccggccuggagcugacccugaccaacaccagcaucaucaaccacaaguucugcaaccugagcgacgcccacaagaagaaccuguacgaccacgcccugaugagcaucaucagcaccuuccaccugagcauccccaacuucaaccaguacgaggccaugagcugcgacuucaacggcggcaagaucagcgugcaguacaaccugagccacgccuacgccaucgacgccgccaaccacugcggcaccaucgccaacggcgugcugcagaccuucaugagaauggccuggggcggcagcuacaucgcccuggacagcggcugcggcagcugggacugcaucaugaccagcuaccaguaccugaucauccagaacaccaccugggaggaccacugccaguucagcagacccagccccaucggcuaccugggccugcugagccagagaaccagagacaucuacaucagcagaagacugcugggcaccuucaccuggacccugagcgacagcgagggcaacgagacccccggcggcuacugccugaccagauggaugcugaucgaggccgagcugaagugcuucggcaacaccgccguggccaagugcaacgagaagcacgacgaggaguucugcgacaugcugagacuguucgacuucaacaagcaggccaucagaagacugaagacccccgcccagaugagcauccagcugaucaacaaggccgugaacgcccugaucaacgaccagcugaucaugaagaaccaccugagagacaucaugugcauccccuacugcaacuacagcaaguacugguaccugaaccacaccgugaccggcaagaccagccugcccagaugcuggcuggugagcaacggcagcuaccugaacgagacccacuucagcgacgacaucgagcagcaggccgacaacaugaucaccgagcugcugcagaaggaguacaucgacagacagggcaagaccccccugggccugguggaccuguucguguucagcaccagcuucuaccugaucagcaucuuccugcaccuggugaagauccccacccacagacacgugaucggcaagcccugccccaagccccacagacugaaccacaugggcaucugcagcugcggccuguacaagcaccccggcgugcccgugaaguggaagagauga

SEQ ID NO: 28147 - RNA, 1473 nt, Artificial Sequence
  derived and/or modified CDS sequence (opt4) from LASV(LASV003-NIG-2008;Clade II)__AIT17580__GPCmut5
augggccagaucaucaccuucuuccaggaggugccccacgugaucgaggaggugaugaacaucgugcugaucgcccugagccugcuggccauccugaagggcaucuacaacguggccaccugcggccuguucggccuggugagcuuccugcugcugugcggcagaagcugcagcaccaccuacaagggcguguacgagcugcagacccuggagcuggacauggccagccugaacaugaccaugccccugagcugcaccaagaacaacagccaccacuacaucauggugggcaacgagaccggccuggagcugacccugaccaacaccagcaucaucaaccacaaguucugcaaccugagcgacgcccacaagaagaaccuguacgaccacgcccugaugagcaucaucagcaccuuccaccugagcauccccaacuucaaccaguacgaggccaugagcugcgacuucaacggcggcaagaucagcgugcaguacaaccugagccacaccuacgccguggacgccgccaaccacugcggcaccaucgccaacggcgugcugcagaccuucaugagaauggccuggggcggcagcuacaucgcccuggacagcggcugcggcagcugggacugcaucaugaccagcuaccaguaccugaucauccagaacaccaccugggaggaccacugccaguucagcagacccagccccaucggcuaccugggccugcugagccagagaaccagagacaucuacaucagcagaagacugcugggcaccuucaccuggacccugagcgacagcgagagcaacgagacccccggcggcuacugccugaccagauggaugcugaucgaggccgagcugaagugcuucggcaacaccgccguggccaagugcaacgagaagcacgacgaggaguucugcgacaugcugagacuguucgacuucaacaagcaggccaucagaagacugaaggcccccgcccagaugagcauccagcugaucaacaaggccgugaacgcccugaucaacgaccagcugaucaugaagaaccaccugagagacaucaugugcauccccuacugcaacuacagcaaguacugguaccugaaccacaccgugaccggcagaaccagccugcccagaugcuggcuggugagcaacggcagcuaccugaacgagacccacuucagcgacgacaucgagcagcaggccgacaacaugaucaccgagcugcugcagaaggaguacauggacagacagggcaagaccccccugggccugguggaccuguucguguucagcaccagcuucuaccugaucagcaucuuccugcaccuggugaagauccccacccacagacacgugaucggcaagcccugccccaagccccacagacugaaccacaugggcaucugcagcugcggccuguacaagcaccccggcgugcccgugaaguggaagagauga

SEQ ID NO: 28148 - RNA, 1473 nt, Artificial Sequence
  derived and/or modified CDS sequence (opt4) from LASV(LASV035-NIG-2009;Clade II)__AIT17588__GPCmut5
augggccagaucaucaccuucuuccaggaggugccccacgugaucgaggaggugaugaacaucgugcugaucgcccugagccugcuggccauccugaagggcaucuacaacguggccaccugcggccuguucggccuggugagcuuccugcugcugugcggcagaagcugcagcaccaccuacaagggcguguacgagcugcagacccuggagcuggacauggccagccugaacaugaccaugccccugagcugcaccaagaacaacagccaccacuacaucauggugggcaacgagaccggccuggagcugacccugaccaacaccagcaucaucaaccacaaguucugcaaccugagcgacgcccacaagaagaaccuguacgaccacgcccugaugagcaucaucagcaccuuccaccugagcauccccaacuucaaccaguacgaggccaugagcugcgacuucaacggcggcaagaucagcgugcaguacaaccugagccacgccuacgccguggacgccgccaaccacugcggcaccaucgccaacggcgugcugcagaccuucaugagaauggccuggggcggcagcuacaucgcccuggacagcggcugcggcagcugggacugcaucaugaccagcuaccaguaccugaucauccagaacaccaccugggaggaccacugccaguucagcagacccagccccaucggcuaccugggccugcugagccagagaaccagagacaucuacaucagcagaagacugcugggcaccuucaccuggacccugagcgacagcgagggcaacgagacccccggcggcuacugccugaccagauggaugcugaucgaggccgagcugaagugcuucggcaacaccgccguggccaagugcaacgagaagcacgacgaggaguucugcgacaugcugagacuguucgacuucaacaagcaggccaucagaagacugaaggcccccgcccagaugagcauccagcugaucaacaaggccgugaacgcccugaucaacgaccagcugaucaugaagaaccaccugagagacaucaugugcauccccuacugcaacuacagcaaguacugguaccugaaccacaccgugaccggcaagaccagccugcccagaugcuggcuggugagcaacggcagcuaccugaacgagacccacuucagcgacgacaucgagcagcaggccgacaacaugaucaccgagcugcugcagaaggaguacaucgacagacagggcaagaccccccugggccugguggaccuguucguguucagcaccagcuucuaccugaucagcaucuuccugcaccuggugaagauccccacccacagacacgugaucggcaagcccugccccaagccccacagacugaaccacaugggcaucugcagcugcggccuguacaagcaccccggcgugcccgugaaguggaagagauga

SEQ ID NO: 28149 - RNA, 1473 nt, Artificial Sequence
  derived and/or modified CDS sequence (opt4) from LASV(LASV1000-NIG-2009;Clade II)__AIT17782__GPCmut5
augggccagaucaucaccuucuuccaggaggugccccacgugaucgaggaggugaugaacaucgugcugaucgcccugagccugcuggccauccugaagggcaucuacaacguggccaccugcggccuguucggccuggugagcuuccugcugcugugcggcagaagcugcagcaccaccuacaagggcguguacgagcugcagacccuggagcuggacauggccagccugaacaugaccaugccccugagcugcaccaagaacaacagccaccacuacaucauggugggcaacgagaccggccuggagcugacccugaccaacaccagcaucaucaaccacaaguucugcaaccugagcgacgcccacaagaagaaccuguacgaccacgcccugaugagcaucaucagcaccuuccaccugagcauccccaacuucaaccaguacgaggccaugagcugcgacuucaacggcggcaagaucagcgugcaguacaaccugagccacaccuacgccguggacgccgccaaccacugcggcaccaucgccaacggcgugcugcagaccuucaugagaauggccuggggcggcagcuacaucgcccuggacagcggcugcggcagcugggacugcaucaugaccagcuaccaguaccugaucauccagaacaccaccugggaggaccacugccaguucagcagacccagccccaucggcuaccugggccugcugagccagagaaccagagacaucuacaucagcagaagacugcugggcaccuucaccuggacccugagcgacagcgagggcaacgagacccccggcggcuacugccugaccagauggaugcugaucgaggccgagcugaagugcuucggcaacaccgccguggccaagugcaacgagaagcacgacgaggaguucugcgacaugcugagacuguucgacuucaacaagcaggccaucaagagacugaagacccccgcccagaugagcauccagcugaucaacaaggccgugaacgcccugaucaacgaccagcugaucaugaagaaccaccugagagacaucaugugcauccccuacugcaacuacagcaaguacugguaccugaaccacaccgugaccggcaagaccagccugcccagaugcuggcuggugagcaacggcagcuaccugaacgagacccacuucagcgacgacaucgagcagcaggccgacaacaugaucaccgagcugcugcagaaggaguacaucgacagacagggcaagaccccccugggccugguggaccuguucguguucagcaccagcuucuaccugaucagcaucuuccugcaccuggugaagauccccacccacagacacguggugggcaagcccugccccaagccccacagacugaaccacaugggcaucugcagcugcggccuguacaagcaccccggcgugcccgugaaguggaagagauga

SEQ ID NO: 28150 - RNA, 1473 nt, Artificial Sequence
  derived and/or modified CDS sequence (opt4) from LASV(LASV221-NIG-2010;Clade II)__AIT17624__GPCmut5
augggccagaucaucaccuucuuccaggaggugccccacgugaucgaggaggugaugaacaucgugcugaucgcccugagccugcuggccauccugaagggcaucuacaacguggccaccugcggccuguucggccuggugagcuuccugcugcugugcggcagaagcugcagcaccaccuacaagggcguguacgagcugcagacccuggagcuggacauggccagccugaacaugaccaugccccugagcugcaccaagaacaacagccaccacuacaucauggugggcaacgagaccggccuggagcugacccugaccaacaccagcaucaucaaccacaaguucugcaaccugagcgacgcccacaagaagaaccuguacgaccacgcccugaugagcaucaucagcaccuuccaccugagcauccccaacuucaaccaguacgaggccaugagcugcgacuucaacggcggcaagaucagcgugcaguacaaccugagccacaccuacgccaucgacgccgccaaccacugcggcaccaucgccaacggcgugcugcagaccuucaugagaauggccuggggcggcagcuacaucgcccuggacagcggcugcggcagcugggacugcaucaugaccagcuaccaguaccugaucauccagaacaccaccugggaggaccacugccaguucagcagacccagccccaucggcuaccugggccugcugagccagagaaccagagacaucuacaucagcagaagacugcugggcaccuucaccuggacccugagcgacagcgagggcaacgagacccccggcggcuacugccugaccagauggaugcugaucgaggccgagcugaagugcuucggcaacaccgccguggccaagugcaacgagaagcacgacgaggaguucugcgacaugcugagacuguucgacuucaacaagcaggccaucagaagacugaagacccccgcccagaugagcauccagcugaucaacaaggccgugaacgcccugaucaacgaccagcugaucaugaagaaccaccugagagacaucaugugcauccccuacugcaacuacagcaaguacugguaccugaaccacaccgugaccggcaagaccagccugcccagaugcuggcuggugagcaacggcagcuaccugaacgagacccacuucagcgacgacaucgagcagcaggccgacaacaugaucaccgagaugcugcagaaggaguacauggacagacagggcaagaccccccugggccugguggaccuguucguguucagcaccagcuucuaccugaucagcaucuuccugcaccuggugaagauccccacccacagacacgugaucggcaagcccugccccaagccccacagacugaaccacaugggcaucugcagcugcggccuguacaagcaccccggcgugcccgugaaguggaagagauga

SEQ ID NO: 28151 - RNA, 1473 nt, Artificial Sequence
  derived and/or modified CDS sequence (opt4) from LASV(LASV237-NIG-2010;Clade II)__AIT17638__GPCmut5
augggccagaucaucaccuucuuccaggaggugccccacgugaucgaggaggugaugaacaucgugcugaucgcccugagccugcuggccauccugaagggcaucuacaacguggccaccugcggccuguucggccuggugagcuuccugcugcugugcggcagaagcugcagcaccaccuacaagggcguguacgagcugcagacccuggagcuggacauggccagccugaacaugaccaugccccugagcugcaccaagaacaacagccaccacuacaucauggugggcaacgagaccggccuggagcugacccugaccaacaccagcaucaucaaccacaaguucugcaaccugagcgacgcccacaagaaggaccuguacgaccacgcccugaugagcaucaucagcaccuuccaccugagcauccccaacuucaaccaguacgaggccaugagcugcgacuucaacggcggcaagaucagcgugcaguacaaccugagccacaccuacgccguggacgccgccaaccacugcggcaccaucgccaacggcgugcugcagaccuucaugagaauggccuggggcggcagcuacaucgcccuggacagcggcugcggcagcugggacugcaucaugaccagcuaccaguaccugaucauccagaacaccaccugggaggaccacugccaguucagcagacccagccccaucggcuaccugggccugcugagccagagaaccagagacaucuacaucagcagaagacugcugggcaccuucaccuggacccugagcgacagcgagggcaacgagacccccggcggcuacugccugaccagauggaugcugaucgaggccgagcugaagugcuucggcaacaccgccguggccaagugcaacgagaagcacgacgaggaguucugcgacaugcugagacuguucgacuucaacaagcaggccaucagaagacugaagacccccgcccagaugagcauccagcugaucaacaaggccgugaacgcccugaucaacgaccagcugaucaugaagaaccaccugagagacaucaugugcauccccuacugcaacuacagcaaguacugguaccugaaccacaccgugaccggcaagaccagccugcccagaugcuggcuggugagcaacggcagcuaccugaacgagacccacuucagcgacgacaucgagcagcaggccgacaacaugaucaccgagcugcugcagaaggaguacauggacagacagggcaagaccccccugggccugguggaccuguucguguucagcaccagcuucuaccugaucagcaucuuccugcaccugaucaagauccccacccacagacacaucaccggcaagcccugccccaagccccacagacugaaccacaugggcaucugcagcugcggccuguacaagcaccccggcgugcccgugaaguggaagagauga

SEQ ID NO: 28152 - RNA, 1473 nt, Artificial Sequence
  derived and/or modified CDS sequence (opt4) from LASV(LASV253-NIG-2011;Clade II)__AIT17670__GPCmut5
augggccagaucaucaccuucuuccaggaggugccccacgugaucgaggaggugaugaacaucgugcugaucgcccugagccugcuggccauccugaagggcaucuacaacguggccaccugcggccuguucggccuggugagcuuccugcugcugugcggcagaagcugcagcaccaccuacaagggcguguacgagcugcagacccuggagcuggacauggccagccugaacaugaccaugccccugagcugcaccaagaacaacagccaccacuacaucauggugggcaacgagaccggccuggagcugacccugaccaacaccagcaucaucaaccacaaguucugcaaccugagcgacgcccacaagaagaaccuguacgaccacgcccugaugagcaucaucagcaccuuccaccugagcauccccaacuucaaccaguacgaggccaugagcugcgacuucaacggcggcaagaucagcgugcaguacaaccugagccacaccuacgccguggacgccgccaaccacugcggcaccaucgccaacggcgugcugcagaccuucaugagaauggccuggggcggcagcuacaucgcccuggacagcggcugcggcagcugggacugcaucaugaccagcuaccaguaccugaucauccagaacaccaccugggaggaccacugccaguucagcagacccagccccaucggcuaccugggccugcugagccagagaaccagagacaucuacaucagcagaagacugcugggcaccuucaccuggacccugagcgacagcgagggcaacgagacccccggcggcuacugccugaccagauggaugcugaucgaggccgagcugaagugcuucggcaacaccgccguggccaagugcaacgagaagcacgacgaggaguucugcgacaugcugagacuguucgacuucaacaagcaggccaucagaagacugaaggcccccgcccagaugagcauccagcugaucaacaaggccgugaacgcccugaucaacgaccagcugaucaugaagaaccaccugagagacaucaugugcauccccuacugcaacuacagcaaguacugguaccugaaccacaccgugaccggcagaaccagccugcccagaugcuggcuggugagcaacggcagcuaccugaacgagacccacuucagcgacgacaucgagcagcaggccgacaacaugaucaccgagcugcugcagaaggaguacaucgacagacagggcaagaccccccugggccugguggaccuguucguguucagcaccagcuucuaccugaucagcaucuuccugcaccuggugaagauccccacccacagacacaucaucggcaagcccugccccaagccccacagacugaaccacaugggcaucugcagcugcggccuguacaagcaccccggcgugcccgugaaguggaagagauga

SEQ ID NO: 28153 - RNA, 1473 nt, Artificial Sequence
  derived and/or modified CDS sequence (opt4) from LASV(LASV254-NIG-2011;Clade II)__AIT17674__GPCmut5
augggccagaucaucaccuucuuccaggaggugccccacgugaucgaggaggugaugaacaucgugcugaucgcccugagccugcuggccauccugaagggcaucuacaacguggccaccugcggccuguucggccuggugagcuuccugcugcugugcggcagaagcugcagcaccaccuacaagggcguguacgagcugcagacccuggagcuggacaugaccaaccugaacaugaccaugccccugagcugcaccaagaacaacagccaccacuacaucauggugggcaacgagaccggccuggagcugacccugaccaacaccagcaucaucaaccacaaguucugcaaccugagcgacgcccacaagaagaaccuguacaaccacgcccugaugagcaucaucagcaccuuccaccugagcauccccaacuucaaccaguacgaggccaugagcugcgacuucaacggcggcaagaucagcgugcaguacaaccugagccacagcuacgccguggacgccgccaaccacugcggcaccaucgccaacggcgugcugcagaccuucaugagaauggccuggggcggcagcuacaucgcccuggacagcggcugcggcaacugggacugcaucaugaccagcuaccaguaccugaucauccagaacaccaccugggaggaccacugccaguucagcagacccagccccaucggcuaccugggccugcugagccagagaaccagagacaucuacaucagcagaagacugcugggcaccuucaccuggacccugagcgacagcgagggcaacgagacccccggcggcuacugccugaccagauggaugcugaucgaggccgagcugaagugcuucggcaacaccgccguggccaagugcaacgagaagcacgacgaggaguucugcgacaugcugagacuguucgacuucaacaagcaggccaucagaagacugaagacccccgcccaggccaacauccagcugaucaacaaggccgugaacgcccugaucaacgaccagcugaucaugaagaaccaccugagagacaucaugugcauccccuacugcaacuacagcaaguacugguaccugaaccacaccgugaccggcaagaccagccugcccagaugcuggcuggugagcaacggcagcuaccugaacgagacccacuucagcgacgacaucgagcagcaggccgacaacaugaucaccgagcugcugcagaaggaguacauggacagacagggcaagaccccccugggccugguggaccuguucguguucagcaccagcuucuaccugaucagcaucuuccugcaccuggugaagauccccacccacagacacgugaucggcaagcccugccccaagccccacagacugaaccacaugggcaucugcagcugcggccuguacaagcaccccggcgugcccgugaaguggaagagauga

SEQ ID NO: 28154 - RNA, 1473 nt, Artificial Sequence
  derived and/or modified CDS sequence (opt4) from LASV(Nig08-A19;Clade III)__ADU56618__GPCmut5
augggccagaucgugaccuucuuccaggaggugccccacgugaucgaggaggugaugaacaucgugcugaucgcccugagcauccuggccauccugaagggccuguacaacaucgccaccugcggccugaucggccuggugaccuuccugcugcugagcggcagaagcugcagcaugaccuacaagggcguguacgagcugcagacccuggagcugaacaugaacacccugaacaugaccaugccccugagcugcaccaagaacaacagccaccacuacaucauggugggcaacgagaccggccuggagcugacccugaccaacaccagccugcugcaccacaaguucugcaaccugagcgacgcccacaagaagaaccuguacgaccacacccugaugagcaucaucagcaccuuccaccugagcauccccaacuucaaccaguacgaggccaugagcugcgacuucaacggcggcaagaucaccgugcaguacaaccugagccacagcuacgccaucgacgccgccaaccacugcggcaccguggccaacggcgugcugcagaccuucaugagaauggccuggggcggcagcuacaucgcccuggacagcggcugcggcaagugggacugcaucaugaccagcuaccaguaccugaucauccagaacaccaccugggaggaccacugccaguucagcagacccagccccaucggcuaccugggccugcugagccagagaaccagagacaucuacaucagcagaagacugcugggcaccuucaccuggacccugagcgacagcgagggcaacgagacccccggcggcuacugccugaccagauggaugcugaucgaggccgagcugaagugcuucggcaacaccgccguggccaagugcaacgagaagcacgacgaggaguucugcgacaugcugagacuguucgacuucaacaagcaggccaucagaagacugaaggcccccgcccagaugagcauccagcugaucaacaaggccgugaacgcccugaucaacgaccagcugaucaugaagaaccaccugagagacaucaugugcauccccuacugcaacuacagcaaguacugguaccugaaccacaccagcaccggcagaaccagccugcccagaugcuggcuggugagcaacggcagcuaccugaacgagacccacuucagcgacgacaucgagcagcaggccgacaacaugaucaccgagaugcugcagaaggaguaccuggacagacagggcaagaccccccugggccugguggaccuguucguguucagcaccagcuucuaccugaucagcaucuuccugcaccuggugaagauccccacccacagacacaucgugggcaagcccugccccaagccccacagacugaaccacaugggcaucugcagcugcggccuguacaagcagcccggcgugcccgugagauggaagagauga

SEQ ID NO: 28155 - RNA, 1476 nt, Artificial Sequence
  derived and/or modified CDS sequence (opt4) from LASV(G1180-SLE-2010;Clade IV)__AIT17168__GPCmut5
augggccagaucgugaccuucuuccaggaggugccccacgugaucgaggaggugaugaacaucgugcugaucgcccugagcauccuggccgugcugaagggccuguacaacuucgccaccugcggccuggugggccugcugaccuuccugcugcugugcggcagaagcugcaccgccagcagauacaagggcguguacgagcugcagacccuggagcugaacauggagacccugaacaugaccaugccccugagcugcaccaagaacaacagccaccacuacaucauggugggcaacgagaccggccuggagcugacccugaccaacaccagcaucaucaaccacaaguucugcaaccugagcgacgcccacaagaagaaccuguacgaccacgcccugaugagcaucaucagcaccuuccaccugagcauccccaacuucaaccaguacgaggccaugagcugcgacuucaacggcggcaagaucagcgugcaguacaaccugagccacagcuacgccggcgacgccgccaaccacugcggcaccguggccaacggcgugcugcagaccuucaugagaauggccuggggcggcagcuacaucgcccuggacagcggcugcggcagcugggacugcaucaugaccagcuaccaguaccugaucauccagaacaccaccugggaggaccacugccaguucagcagacccagccccaucggcuaccugggccugcugagccagagaaccagagacaucuacaucagcagaagacugcugggcaccuucaccuggacccugagcgacagcgagggcaaggacacccccggcggcuacugccugaccagauggaugcugaucgaggccgagcugaagugcuucggcaacaccgccguggccaagugcaacgagaagcacgacgaggaguucugcgacaugcugagacuguucgacuucaacaagcaggccauccagagacugaaggcccccgcccagaugagcauccagcugaucaacaaggccgugaacgcccugaucaacgaccagcugaucaugaagaaccaccugagagacaucaugugcauccccuacugcaacuacagcaaguacugguaccugaaccacaccaccaccggcaagaccagccugcccaagugcuggcuggugagcaacggcagcuaccugaacgagacccacuucagcgacgacaucgagcagcaggccgacaacaugaucaccgagaugcugcagaaggaguacauggagagacagggcaagaccccccugggccugguggaccuguucguguucagcaccagcuucuaccugaucagcaucuuccugcaccuggugaagauccccacccacagacacaucgugggcaagagcugccccaagccccacagacugaaccacaugggcaucugcagcugcggccuguacaagcagcccggcgugcccgugaaguggaagagauga

SEQ ID NO: 28156 - RNA, 1476 nt, Artificial Sequence
  derived and/or modified CDS sequence (opt4) from LASV(G1442-SLE-2011;Clade IV)__AIT17180__GPCmut5
augggccagaucgugaccuucuuccaggaggugccccacgugaucgaggaggugaugaacaucgugcugaucgcccugagcauccuggccgugcugaagggccuguacaacguggccaccugcggccugaucggccuggugaccuuccugcugcugugcggcagaagcugcaccaccacccuguacaagggcguguacgagcugcagacccuggagcugaacauggagacccugaacaugaccaugccccugagcugcaccaagaacaacagccaccacuacaucagagugggcaacgagaccggccuggagcugacccugaccaacaccagcaucaucaaccacaaguucugcaaccugagcgacgcccacaagaagaaccuguacgaccacgcccugaugagcaucaucagcaccuuccaccugagcauccccaacuucaaccaguacgaggccaugagcugcgacuucaacggcggcaagaucagcgugcaguacaaccugagccacagcuacgccggcgacgccgccaaccacugcggcaccguggccaacggcgugcugcagaccuucaugagaauggccuggggcggcagcuacaucgcccuggacagcggcugcggcaacugggacugcaucaugaccagcuaccaguaccugaucauccagaacaccaccugggacgaccacugccaguucagcagacccagccccaucggcuaccugggccugcugagccagagaaccagagacguguacaucagcagaagacugcugggcaccuucaccuggacccugagcgacagcgagggcaaggacacccccggcggcuacugccugaccagauggaugcugaucgaggccgagcugaagugcuucggcaacaccgccguggccaagugcaacgagaagcacgacgaggaguucugcgacaugcugagacuguucgacuucaacaagcaggccauccagagacugaaggcccccgcccagaugagcauccagcugaucaacaaggccgugaacgcccugaucaacgaccagcugaucaugaagaaccaccugagagacaucaugugcauccccuacugcaacuacagcaaguacugguaccugaacaacaccgccaccggcaagaccagccugcccaagugcuggcugaucagcaacggcagcuaccugaacgagacccacuucagcgacgacaucgagcaggaggccgacaacaugaucaccgagaugcugcagaaggaguacauggagagacagggcaagaccccccugggccugguggaccuguucguguucagcaccagcuucuaccugaucagcaucuuccugcaccuggugaagauccccacccacagacacaucgugggcaagagcugccccaagccccacagacugaaccacaugggcaucugcagcugcggccuguacaagcagcccggcgugcccgugagauggaagagauga

SEQ ID NO: 28157 - RNA, 1476 nt, Artificial Sequence
  derived and/or modified CDS sequence (opt4) from LASV(G3010-SLE-2013;Clade IV)__AIT17344__GPCmut5
augggccagaucgugaccuucuuccaggaggugccccacgugaucgaggaggugaugaacaucgugcugaucgcccugagcauccuggccgugcugaagggccuguacaacuucgccaccugcggccuggugggccuggugaccuuccugcugcugugcggcagaagcugcaccaccagccuguacaagggcguguacgagcugcagacccuggagcugaacauggagacccugaacaugaccaugccccugagcugcaccaagaacaacagccaccacuacaucauggugggcaacgagaccggccuggagcugacccugaccaacaccagcaucaucaaccacaaguucugcaaccugagcgacgcccacaagaagaaccuguacaaccacgcccugaugagcaucaucagcaccuuccaccugagcauccccaacuucaaccaguacgaggccaugagcugcgacuucaacggcggcaagaucagcgugcaguacaaccugagccacagcuacgccggcgacgccgccagccacugcggcaccguggccaacggcgugcugcagaccuucaugagaauggccuggggcggcagcuacaucgcccuggacagcggcugcggcaagugggacugcaucaugaccagcuaccaguaccugaucauccagaacaccaccugggaggaccacugccaguucagcagacccagccccaucggcuaccugggccugcugagccagagaaccagagacaucuacaucagcagaagacugcugggcaccuucaccuggacccugagcgacagcgagggcaaggacacccccggcggcuacugccugaccagauggaugcugaucgaggccgagcugaagugcuucggcaacaccgccguggccaagugcaacgagaagcacgacgaggaguucugcgacaugcugagacuguucgacuucaacaagcaggccauccagagacugaagacccccgcccagaugagcauccagcugaucaacaaggccgugaacgcccugaucaacgaccagcugaucaugaagaaccaccugagagacaucaugugcauccccuacugcaacuacagcaaguacugguaccugaaccacaccaccaccggcaagaccagccugcccaagugcuggcuggugagcaacggcagcuaccugaacgagacccacuucagcgacgacaucgagcagcaggccgacaacaugaucaccgagaugcugcagaaggaguacauggagagacagggcaagaccccccugggccugguggaccuguucguguucagcaccagcuucuaccugaucagcaucuuccugcaccuggugaagauccccacccacagacacaucgugggcaagagcugccccaagccccacagacugaaccacaugggcaucugcagcugcggccuguacaagcagcccggcgugcccgugagauggaagagauga

SEQ ID NO: 28158 - RNA, 1476 nt, Artificial Sequence
  derived and/or modified CDS sequence (opt4) from LASV(G502-SLE-2009;Clade IV)__AIT17126__GPCmut5
augggccagaucgugaccuucuuccaggaggugccccacgugaucgaggaggugaugaacaucgugcugaucgcccugagcauccuggccgugcugaagggccuguacaacuucgccaccugcggccuggugggccugcugaccuuccugcugcugugcggcagaagcugcaccaccggccuguacaagggcguguacgagcugcagacccuggagcugaacauggagacccugaacaugaccaugccccugagcugcaccaagaacaacagccaccacuacaucauggugggcaacgagaccggccuggagcugacccugaccaacaccagcaucaucaaccacaaguucugcaaccugagcgacgcccacaagaagaaccuguacgaccacgcccugaugagcaucaucagcaccuuccaccugagcauccccaacuucaaccaguacgaggccaugagcugcgacuucaacggcggcaagaucagcgugcaguacaaccugagccacagcuacgccggcgacgccgccgaccacugcggcaccguggccaacggcgugcugcagaccuucaugagaauggccuggggcggcagcuacaucgcccuggacagcggcugcggcagaugggacugcaucaugaccagcuaccaguaccugaucauccagaacaccaccugggaggaccacugccaguucagcagacccagccccaucggcuaccugggccugcugagccagagaaccagagacaucuacaucagcagaagacugcugggcaccuucaccuggacccugagcgacagcgagggcaaggacacccccggcggcuacugccugaccagauggaugcugaucgaggccgagcugaagugcuucggcaacaccgccguggccaagugcaacgagaagcacgacgaggaguucugcgacaugcugagacuguucgacuucaacaagcaggccauccagagacugaaggcccccgcccagaugagcauccagcugaucaacaaggccgugaacgcccugaucaacgaccagcuggugaugaagaaccaccugagagacaucaugugcauccccuacugcaacuacagcagauacugguaccugaaccacaccaccaccggcagaaccagccugcccaagugcuggcuggugagcaacggcagcuaccugaacgagacccacuucagcgacgacaucgagcagcaggccgacaacaugaucaccgagaugcugcagaaggaguacauggagagacagggcaagaccccccugggccugguggaccuguucguguucagcaccagcuucuaccugaucagcaucuuccugcaccuggugaagauccccacccacagacacaucgugggcaagagcugccccaagccccacagacugaaccacaugggcaucugcagcugcggccuguacaagcagcccggcgugcccgugaaguggaagagauga

SEQ ID NO: 28159 - RNA, 1476 nt, Artificial Sequence
  derived and/or modified CDS sequence (opt4) from LASV(G733-SLE-2010;Clade IV)__AIT17154__GPCmut5
augggccagaucgugaccuucuuccaggaggugccccacgugaucgaggaggugaugaacaucgugcugaucgcccugagcauccuggccgugcugaagggccuguacaacuucgccaccugcggcaucgugggccuggugagcuuccugcugcugugcggcagaagcugcaccaccagccuguacaagggcguguacgagcugcagacccuggagcugaacauggagacccugaacaugaccaugccccugagcugcaccaagaacaacagccaccacuacaucauggugggcaacgagaccggccuggagcugacccugaccaacaccagcaucaucaaccacaaguucugcaaccugagcgacgcccacaagaagaaccuguacgaccacgcccugaugagcaucaucagcaccuuccaccugagcauccccaacuucaaccaguacgaggccaugagcugcgacuucaacggcggcaagaucagcgugcaguacaaccugagccacagcuacgccggcgacgccgccaaccacugcggcaccaucgccaacggcgugcugcagaccuucaugagaauggccuggggcggcagcuacaucgcccuggacagcggcugcgacagaugggacugcaucaugaccagcuaccaguaccugaucauccagaacaccaccugggaggaccacugccaguucagcagacccagccccaucggcuaccugggccugcugagccagagaaccagagacaucuacaucagcagaagacugcugggcaccuucaccuggacccugagcgacagcgagggcaaggacacccccggcggcuacugccugaccagauggaugcugaucgaggccgagcugaagugcuucggcaacaccgccguggccaagugcaacgagaagcacgacgaggaguucugcgacaugcugagacuguucgacuucaacaagcaggccauccagagacugaaggcccccgcccagaugagcauccagcugaucaacaaggccgugaacgcccugaucaacgaccagcugaucaugaagaaccaccugagagacaucaugugcauccccuacugcaacuacagcaaguacugguaccugaaccacaccaccaccggcaagaccagccugcccaagugcuggcuggugagcaacggcagcuaccugaacgagacccacuucagcgacgacaucgagcagcaggccgacaacaugaucaccgagaugcugcagaaggaguacauggagagacagggcaagaccccccugggccugguggaccuguucguguucagcaccagcuucuaccugaucagcaucuuccugcaccuggugaagauccccacccacagacacguggugggcaagagcugccccaagccccacagacugaaccacaugggcaucugcagcugcggccuguacggccagcccggcgugcccgugaaguggaagagauga

SEQ ID NO: 28160 - RNA, 1476 nt, Artificial Sequence
  derived and/or modified CDS sequence (opt4) from MOPV/LASV reassortant(IGS-1;Clade IV)__AFY05576__GPCmut5
augggccagaucgugaccuucuuccaggaggugccccacgugaucgaggaggugaugaacaucgugcugaucgcccugagcgugcuggccgugcugaagggccuguacaacuucgccaccugcggccuggugggccuggugaccuuccugcugcugugcggcagaagcugcaccaccagccuguacaagggcguguacgagcugcagacccuggagcugaacauggagacccugaacaugaccaugccccugagcugcaccaagaacaacagccaccacuacaucauggugggcaacgagaccggccuggagcugacccugaccaacaccagcaucaucaaccacaaguucugcaaccugagcgacgcccacaagaagaaccuguacgaccacgcccugaugagcaucaucagcaccuuccaccugagcauccccaacuucaaccaguacgaggccaugagcugcgacuucaacggcggcaagaucagcgugcaguacaaccugagccacagcuacgccggcgacgccgccaaccacugcggcaccguggccaacggcgugcugcagaccuucaugagaauggccuggggcggcagcuacaucgcccuggacagcggcugcggcaacugggacugcaucaugaccagcuaccaguaccugaucauccagaacaccaccugggaggaccacugccaguucagcagacccagccccaucggcuaccugggccugcugagccagagaaccagagacaucuacaucagcagaagacugcugggcaccuucaccuggacccugagcgacagcgagggcgaggacacccccggcggcuacugccugaccagauggaugcugaucgaggccgagcugaagugcuucggcaacaccgccguggccaagugcaacgagaagcacgacgaggaguucugcgacaugcugagacuguucgacuucaacaagcaggccauccagagacugaaggcccccgcccagaugagcauccagcugaucaacaaggccgugaacgcccugaucaacgaccagcugaucaugaagaaccaccugagagacaucaugugcauccccuacugcaacuacagcaaguacugguaccugaaccacaccaccaccggcagaaccagccugcccaagugcuggcuggugagcaacggcagcuaccugaacgagacccacuucagcgacgacaucgagcagcaggccgacaacaugaucaccgagaugcugcagaaggaguacauggagagacagggcaagaccccccugggccugguggaccuguucguguucagcaccagcuucuaccugaucagcaucuuccugcaccuggugaagauccccacccacagacacaucgugggcaagagcugccccaagccccacagacugaaccacaugggcaucugcagcugcggccuguacaagcagcccggcgugcccgugaaguggaagagauga

SEQ ID NO: 28161 - RNA, 1476 nt, Artificial Sequence
  derived and/or modified CDS sequence (opt4) from LASV(LM765-SLE-2012;Clade IV)__AIT17814__GPCmut5
augggccagaucgugaccuucuuccaggaggugccccacgugaucgaggaggugaugaacaucgugcugaucgcccugagcauccuggccgugcugaagggccuguacaacuucgccaccugcggccuggugggccuggugaccuuccugcugcugugcggcagaagcugcaccaccagccuguacaagggcguguacgagcugcagacccuggagcugaacauggagacccugaacaugaccaugccccugagcugcaccaagaacaacagccaccacuacaucauggugggcaacgagaccggccuggagcugacccugaccaacaccagcaucaucgaccacaaguucugcaaccugagcgacgcccacagaaagaaccuguacgaccacgcccugaugagcaucaucagcaccuuccaccugagcauccccaacuucaaccaguacgaggccaugagcugcgacuucaacggcggcaagaucagcgugcaguacaaccugagccacagcuacgccaaggacgccgccgaccacugcggcaccguggccaacggcgugcugcagaccuucaugagaauggccuggggcggcagcuacaucgcccuggacagcggcugcggcagaugggacugcaucaugaccagcuaccaguaccugaucauccagaacaccaccugggaggaccacugccaguucagcagacccagccccaucggcuaccugggccugcugagccagagaaccagagacaucuacaucagcagaagacugcugggcaccuucaccuggacccugagcgacagcgagggcaaggacacccccggcggcuacugccugaccagauggaugcugaucgaggccgagcugaagugcuucggcaacaccgccguggccaagugcaacgagaagcacgacgaggaguucugcgacaugcugagacuguucgacuucaacaagcaggccauccagagacugaaggcccccgcccagaugagcauccagcugaucaacaaggccgugaacgcccugaucaacgaccagcugaucaugaagaaccaccugagagacaucaugugcauccccuacugcaacuacagcaaguacugguaccugaaccacaccaccaccggcaagaccagccugcccaagugcuggcuggugagcaacggcagcuaccugaacgagacccacuucagcgacgacaucgagcagcaggccgacaacaugaucaccgagaugcugcagaaggaguacauggagagacagggcaagaccccccugggccugguggaccuguucguguucagcaccagcuucuaccugaucagcaucuuccugcaccuggugaagauccccacccacagacacaucgugggcaagcccugccccaagccccacagacugaaccacaugggcaucugcagcugcggccuguacaagcagcccggcgugcccgugaaguggaagagauga

SEQ ID NO: 28162 - RNA, 1476 nt, Artificial Sequence
  derived and/or modified CDS sequence (opt4) from LASV(LM776-SLE-2012;Clade IV)__AIT17824__GPCmut5
augggccagaucgugaccuucuuccaggaggugccccacgugaucgaggaggugaugaacaucgugcugaucgcccugagcauccuggccgugcugaagggccuguacaacuucgccaccugcggccuggugggccuggugaccuuccugcugcugugcggcagaagcugcaccaccagcguguacaagggcguguacgagcugcagacccuggagcugaacauggagacccugaacaugaccaugccccugagcugcaccaagaacaacagccaccacuacaucauggugggcaacgagaccggccuggagcugacccugaccaacaccagcaucaucaaccacaaguucugcaaccugagcgacgcccacaagaagaaccuguacgaccacgcccugaugagcaucaucagcaccuuccaccugagcauccccaacuucaaccaguacgaggccaugagcugcgacuucaacggcggcaagaucagcgugcaguacaaccugagccacagcuacgccggcgacgccgccaaccacugcggcaccguggccaacggcgugcugcagaccuucaugagaauggccuggggcggcagcuacaucgcccuggacagcggcugcggcaagugggacugcaucaugaccagcuaccaguaccugaucauccagaacaccaccugggaggaccacugccaguucagcagacccagccccaucggcuaccugggccugcugagccagagaaccagagacaucuacaucagcagaagacugcugggcaccuucaccuggacccugagcgacagcgagggcaaggacacccccggcggcuacugccugaccagauggaugcugaucgaggccgagcugaagugcuucggcaacaccgccguggccaagugcaacgagaagcacgacgaggaguucugcgacaugcugagacuguucgacuucaacaagcaggccauccagagacugaaggcccccgcccagaugagcauccagcugaucaacaaggccgugaacgcccugaucaacgaccagcugaucaugaagaaccaccugagagacaucaugugcauccccuacugcaacuacagcaaguacugguaccugaaccacaccaccaccggcaagaccagccugcccaagugcuggcuggugagcaacggcagcuaccugaacgagacccacuucagcgacgacaucgagcagcaggccgacaacaugaucaccgagaugcugcagaaggaguacauggagagacagggcaagaccccccugggccugguggaccuguucguguucagcaccagcuucuaccugaucagcaucuuccugcaccuggugaagauccccacccacagacacaucgugggcaagagcugccccaagccccacagacugaaccacaugggcaucugcagcugcggccuguacaagcagcccggcgugcccgugagauggaagagauga

SEQ ID NO: 28163 - RNA, 1476 nt, Artificial Sequence
  derived and/or modified CDS sequence (opt4) from LASV(Mad39;Clade IV)__ANH09722__GPCmut5
augggccagaucgugaccuucuuccaggaggugccccacgugaucgaggaggugaugaacaucgugcugaucgcccugagcauccuggccgugcugaagggccuguacaacguggccaccugcggccugaucggccuggugaccuuccugcugcugugcggcagaagcugcaccaccacccuguacaagggcguguacgagcugcaggcccuggagcugaacauggagacccugaacaugaccaugccccugagcugcaccaagaacaacagccaccacuacaucagagugggcaacgagaccggccuggagcugacccugaccaacaccagccugaucaaccacaaguucugcaaccugagcgacgcccacaagaagaaccuguacgaccacgcccugaugagcaucaucagcaccuuccaccugagcauccccaacuucaaccaguacgaggccaugagcugcgacuucaacgacggcaagaucagcgugcaguacaaccugagccacaccuacgccggcgacaccgccaaccacugcggcaccguggccaacggcgugcugcagaccuucaugagaauggccuggggcggcagcuacaucgcccuggacagcggcugcggcggcugggacugcaucaugaccagcuaccaguaccugaucauccagaacaccaccugggaggaccacugccaguucagcagacccagccccaucggcuaccugggccugcugagccagagaaccagagacaucuacaucagcagaagacugcugggcaccuucaccuggacccugagcgacagcgagggcaaggacacccccggcggcuacugccugaccagauggaugcugaucgaggccgagcugaagugcuucggcaacaccgccguggccaagugcaacgagaagcacgacgaggaguucugcgacaugcugagacuguucgacuucaacaagcaggccauccagagacugaaggcccccgcccagaugagcauccagcugaucaacaaggccgugaacgcccugaucaacgaccagcugaucaugaagaaccaccugagagacaucaugugcauccccuacugcaacuacagcaaguacugguaccugaaccacaccgugaccggcaagaccagccugcccaagugcuggcuggugagcaacggcagcuaccugaacgagacccacuucagcgacgacaucgagcagcaggccgacaacaugaucaccgagaugcugcagaaggaguacauggagagacagggcaagaccccccugggccugguggaccuguucguguucagcaccagcuucuaccugaucagcaucuuccugcaccuggugaagauccccacccacagacacguggugggcaagcccugccccaagccccacagacugaaccacaugggcaucugcagcugcggcuucuacaagcagcccggcgugcccgugagauggaagagauga

SEQ ID NO: 28164 - RNA, 1476 nt, Artificial Sequence
  derived and/or modified CDS sequence (opt4) from LASV(Z0947-SLE-2011;Clade IV)__AIT17840__GPCmut5
augggccagaucgugaccuucuuccaggaggugccccacgugaucgaggaggugaugaacaucgugcugaucgcccugagcauccuggccgugcugaagggccuguacaacuucgccaccugcggccuggugggccuggugaccuuccugcugcugugcggcagaagcugcaccaucagccuguacaagggcguguacgagcugcagacccuggagcugaacauggagacccugaacaugaccaugccccugagcugcaccaagaacaacagccaccacuacaucauggugggcaacgagaccggccuggagcugacccugaccaacaccagcaucaucaaccacaaguucugcaaccugagcgacgcccacaagaagaaccuguacgaccacgcccugaugagcaucaucagcaccuuccaccugagcauccccaacuucaaccaguacgaggccaugagcugcgacuucaacggcggcaagaucagcgugcaguacaaccugagccacagcuacgccggcgacgccgccaaccacugcggcaccguggccaacggcgugcugcagaccuucaugagaauggccuggggcggcagcuacaucgcccuggacagcggcugcgacagaugggacugcaucaugaccagcuaccaguaccugaucauccagaacaccaccugggaggaccacugccaguucagcagacccagccccaucggcuaccugggccugcugagccagagaaccagagacaucuacaucagcagaagacugcugggcaccuucaccuggacccugagcgacagcgagggcaaggacacccccggcggcuacugccugaccagauggaugcugaucgaggccgagcugaagugcuucggcaacaccgccguggccaagugcaacgagaagcacgacgaggaguucugcgacaugcugagacuguucgacuucaacaagcaggccauccagagacugaaggcccccgcccagaugagcauccagcugaucaacaaggccgugaacgcccugaucaacgaccagcugaucaugaagaaccaccugagagacaucaugugcauccccuacugcaacuacagcaaguacugguaccugaaccacaccaccaccggcaagaccagccugcccaagugcuggcuggugagcaacggcagcuaccugaacgagacccacuucagcgacgacaucgagcagcaggccgacaacaugaucaccgagaugcugcagaaggaguacauggagagacagggcaagaccccccugggccugguggaccuguucguguucagcaccagcuucuaccugaucagcaucuuccugcaccuggugaagauccccacccacagacacaucgugggcaagcccugccccaagccccacagacugaaccacaugggcaucugcagcugcggccuguacaagcagcccggcgugcccgugaaguggaagagauga

SEQ ID NO: 28165 - RNA, 1476 nt, Artificial Sequence
  derived and/or modified CDS sequence (opt5) from LASV(Josiah;Clade IV)__NP_694870__GPCmut5
augggccagaucgugaccuucuuucaagaggucccccacguuauugaagaggugaugaacaucgugcugauugcccucagcguccuggcugugcuuaaggggcuguacaauuucgccacaugcggacucguuggccuggugacguuucuucugcucugugggagauccugcaccacaucucuguauaaaggagucuacgaacugcagacccucgagcugaacauggaaacacuuaauaugaccaugccucugagcuguacaaagaacaauucccaucacuauaucauggugggcaacgagaccgggcucgagcugacgcuuaccaauacaucuauuaucaaccauaaauucugcaaucugagcgacgcgcacaagaaaaaccucuacgaucaugcucugauguccaucauuucuaccuuucaccugagcaucccgaauuucaaccaguaugaagccauguccugugacuuuaauggaggcaagauuagcguucaguacaaccucucucacuccuaugccggcgaugcugccaaucauugcgggacaguggcuaacggaguccugcaaaccuucaugcggauggccuggggcgggagcuacaucgcgcuugacucuggauguggcaacugggauugcauuaugacguccuaccaguaucugaucauucagaauacaaccugggaggaccacugucaguuuagccgccccucuccuaucggguaccucggacugcuuucccaaagaacacgggauaucuauauuagccgcagacugcucggcaccuucaccuggacacuguccgacucugaaggcaaggauacgcccgggggauacugccugacccgguggaugcucaucgaggccgagcugaaauguuuuggcaacacagcuguggccaagugcaaugaaaaacaugacgaggaguucugcgauaugcuucgccuguuugacuucaacaagcaggcuauucagagacucaaagccccugcgcagaugagcauccaacugauuaauaaggccgugaacgcucuuaucaaugaucagcugaucaugaagaaccaccuccgggacauuauguguauccccuauugcaauuacuccaaauauugguaccugaaccacaccacaaccgggcgcacgagccugccuaaguguuggcucgucucuaauggauccuaccugaacgaaacacauuucagcgacgauauugaacagcaagccgacaauaugaucaccgagaugcuucagaaagaguauauggaaagacagggcaagaccccgcuggggcucguugaucuguuuguguucucuaccagcuuuuaccugauuuccaucuuccuucaccucgugaaaauccccacacaucggcacauugucggaaagucuugcccuaaaccccaucgccugaaccacaugggcaucuguagcugcggccuguauaagcagccuggggugcccguuaaguggaaaagauga

SEQ ID NO: 28166 - RNA, 1473 nt, Artificial Sequence
  derived and/or modified CDS sequence (opt5) from LASV(LP;Clade I)__AAF86701__GPCmut5
augggccagaucauuaccuucuuucaagaggugccccacgucaucgaagagguuaugaacauugugcugaucgcccucagccugcuugcuauucugaaggggcucuacaauaucgccacaugcggaaucauuggccugguggcguuccuuuuucugugugggaaauccugcucucucacgcugaagggaggcuaugaacugcagacccucgagcugaacauggaaacacuuaauaugaccaugccucugagcuguaccaaaaacuccucucaucacuacaucagagucgggaaugagacaggacucgagcugacacuuaccaacacgagcauuaucaaucauaaguucugcaaccuguccgacgcucacaaaaagaaucucuaugaucaugcccugaugucuauuaucagcaccuuucaccuguccauuccgaacuucaaucaguacgaagccaugagcugugacuuuaacggcggcaagaucucugugcaguauaaucucucccacagcuacgcuggggaugccgcugagcauugcggaacaguugccaacggcgugcugcaaaccuucaugcggauggcguggggagggcgcuauaucgcccuugacucuggcugugggaauugggauugcauuaugacauccuaccaguaccugaucauucagaacaccacgugggaagaccacugucaguuuagcagacccucuccuaucggauaucucggccugcuuucccaacggacacgcgauauuuacaucagcagacggcugcucggcaccuucacauggacccuguccgacucugaggggaacgagacccccggaggcuauugccugacacgcuggaugcucaucgaagcugagcugaaauguuuugggaauacggccgucgcuaagugcaacgaaaaacaugaugaggaguucugcgacaugcuuagacuguuugauuucaauaagcaggccauucggcgccucaaagcgccugcccagaugagcauccagcugauuaacaaggcugugaaugcccuuaucaacgaccaacugauuaugaagaaucaccucagagauaucauguguauccccuacugcaacuauuccaaauacugguaucugaaucacaccagcucuggacggacaucccugccuaaguguuggcucauuagcaacggcucuuaccugaaugaaacccaguucagcgacgacaucgagcagcaagcugauaacaugauuacagaaaugcuucagaaagaguacaucgaacgccaggggaagaccccgcugggacucguugacauuuuuaucuucuccacgucuuuuuaucugauuagcaucuuccugcaucuuaucaaaauucccacacacagacauaucgugggcaagccuugccccaaaccucaccggcucaaucauaugggcgucuguuccugcgggcuguacaagcaccccggagugccgaccaaguggaaacgcuga

SEQ ID NO: 28167 - RNA, 1473 nt, Artificial Sequence
  derived and/or modified CDS sequence (opt5) from LASV(803213;Clade II)__AAF86703__GPCmut5
augggccagaucauuaccuucuuucaagaggugccccacgucaucgaagagguuaugaacauugugcugaucgcccucagccugcuugcuauucugaaggggaucuacaauguggccacaugcggacucuucggccugaucuccuuucuucugcucugugggagaucuugcagcgucacguauaaaggaguguacgaacugcagacccuggagcucaacauggcgaaucugaacaugacaaugccucuuuccuguaccaagaauaacucucaucacuauauuaugguuggcaaugaaacagggcuggagcucacccugacaaacaccagcaucauuaaucauaaauucugcaaccuuuccgacgcucacaagaaaaaucuguacgaucaugcccucaugucuaucauuagcacguuucaccuguccaucccgaacuucaaucaguaugaggccaugagcugugacuuuaacggaggcaagauuucugugcaguacaaucugucccacagcuucgcugucgaugccgcuaaccauugcggcaccaucgccaacggggugcuccaaacauuuaugcggauggcguggggaggcucuuauaucgcccuggacuccggguguggaaauugggauugcauuaugaccagcuaccaguaccuuaucauucagaacacaaccugggaagaccacugucaguucucucgccccuccccuaucggcuaucuggggcuccugagccaaagaacgcgggauauuuacaucucccgcagacuucugggaacauuuaccuggacacucucugacagcgagggcaaugaagcucccggcggguauugccugacccgguggaugcugaucgaggccgagcucaaguguuucggaaacaccgcuguugccaaaugcaaugaaaagcaugaugaggaauuuugcgacaugcugcgccuuuucgauuucaacaaacaggcgauuaagagacugaaaacgccugcccagauguccauccagcucauuaauaaggcugugaacgcccugaucaaugaccaacuuauuaugaagaaccaucugcgggauaucauguguauccccuacugcaauuauagccgcuacugguaucucaaccacacagucaccggcaaaacaucucugccuagauguuggcugguguccaaugggagcuaccucaacgagacccacuuuucugacgacauugaacagcaggcugauaauaugaucacagagaugcugcaaaaggaguacauggaccggcagggaaaaaccccgcuuggccugguggaucucuucgucuuuagcacguccuucuaucugauuucuaucuuucugcaccuuguuaagauucccacacaucgccacaucguggggaaaccuugccccaagccucauagacucaaccacaugggaauuuguagcugcggccuguacaaacaccccggcgugccggucaaguggaagcgguga

SEQ ID NO: 28168 - RNA, 1473 nt, Artificial Sequence
  derived and/or modified CDS sequence (opt5) from LASV(GA391;Clade III)__CAA36645__GPCmut5
augggccagaucgugaccuucuuucaagaggucccccacguuauugaagaggugaugaacaucgugcugauugcccucagcauccuggcuauucuuaaggggcuguacaaugucgccacaugcggacucaucggccuggugacguuccuucugcucuccgggagaucuuguagccugaucuauaaaggaaccuacgaacugcagacacucgagcugaacauggaaacccuuaauaugacaaugccucuguccugcaccaagaacaauucucaucacuauauucggguuggcaacgagacagggcucgagcugacccuuacgaauaccagcauccugaaccauaaauuuuguaaucucuccgacgcgcacaagcgcaaccuguacgaucauucucugaugagcauuaucuccacauuccaccucagcauuccgaauuuuaaccaguaugaagcuaugucuugcgacuucaauggaggcaaaaucaccgugcaguacaaccugucccacagcuuugccgucgaugccgcuggccauugugggacacuugccaauggagugcugcaaaccuucaugagaauggcuuggggcgggucuuauauugcccucgacuccggaugcggcaacugggauuguaucaugacgagcuaccaguaccugaucauucagaacacaaccugggacgaucacugccaguuuucucggcccuccccuaucggguaucuuggacugcucagccaacgcacaagagacauuuacaucucccggcgccugcugggcaccuucaccuggacacucucugauagcgagggcaaugaaacgcccgggggauauugucugaccagauggaugcuuauugaggcggagcugaagugcuuuggcaacacagccguugcuaaguguaaugaaaaacaugacgaggaguucugcgauaugcuccggcuguuugacuucaacaagcaggccauccgcagacuuaaaaccccugcucagauguccauccagcugauuaauaaggccgugaacgcgcucaucaaugaucaacugauuaugaaaaaccaucugcgggacaucaugugcauucccuacuguaauuauagccgcuacugguaucucaaccacacaucuaccgggaagacgucccugccuagaugcuggcuuaucagcaauggaucuuaccugaacgaaacaaaguucagcgacgauaucgaacagcaggccgacaauaugauuaccgagaugcuccaaaaagaguacaucgaucggcagggcaagaccccgcuggggcuggucgaccuuuuuguguucuccacaucuuuuuaucucauuagcaucuuccugcaccuggugaaaauucccacccaccgccauaucgucggaaagccuugucccaaaccucacagacucaaccauaugggcauuugcuccuguggccuguacaagcagcccgggguuccggugcgguggaaaagauga

SEQ ID NO: 28169 - RNA, 1476 nt, Artificial Sequence
  derived and/or modified CDS sequence (opt5) from LASV(AV;Clade V)__CCA30314__GPCmut5
augggccagaucgugaccuucuuucaagaggucccccacguuauugaagaggugaugaacaucgugcugauugcccucagcauccuggcuguccuuaaggggcuguacaauauugccacaugcggacucaucggccugaucacguuccuucugcucugugggagauccugcucuagcaaccuguauaaaggaguguacgaacugcagucccucgaccugaauauggagacccuuaacaugacaaugccucugucuuguaccaagaauaacagccaucacuauauucggguuggcaaugauacagggcucgaacugacccuuacaaacaccuccauccugaaucauaaauuuugcaaccucucugacgcgcacaagaaagaucuguacgaccaugcucugaugagcauuaucuccacguuccaccucagcauuccgaauuuuaaccaguaugaggccaugucuugugauuucaauggaggcaagaucuccgugcaguacaaccugagccacucuuaugccauugacgcugccaaucauugcggcaccgucgcuaacgggauccuucaaacauuuaugcgcauggccuggggaggcuccuacaucgcgcuggauagcggguguggaaacugggacugcauuaugaccucuuaccaguaucucaucauucagaauacaaccugggagaaccacugucaguucuccagacccagcccuaucggcuaccuggggcuucugucccaacggacgcgcgauauuuauaucucuagacggcuccugggaacauuuaccuggacacugagcgacuccgaaggcaaugccacccccggcggguacugccucacccgcuggaugcugaucgaggcugaacuuaaguguuucggaaacacagccguggcuaaaugcaaugagaagcaugaugaggaauuuugcgacaugcugagacucuucgauuuuaacaaacaggccauuagccggcugaagucuccugcgcagauguccauccagcuuauuaauaaagccguuaacgcucugaucaaugaccaacucauuaugaagaaccaucugcgcgacaucauguguauccccuauugcaauuacagcaaguauugguaccugaaccacacgauuaccggcaaaacaucucucccuaaguguuggcuggugagcaauggguccuaccuuaacgagacccacuucucugaugacaucgaacagcaggccgauaauaugauuacagagaugcugcaaaaagaauauauggagagacagggaaagaccccgcucggccuggucgaccuguucguguuuagcacguccuucuaccuuaucagcauuuuucuccggcuggugaaaauccccacacaccgccauauugucgggaagccuugccccaaaccucacagacugaaccauaugggaaucuguucuugcggccucuauaagcagcccggcguuccggugcgguggaagcgcuga

SEQ ID NO: 28170 - RNA, 1473 nt, Artificial Sequence
  derived and/or modified CDS sequence (opt5) from LASV(Togo/2016/7082;Clade VI)__AMR44577__GPCmut5
augggccagaucauuaccuucuuucaagaggugccccacgucaucgaagagguuaugaacauugugcugaucgcccucagccugcuugcuauucugaaggggguguacaaugucgccacaugcggaaucaucggccucgugacguuccuguuucuuugugggagauccugcucucugauuuauaaaggaagcuacgaacuccagacccuggagcugaacauggaaacacucaauaugaccaugccucuguccuguacaaagaacucuagccaucacuauauccggguuggcaaugagaccgggcuugagcugacacucaccaacacguccauuaucaaucauaaauucugcaaccugucugacgcgcacaagcgcaaucuuuacgaucaugcucugaugagcauucucuccaccuuucaccugagcaucccgaacuucaaucaguaugaagccaugucuugugacuuuaacggaggcaaaauuuccgugcaguacaaucugagccacgccuaugcugucgaugccgcugagcauugcggcacaguggccaacgggguucuccaaaccuucaugagaauggcguggggaggcucuuacaucgcccuggacuccggguguggaaauugggauugcaucaugacaagcuaccaguaucuuauuauccagaacaccacgugggaagaccacugucaguuuucucggcccuccccuauuggcuaccuggggcuccugagccaacgcacaagagauaucuauauuucccggcgccuucugggaaccuucacauggacccucucugacagcgagggcaacgagacccccggcggguacugccugacaagauggaugcugaucgaagcugagcucaaguguuuuggaaauacggccguggcuaagugcaacgaaaaacaugaugaggaguucugcgacaugcugcggcuuuuugauuucaauaagcaggccauccagcgccugaaauccccugcgcagaugagcauucaacucaucaacaaggccgucaaugcucugauuaacgaccagcuuaucaugaaaaaucaccugagagauaugauguguauucccuauugcaacuacucuaaguauugguaccucaaucacaccuccagcggccggacaucucugccuaaguguuggcuggugagcaacggguccuaccucaaugaaacccauuucucugacgacaucgagcagcaagccgauaacaugaucacagaaaugcugcagaaagaguauauugaccgccagggaaagaccccgcuuggccugguggaucucuuugucuucagcacguccuuuuaccugaucagcauuuuccugcaccuuaucaaaauucccacacauagacacaucguugggaagccuugccccaaaccucaucggcucaaucacaugggaauuuguucuugcggccuguauaagcagcccggcgugccgacccgcuggaaaagauga

SEQ ID NO: 28171 - RNA, 1473 nt, Artificial Sequence
  derived and/or modified CDS sequence (opt5) from LASV(KAK-428;Clade n.d. (VII))__ANH09740__GPCmut5
augggccagaucgugaccuucuuucaagaggucccccacguuauugaagaggugaugaacaucgugcugauugcccucagccugcuugcuauccugaaggggcucuacaauuucgccacaugcggagucauuggccugaucacguuucuucugcucugugggagauccugcucugcgaccuauaaaggacaguacgaacugcagacacuggagcucaacauggaaagccugaauaugaccaugccucuuuccuguacaaagaacaauucucaucacuauauccgggcuggcaacaauaccgggcuggagcucacacugaccaacacgagcauuaucucccauaaauucugcaaucuuucugacgcccacaagaaaaaccuguacgaucauacccucaugagcauuaucacaaccuuucaccuguccauuccgaauuucaaccaguaugaggccaugagcugugacuuuaauggaggcaagaucucuauucaauacaaccugucccacagcuaugcuggcgaugccgcucagcauugcgggacaguggccaauggaguucuccagaccuucaugcgcauggcguggggcgggucuuaccuggcccuugacuccggauguagaggcugggauugcaucaucagcucuuaccaguaucugauuauccaaaacacgacaugggacgaucacugucaguuuucccggcccagcccuauuggguaccucggauucgugucccagaagacccgcgacaucuauauuucuagacggcugcuuggcacauuuaccuggacccugagcgauuccgaaggccaugacaugcccgggggauacugccucacacgcuggaugcugaucgaggcugaucugaaauguuucggcaacacggccgucgcuaagugcaaugaaaaacacgacgaggaguuuugcgauauguggagacucuucgacuucaacaagcaggccauccaacggcugaaagcgccugcccagaugaauauucagcuuaucaacaaggcugugaaugcccugauuaacgaccaacucaugaugaagaaucaucugcgcgauaucauguguauucccuauugcaacuacagcaaauuuugguaucuuaauaacaccacaaccgggagaacaucucugccucgguguuggcucaucuccaauggaagcuaccugaacgaaacccacuucucugacgauaucgagcagcaggcugacaauaugauuacggaaaugcugcagaaggaguacauggaucgccaaggcaaaacaccgcucgggcugguugaccuuuuuguguucagcaccuccuuuuaucugaucaccauuuuccuccaccuggucaagauccccacacauagacacauugugggaaaaccuugccccaagccucaucggcugaaccacaugggcaucuguucuugcggccuuuacaaacagcccggggugccgguccgcuggaagagauga

SEQ ID NO: 28172 - RNA, 1473 nt, Artificial Sequence; identical to SEQ ID NO: 28166
  derived and/or modified CDS sequence (opt5) from LASV(Pinneo-NIG-1969;Clade I)__AIT17836__GPCmut5

SEQ ID NO: 28173 - RNA, 1473 nt, Artificial Sequence
  derived and/or modified CDS sequence (opt5) from LASV(ISTH0009-NIG-2011;Clade II)__AIT17404__GPCmut5
augggccagaucauuaccuucuuucaagaggugccccacgucaucgaagagguuaugaacauugugcugaucgcccucagccugcuugcuauucugaaggggaucuacaauguggccacaugcggacucuucggccuggucuccuuucuucugcucugugggagaucuugcagcacgaccuauaaaggaguguacgaacugcagacacuggagcucgacauggcgucccugaacaugaccaugccucuuucuuguacaaagaauaacagccaucacuauaucaugguuggcaaugaaaccgggcuggagcucacacugaccaacacguccauuaucaaucauaaauucugcaaccuuucugaugcucacaagaaaaaucuguacgaccaugcccucaugagcauuaucuccaccuuucaccugagcauuccgaacuucaaucaguaugaggccaugucuugugauuuuaacggaggcaagaucuccgugcaguacaaucugagccacgcuuaugccgucgacgcugccaaccauugcggcacaauugcgaauggggugcuccaaaccuucaugcggauggccuggggaggcucuuacaucgcucuggauuccggguguggaagcugggacugcaucaugacaucuuaccaguaucuuauuauccagaacaccacgugggaagaucacugucaguuuucccgccccagcccuauuggcuaccuggggcuccugucccaaagaacacgggacaucuauauuucucgcagacuucugggaaccuucacauggacccucagcgauuccgagggcaacgaaacccccggcggguacugccugacacgguggaugcugaucgaggccgagcucaaguguuuuggaaauacggcuguugccaaaugcaacgaaaagcaugacgaggaguucugcgauaugcugcgccuuuuugacuucaauaaacaggcgaucagacggcugaagaccccugcccagaugagcauucagcucaucaacaaagcugugaaugcccugauuaacgaucaacuuaucaugaagaaucaucugcgcgacauuauguguauccccuauugcaacuacucuaaguauugguaccucaaucacacagucaccggcaaaacaucccugccuagauguuggcuggugagcaacgggucuuaccucaaugaaacccacuucagcgacgauaucgaacagcaggcugacaacaugauuacggagcugcuucaaaaggaguauauggaucggcagggaaaaacaccgcugggccucguggaccuguuugucuucuccaccucuuuuuaccugaucagcauuuuccuucaccucaucaagauucccacccaucgccacaucacagggaaaccuugccccaagccucauagacugaaucacaugggaauuuguuccugcggccuguauaaacaccccggcguuccggugaaguggaagcgguga

SEQ ID NO: 28174 - RNA, 1473 nt, Artificial Sequence
  derived and/or modified CDS sequence (opt5) from LASV(ISTH2010-NIG-2012;Clade II)__AIT17482__GPCmut5
augggccagaucauuaccuucuuucaagaggugccccacgucaucgaagagguuaugaacauugugcugaucgcccucagccugcuugcuauucugaaggggaucuacaauguggccacaugcggacucuucggccuggucuccuuucuucugcucugugggagaucuugcagcacgaccuauaaaggaguguacgaacugcagacacuggagcucgacauggcgucccugaacaugaccaugccucuuucuuguacaaagaauaacagccaucacuauaucaugguuggcaaugaaaccgggcuggagcucacacugaccaacacguccauuaucaaucauaaauucugcaaccuuucugaugcucacaagaaaaaucuguacgaccaugcccucaugagcauuaucuccaccuuucaccugagcauuccgaacuucaaucaguaugaggccaugucuugugauuuuaacggaggcaagaucuccgugcaguacaaucugagccacgcuuaugccgucgacgcugccaaccauugcggcacaauugcgaauggggugcuccaaaccuucaugcggauggccuggggaggcucuuacaucgcucuggauuccggguguggaagcugggacugcaucaugacaucuuaccaguaucuuauuauccagaacauuaccugggaagaucacugucaguuuucccgccccagcccuaucggcuaccuggggcuccugucccaaagaacgcgggacauuuauaucucucgcagacuucugggaacauucaccuggacacucagcgauuccgagggcaacgaaacccccggcggguacugccugacccgguggaugcugaucgaggccgagcucaaguguuuuggaaauacagcuguugccaaaugcaacgaaaagcaugacgaggaguucugcgauaugcugcgccuuuuugacuucaauaaacaggcgauuagacggcugaagacgccugcccagaugagcauccagcucauuaacaaagcugugaaugcccugaucaacgaucaacuuauuaugaagaaucaucugcgcgacaucauguguauccccuauugcaacuacucuaaguauugguaccucaaucacaccgucacaggcaaaaccucccugccuagauguuggcuggugagcaacgggucuuaccucaaugaaacacacuucagcgacgauauugaacagcaggcugacaacaugaucaccgagcugcuucaaaaggaguauauugaucggcagggaaaaacgccgcugggccucguggaccuguuugucuucuccacaucuuuuuaccugaucagcauuuuccuucaccucguuaagauccccacccaucgccacgugguggggaaaccuugccccaagccucauagacugaaucacaugggaauuuguuccugcggccuguauaaacaccccggcgucccggugaaguggaagcgguga

SEQ ID NO: 28175 - RNA, 1473 nt, Artificial Sequence
  derived and/or modified CDS sequence (opt5) from LASV(Lassa virus/H.sapiens-wt/NGA/2015/ISTH_0543;Clade II)__AVO03639__GPCmut5
augggccagaucauuaccuucuuucaagaggugccccacgucaucgaagagguuaugaacauugugcugaucgcccucagccugcuugcuauucugaaggggaucuacaauguggccacaugcggacucuucggccuggucuccuuucuucugcucugugggagaucuugcagcacgaccuauaaaggaguguacgaacugcagacacuggagcucgacauggcgaaccugaauaugaccaugccucuuuccuguacaaagaacaauucucaucacuauaucaugguuggcaacgaaaccgggcuggagcucacacugaccaauacgagcauuaucaaccauaaauucugcaaucuuuccgaugcucacaagaaaaaccuguacgaccaugcccucaugucuauuaucagcaccuuucaccuguccauuccgaauuucaaccaguaugaggccaugagcugugauuuuaauggaggcaagaucucugugcaguacaaccugucccacacauaugcugucgacgccgcuaaucauugcggcaccauugccaacggggugcuccaaacauucaugcggauggcguggggaggcagcuacaucgcccuggauucuggguguggauccugggacugcaucaugaccagcuaccaguaucuuguuauucagaacacgacaugggaagaucacugucaguuuucucgccccuccccuaucggcuaccuggggcuccugagccaaagaacccgggacauuuauaucucccgcagacuucugggaacauucaccuggacccucucugauagcgagggcaaugaaacacccggcggguacugccugacgcgguggaugcugauugaggcugagcucaaguguuuuggaaacaccgccguggcuaaaugcaaugaaaagcaugacgaggaguucugcgauaugcugcgccuuuuugacuucaacaaacaggccaucagacggcugaagaccccugcgcagauguccauccagcucauuaauaaagccgucaacgcucugaucaaugaucaacuuauuaugaagaaccaucugcgcgacaucauguguauucccuauugcaauuacagcaaguauugguaccucaaccacacagugacaggcaaaaccucucugccuagauguuggcugguguccaaugggagcuaccucaacgaaacgcacuucucugacgauaucgaacagcaggccgacaauaugaucacagagcugcuucaaaaggaguauauugaucggcagggaaaaaccccgcugggccucgucgaccuguuuguuuucagcaccuccuuuuaccugaucucuauuuuccuucaccucgugaagauccccacacaucgccacauuaccgggaaaccuugccccaagccucauagacugaaccacaugggaaucuguagcugcggccuguauaaacaccccggcgugccggucaaguggaagcgguga

SEQ ID NO: 28176 - RNA, 1473 nt, Artificial Sequence
  derived and/or modified CDS sequence (opt5) from LASV(Lassa virus/H.sapiens-wt/NGA/2016/ISTH_0009;Clade II)__AVO03571__GPCmut5
augggccagaucauuaccuucuuucaagaggugccccacgucaucgaagagguuaugaacauugugcugaucgcccucagccugcuugcuauucugaaggggaucuacaauguggccacaugcggacuccugggccuugucuccuuccugcuccugugugggagaucuugcagcacgaccuauaaaggaguguacgaacugcagacacucgagcuggacauggcgucccuuaacaugaccaugccucugucuuguacaaagaauaacagccaucacuauaucaugguuggcaaugaaaccgggcucgagcugacacuuaccaacacguccauuaucaaucauaaauuuugcaaccugucugaugcucacaagaaaaaucucuacgaccaugcccugaugagcauuaucuccaccuuccaccugagcauuccgaacuuuaaucaguaugaggccaugucuugugauuucaacggaggccggaucuccgugcaguacaaucucagccacucuuaugcugucgacgccgcuaaccauugcggcacaauugccaauggggugcugcaaaccuuuaugcgcauggcguggggaggcuccuacaucgcccuugauagcggguguggaucuugggacugcaucaugacauccuaccaguaucugauuauccagaacaccacgugggaagaucacugucaguucagcagacccuccccuauuggcuaccucgggcugcuuucucaacggacacgcgacaucuauauuagcagacggcugcucggaaccuuuacauggacccuguccgauagcgagggcaacgaaacccccggcggguacugccugacacgcuggaugcucaucgaggcugagcugaaguguuucggaaauacggccguugcuaagugcaacgaaaaacaugacgaggaauuuugcgauaugcuuagacuguucgacuuuaauaagcaggccauccggcgccucaaaaccccugcgcagaugucuauucagcugaucaacaaggccgugaaugcucuuauuaacgaucaacugaucaugaaaaaucaccucagagacauuauguguauccccuauugcaacuacuccaaguauugguaccugaaucacacagucaccggcaagacaagccugccucgguguuggcucgugucuaacgggagcuaccugaaugagacccauuucuccgacgauaucgaacagcaggccgacaacaugauuacggagcuucugcaaaaagaguauaucgaucgccagggaaagacaccgcucggccugguggaccuguucgucuuuucuaccagcuucuaccuuauuuccaucuuucuccaccugguuaaaauucccacccauagacacaucacagggaagccuugccccaaaccucaucggcugaaucacaugggaauuuguagcugcggccucuauaaccaccccggcgugccggugaaguggaaacgcuga

SEQ ID NO: 28177 - RNA, 1473 nt, Artificial Sequence
  derived and/or modified CDS sequence (opt5) from LASV(Lassa virus/H.sapiens-wt/NGA/2016/ISTH_0017;Clade II)__AVO03567__GPCmut5
augggccagaucauuaccuucuuucaagaggugccccacgucaucgaagagguuaugaacauugugcugaucgcccucagccugcuugcuauucugaaggggaucuacaauguggccacaugcggacucuucggccuggucuccuuucuucugcucugugggagaucuugcagcacgaccuauaaaggaguguacgaacugcagacacuggagcucgacauggcgucccugaacaugaccaugccucuuucuuguacaaagaauaacagccaucacuauaucaugguuggcaaugaaaccgggcuggagcucacacugaccaacacguccauuaucaaucauaaauucugcaaccuuucugaugcucacaagaaaaaucuguacgaccaugcccucaugagcauuaucuccaccuuucaccugagcauuccgaacuucaaucaguaugaggccaugucuugugauuuuaacggaggcaagaucuccgugcaguacaaucugagccacacauaugcuauugacgccgcuaaccauugcggcaccaucgccaaugggguccuccaaacauucaugcggauggcguggggaggcucuuacaucgcccuggauuccggguguggaagcugggacugcauuaugaccucuuaccaguaucuuaucauucagaacacgacaugggaagaucacugucaguuuucccgccccagcccuaucggcuaccuggggcuccugucccaaagaacccgggacauuuauaucucucgcagacuucugggaacauucaccuggacccucagcgauuccgagggcaacgaaacacccggcggguacugccugacgcgguggaugcugaucgaggcugagcucaaguguuuuggaaauaccgccguggcuaaaugcaacgaaaagcaugacgaggaguucugcgauaugcugcgccuuuuugacuucaauaaacaggccauuagacggcugaagaccccugcgcagaugagcauccagcucauuaacaaagccguuaaugcucugaucaacgaucaacuuauuaugaagaaucaucugcgcgacaucauguguauccccuauugcaacuacucuaaguauugguaccucaaucacacagugacaggcaaaaccucccugccuagauguuggcuggucagcaacgggucuuaccucaaugaaacgcacuucagcgacgauauugaacagcaggccgacaacaugaucacagagcugcuucaaaaggaguauauggaucggcagggaaaaaccccgcugggccucguggaccuguuuguguucuccaccucuuuuuaccugauuagcaucuuccuucaccucguccgcauucccacacauagacacguuaucgggaagccuugccccaaaccucaucggcugaaucacaugggaauuuguuccugcggccuguauaagcaccccggcgugccggugaaauggaagcgcuga

SEQ ID NO: 28178 - RNA, 1473 nt, Artificial Sequence
  derived and/or modified CDS sequence (opt5) from LASV(Lassa virus/H.sapiens-wt/NGA/2018/ISTH_0959;Clade II)__AVV65099__GPCmut5
augggccagaucauuaccuucuuucaagaggugccccacgucaucgaagagguuaugaacauugugcugaucgcccucagccugcuugcuauucugaaggggaucuacaauguggucacaugcggacucuucggccugguguccuuucuucugcucugugggagaucuugcagcacgaccuauaaaggaguuuacgaacugcagacacuggagcucgacauggccucccugaacaugaccaugccucuuucuuguacaaagaauaacagccaucacuauaucauggugggcaaugaaaccgggcuggagcucacacugaccaacacguccauuaucaaucauaaauucugcaaccuuucugaugcgcacaagaaaaaucuguacgaccaugcucucaugagcauuaucuccaccuuucaccugagcauuccgaacuucaaucaguaugaggccaugucuugugauuuuaacggaggcaagaucuccguccaguacaaucugagccacgccuaugcuauugacgccgcuaaccauugcggcacaaucgccaauggggugcuccaaaccuucaugcggauggcguggggaggcucuuacaucgcccuggauuccggguguggaagcugggacugcauuaugacaucuuaccaguaucuuaucauucagaacaccacgugggaagaucacugucaguuuucccgccccagcccuaucggcuaccuggggcuccugucccaaagaacacgggacauuuauaucucucgcagacuucugggaaccuucacauggacccucagcgauuccgagggcaacgaaacccccggcggguacugccugacacgguggaugcugaucgaggcugagcucaaguguuuuggaaauacggccguugcuaaaugcaacgaaaagcaugacgaggaguucugcgauaugcugcgccuuuuugacuucaauaaacaggccauuagacggcugaagaccccugcgcagaugagcauccagcucauuaacaaagccgugaaugcucugaucaacgaucaacuuauuaugaagaaucaucugcgcgacaucauguguauccccuauugcaacuacucuaaguauugguaccucaaucacacagucaccggcaaaacaucccugccuagauguuggcuggugagcaacgggucuuaccucaaugaaacccacuucagcgacgauauugaacagcaggccgacaacaugaucacggagcugcuucaaaaggaguauauugaucggcagggaaaaacaccgcugggccucguggaccuguuugucuucuccaccucuuuuuaccugaucagcauuuuccuucaccucguuaagauccccacccaucgccacgugauugggaaaccuugccccaagccucauagacugaaucacaugggaaucuguuccugcggccuguauaaacaccccggcgugccggucaaguggaagcgguga

SEQ ID NO: 28179 - RNA, 1473 nt, Artificial Sequence
  derived and/or modified CDS sequence (opt5) from LASV(LASV003-NIG-2008;Clade II)__AIT17580__GPCmut5
augggccagaucauuaccuucuuucaagaggugccccacgucaucgaagagguuaugaacauugugcugaucgcccucagccugcuugcuauucugaaggggaucuacaauguggccacaugcggacucuucggccuggucuccuuucuucugcucugugggagaucuugcagcacgaccuauaaaggaguguacgaacugcagacacuggagcucgacauggcgucccugaacaugaccaugccucuuucuuguacaaagaauaacagccaucacuauaucaugguuggcaaugaaaccgggcuggagcucacacugaccaacacguccauuaucaaucauaaauucugcaaccuuucugaugcucacaagaaaaaucuguacgaccaugcccucaugagcauuaucuccaccuuucaccugagcauuccgaacuucaaucaguaugaggccaugucuugugauuuuaacggaggcaagaucuccgugcaguacaaucugagccacacauaugcugucgacgccgcuaaccauugcggcaccauugccaauggggugcuccaaacauucaugcggauggcguggggaggcucuuacaucgcccuggauuccggguguggaagcugggacugcaucaugaccucuuaccaguaucuuauuauccagaacacgacaugggaagaucacugucaguuuucccgccccagcccuauuggcuaccuggggcuccugucccaaagaacccgggacaucuauauuucucgcagacuucugggaacauucaccuggacccucagcgauuccgagagcaacgaaacacccggcggcuacugccugacgcgguggaugcugaucgaggcugagcucaaguguuuugggaauaccgccguugcuaaaugcaacgaaaagcaugacgaggaguucugcgauaugcugcgccuuuuugacuucaauaaacaggccaucagacggcugaaggcgccugcccagaugucuauucagcucaucaacaaagcugugaaugcccugauuaacgaucaacuuaucaugaagaaucaucugcgcgacauuauguguauccccuauugcaacuacuccaaguauugguaccucaaucacacagucaccggaagaacaagccugccucgguguuggcuggugucuaacggcagcuaccucaaugaaacccacuucuccgacgauaucgaacagcaggcugacaacaugauuacggagcugcuucaaaaagaguauauggaucgccaggggaagacaccgcugggacucguggaccuguuugucuucucuaccagcuuuuaccugaucuccauuuuccuucaccucguuaaaauccccacccauagacacgugauuggcaagccuugccccaaaccucaucggcugaaucacauggggaucuguagcugcggacuguauaagcaccccggcgugccggucaaauggaagcgcuga

SEQ ID NO: 28180 - RNA, 1473 nt, Artificial Sequence
  derived and/or modified CDS sequence (opt5) from LASV(LASV035-NIG-2009;Clade II)__AIT17588__GPCmut5
augggccagaucauuaccuucuuucaagaggugccccacgucaucgaagagguuaugaacauugugcugaucgcccucagccugcuugcuauucugaaggggaucuacaauguggccacaugcggacucuucggccuggucuccuuucuucugcucugugggagaucuugcagcacgaccuauaaaggaguguacgaacugcagacacuggagcucgacauggcgucccugaacaugaccaugccucuuucuuguacaaagaauaacagccaucacuauaucaugguuggcaaugaaaccgggcuggagcucacacugaccaacacguccauuaucaaucauaaauucugcaaccuuucugaugcucacaagaaaaaucuguacgaccaugcccucaugagcauuaucuccaccuuucaccugagcauuccgaacuucaaucaguaugaggccaugucuugugauuuuaacggaggcaagaucuccgugcaguacaaucugagccacgcuuaugccgucgacgcugccaaccauugcggcacaauugcgaauggggugcuccaaaccuucaugcggauggccuggggaggcucuuacaucgcucuggauuccggguguggaagcugggacugcaucaugacaucuuaccaguaucuuauuauccagaacaccacgugggaagaucacugucaguuuucccgccccagcccuauuggcuaccuggggcuccugucccaaagaacacgggacaucuauauuucucgcagacuucugggaaccuucacauggacccucagcgauuccgagggcaacgaaacccccggcggguacugccugacacgguggaugcugaucgaggccgagcucaaguguuuuggaaauacggcuguugccaaaugcaacgaaaagcaugacgaggaguucugcgauaugcugcgccuuuuugacuucaauaaacaggcgaucagacggcugaaggccccugcucagaugagcauucagcucaucaacaaagccgugaaugcucugauuaacgaucaacuuaucaugaagaaucaucugcgcgacauuauguguauccccuauugcaacuacucuaaguauugguaccucaaucacaccgucacaggcaaaaccucccugccuagauguuggcuggugagcaacgggucuuaccucaaugaaacacacuucagcgacgauaucgaacagcaggccgacaacaugauuaccgagcugcuucaaaaggaguauaucgaucggcagggaaaaacgccgcugggccucguggaccuguuugucuucuccacaucuuuuuaccugauuagcaucuuccuucaccucguuaagauucccacccaucgccacgugaucgggaaaccuugccccaagccucauagacugaaucacaugggaauuuguuccugcggccuguauaaacaccccggcgugccggucaaguggaagcgguga

SEQ ID NO: 28181 - RNA, 1473 nt, Artificial Sequence
  derived and/or modified CDS sequence (opt5) from LASV(LASV1000-NIG-2009;Clade II)__AIT17782__GPCmut5
augggccagaucauuaccuucuuucaagaggugccccacgucaucgaagagguuaugaacauugugcugaucgcccucagccugcuugcuauucugaaggggaucuacaauguggccacaugcggacucuucggccuggucuccuuucuucugcucugugggagaucuugcagcacgaccuauaaaggaguguacgaacugcagacacuggagcucgacauggcgucccugaacaugaccaugccucuuucuuguacaaagaauaacagccaucacuauaucaugguuggcaaugaaaccgggcuggagcucacacugaccaacacguccauuaucaaucauaaauucugcaaccuuucugaugcucacaagaaaaaucuguacgaccaugcccucaugagcauuaucuccaccuuucaccugagcauuccgaacuucaaucaguaugaggccaugucuugugauuuuaacggaggcaagaucuccgugcaguacaaucugagccacacauaugcugucgacgccgcuaaccauugcggcaccauugccaauggggugcuccaaacauucaugcggauggcguggggaggcucuuacaucgcccuggauuccggguguggaagcugggacugcaucaugaccucuuaccaguaucuuauuauccagaacacgacaugggaagaucacugucaguuuucccgccccagcccuauuggcuaccuggggcuccugucccaaagaacccgggacaucuauauuucucgcagacuucugggaacauucaccuggacccucagcgauuccgagggcaacgaaacacccggcggguacugccugacgcgguggaugcugaucgaggcugagcucaaguguuuuggaaauaccgccguugcuaaaugcaacgaaaagcaugacgaggaguucugcgauaugcugcgccuuuuugacuucaauaaacaggccaucaagagacugaaaaccccugcgcagaugagcauucagcucaucaacaaggccgugaaugcucugauuaacgaucaacuuaucaugaagaaucaucugcgggacauuauguguauccccuauugcaacuacucuaaauauugguaccucaaucacacagucacaggcaagaccucccugccucgcuguuggcuggugagcaacgggucuuaccucaaugaaacgcacuucagcgacgauaucgaacagcaggccgacaacaugauuacagagcugcuucaaaaagaguauaucgauagacagggaaagaccccgcugggccucguggaccuguuugucuucuccaccucuuuuuaccugauuagcaucuuccuucaccucguuaaaauucccacacaucggcacgugguggggaagccuugccccaaaccucaucgccugaaucacaugggaaucuguuccugcggccuguauaagcaccccggcgucccggugaaguggaaaagauga

SEQ ID NO: 28182 - RNA, 1473 nt, Artificial Sequence
  derived and/or modified CDS sequence (opt5) from LASV(LASV221-NIG-2010;Clade II)__AIT17624__GPCmut5
augggccagaucauuaccuucuuucaagaggugccccacgucaucgaagagguuaugaacauugugcugaucgcccucagccugcuugcuauucugaaggggaucuacaauguggccacaugcggacucuucggccuggucuccuuucuucugcucugugggagaucuugcagcacgaccuauaaaggaguguacgaacugcagacacuggagcucgacauggcgucccugaacaugaccaugccucuuucuuguacaaagaauaacagccaucacuauaucaugguuggcaaugaaaccgggcuggagcucacacugaccaacacguccauuaucaaucauaaauucugcaaccuuucugaugcucacaagaaaaaucuguacgaccaugcccucaugagcauuaucuccaccuuucaccugagcauuccgaacuucaaucaguaugaggccaugucuugugauuuuaacggaggcaagaucuccgugcaguacaaucugagccacacauaugcuauugacgccgcuaaccauugcggcaccaucgccaaugggguccuccaaacauucaugcggauggcguggggaggcucuuacaucgcccuggauuccggguguggaagcugggacugcauuaugaccucuuaccaguaucuuaucauucagaacacgacaugggaagaucacugucaguuuucccgccccagcccuaucggcuaccuggggcuccugucccaaagaacccgggacauuuauaucucucgcagacuucugggaacauucaccuggacccucagcgauuccgagggcaacgaaacacccggcggguacugccugacgcgguggaugcugaucgaggcugagcucaaguguuuuggaaauaccgccguggcuaaaugcaacgaaaagcaugacgaggaguucugcgauaugcugcgccuuuuugacuucaauaaacaggccauuagacggcugaagaccccugcgcagaugagcauccagcucauuaacaaagccguuaaugcucugaucaacgaucaacuuauuaugaagaaucaucugcgcgacaucauguguauccccuauugcaacuacucuaaguauugguaccucaaucacacagugacaggcaaaaccucccugccuagauguuggcuggucagcaacgggucuuaccucaaugaaacgcacuucagcgacgauauugaacagcaggccgacaacaugaucacagagaugcugcaaaaggaguauauggaucggcagggaaaaaccccgcuuggccugguggaccucuuuguguucuccaccucuuuuuaccugauuagcaucuuccugcaccuugucaagauucccacacaucgccacguuaucgggaaaccuugccccaagccucauagacucaaucacaugggaauuuguuccugcggccuguauaaacaccccggcgugccggugaaguggaagcgguga

SEQ ID NO: 28183 - RNA, 1473 nt, Artificial Sequence
  derived and/or modified CDS sequence (opt5) from LASV(LASV237-NIG-2010;Clade II)__AIT17638__GPCmut5
augggccagaucauuaccuucuuucaagaggugccccacgucaucgaagagguuaugaacauugugcugaucgcccucagccugcuugcuauucugaaggggaucuacaauguggccacaugcggacucuucggccuggucuccuuucuucugcucugugggagaucuugcagcacgaccuauaaaggaguguacgaacugcagacacuggagcucgacauggcgucccugaacaugaccaugccucuuucuuguacaaagaauaacagccaucacuauaucaugguuggcaaugaaaccgggcuggagcucacacugaccaacacguccauuaucaaucauaaauucugcaaccuuucugaugcucacaagaaagaccuguacgaucaugcccucaugagcauuaucuccaccuuucaccugagcauuccgaauuucaaccaguaugaggccaugucuugugacuuuaauggaggcaagaucuccgugcaguacaaccugagccacacauaugcugucgaugccgcuaaucauugcggcaccauugccaacggggugcuccaaacauucaugcggauggcguggggaggcucuuacaucgcccuggacuccggguguggaagcugggauugcaucaugaccucuuaccaguaucuuauuauccagaauacgacaugggaagaccacugucaguuuucccgccccagcccuauuggcuaccuggggcuccugucccaaagaacccgggauaucuauauuucucgcagacuucugggaacauucaccuggacccucagcgacuccgagggcaacgaaacacccggcggguacugccugacgcgguggaugcugaucgaggcugagcucaaguguuuuggaaacaccgccguugcuaaaugcaaugaaaagcaugaugaggaguucugcgacaugcugcgccuuuuugauuucaacaaacaggccaucagacggcugaagaccccugcgcagaugagcauucagcucaucaauaaagccgugaacgcucugauuaaugaccaacuuaucaugaagaaccaucugcgcgacauuauguguauccccuauugcaauuacucuaaguauugguaccucaaccacacagucacaggcaaaaccucccugccuagauguuggcuggugagcaaugggucuuaccucaacgaaacgcacuucagcgaugacaucgaacagcaggccgauaauaugauuacagagcugcuucaaaaggaguauauggaccggcagggaaaaaccccgcugggccucguggaucuguuugucuucuccaccucuuuuuaccugaucagcauuuuccuucaccucaucaagauucccacacaucgccacaucaccgggaaaccuugccccaagccucauagacugaaccacaugggaauuuguuccugcggccuguauaaacaccccggcguuccggugaaguggaagcgguga

SEQ ID NO: 28184 - RNA, 1473 nt, Artificial Sequence
  derived and/or modified CDS sequence (opt5) from LASV(LASV253-NIG-2011;Clade II)__AIT17670__GPCmut5
augggccagaucauuaccuucuuucaagaggugccccacgucaucgaagagguuaugaacauugugcugaucgcccucagccugcuugcuauucugaaggggaucuacaauguggccacaugcggacucuucggccuggucuccuuucuucugcucugugggagaucuugcagcacgaccuauaaaggaguguacgaacugcagacacuggagcucgacauggcgucccugaacaugaccaugccucuuucuuguacaaagaauaacagccaucacuauaucaugguuggcaaugaaaccgggcuggagcucacacugaccaacacguccauuaucaaucauaaauucugcaaccuuucugaugcucacaagaaaaaucuguacgaccaugcccucaugagcauuaucuccaccuuucaccugagcauuccgaacuucaaucaguaugaggccaugucuugugauuuuaacggaggcaagaucuccgugcaguacaaucugagccacacauaugcugucgacgccgcuaaccauugcggcaccauugccaauggggugcuccaaacauucaugcggauggcguggggaggcucuuacaucgcccuggauuccggguguggaagcugggacugcaucaugaccucuuaccaguaucuuauuauccagaacacgacaugggaagaucacugucaguuuucccgccccagcccuauuggcuaccuggggcuccugucccaaagaacccgggacaucuauauuucucgcagacuucugggaacauucaccuggacccucagcgauuccgagggcaacgaaacacccggcggguacugccugacgcgguggaugcugaucgaggcugagcucaaguguuuuggaaauaccgccguugcuaaaugcaacgaaaagcaugacgaggaguucugcgauaugcugcgccuuuuugacuucaauaaacaggccaucagacggcugaaggcgccugcccagaugagcauucagcucaucaacaaagcugugaaugcccugauuaacgaucaacuuaucaugaagaaucaucugcgcgacauuauguguauccccuauugcaacuacucuaaguauugguaccucaaucacacagucaccggcagaacaucccugccucgguguuggcuggugagcaacgggucuuaccucaaugaaacccacuucagcgacgauaucgaacagcaggcugacaacaugauuacggagcugcuucaaaaagaguauaucgaucgccagggaaagacaccgcugggccucguggaccuguuugucuucuccaccucuuuuuaccugauuagcaucuuccuucaccucguuaaaauucccacccauagacacaucauugggaagccuugccccaaaccucaucggcugaaucacaugggaaucuguuccugcggccuguauaagcaccccggcgugccggugaaauggaagcgcuga

SEQ ID NO: 28185 - RNA, 1473 nt, Artificial Sequence
  derived and/or modified CDS sequence (opt5) from LASV(LASV254-NIG-2011;Clade II)__AIT17674__GPCmut5
augggccagaucauuaccuucuuucaagaggugccccacgucaucgaagagguuaugaacauugugcugaucgcccucagccugcuugcuauucugaaggggaucuacaauguggccacaugcggacucuucggccuggucuccuuucuucugcucugugggagaucuugcagcacgaccuauaaaggaguguacgaacugcagacacuggagcucgacaugaccaaccugaauaugacaaugccucuuuccuguaccaagaacaauucucaucacuauaucaugguuggcaacgaaacagggcuggagcucacccugacgaauaccagcauuaucaaccauaaauucugcaaucuuuccgaugcgcacaagaaaaaccuguacaaucaugcucucaugucuauuaucagcacauuucaccuguccauuccgaacuucaaucaguaugaggccaugagcugugacuuuaacggaggcaagaucucugugcaguacaaucugucccacagcuaugccgucgaugcugccaaccauugcggcaccauugcuaacggggugcuccaaacauucaugcggauggccuggggaggcucuuacaucgcgcuggacuccggguguggaaauugggauugcaucaugaccagcuaccaguaucuuauuauccagaacacgacaugggaagaccacugucaguuuucucgccccuccccuauuggcuaccuggggcuccugagccaaagaacccgggauaucuauauuucccgcagacuucugggaacauucaccuggacccucucugacagcgagggcaaugaaacacccggcggguacugccugacgcgguggaugcugaucgaggccgagcucaaguguuuuggaaacaccgcuguugccaaaugcaaugaaaagcaugaugaggaguucugcgacaugcugcgccuuuuugauuucaacaaacaggcuaucagacggcugaagaccccugcccaggcgaauauucagcucaucaacaaagccgugaaugcucugauuaacgaccaacuuaucaugaagaaucaucugcgcgauauuauguguauccccuauugcaacuacuccaaguauugguaccucaaucacacagucacaggcaaaaccagccugccuagauguuggcuggugucuaacggguccuaccucaaugaaacgcacuucagcgacgacaucgaacagcaggccgauaacaugauuacagagcugcuucaaaaggaguauauggaccggcagggaaaaaccccgcugggccucguggaucuguuugucuucucuaccagcuuuuaccugaucuccauuuuccuucaccucguuaagauccccacacaucgccacgugauugggaaaccuugccccaagccucauagacugaaccacaugggaaucuguucuugcggccuguauaaacaccccggcgugccggucaaguggaagcgguga

SEQ ID NO: 28186 - RNA, 1473 nt, Artificial Sequence
  derived and/or modified CDS sequence (opt5) from LASV(Nig08-A19;Clade III)__ADU56618__GPCmut5
augggccagaucgugaccuucuuucaagaggucccccacguuauugaagaggugaugaacaucgugcugauugcccucagcauccuggcuauucuuaaggggcuguacaauaucgccacaugcggacucaucggccuggucacguuccuucugcucuccgggagaucuuguagcaugaccuauaaaggaguguacgaacugcagacacuggagcucaacaugaauacccugaacaugacaaugccucuuuccugcaccaagaauaacucucaucacuauauuaugguuggcaaugaaacagggcuggagcucacccugacgaacaccagccuucugcaucacaaauuuuguaaucucuccgacgcgcauaagaaaaaccuguacgaucacacacugaugucuaucauuagcaccuuccaccucuccaucccgaauuuuaaccaguaugaggcuaugagcugcgacuucaauggaggcaagauuacagugcaguacaaccugucucauuccuaugccaucgaugccgcuaaucacuguggcaccgucgccaacggggugcuucaaacguuuaugcggauggcuuggggaggcagcuacauugcccuggacucugggugcggaaagugggauuguaucaugacauccuaccaguaucucaucauucagaacaccacaugggaagaccauugccaguucagccgccccucuccuaucggcuaccuggggcuucugucccaaagaacccgggauauuuauaucagccgcagacuccugggaaccuuuacauggacgcuguccgacucugagggcaaugaaacccccggcggguacugucucacacgguggaugcugauugaggcggagcuuaaaugcuucggaaacaccgccguugcuaaguguaaugaaaaacacgaugaggaauuuugcgacaugcugcgccucuucgauuuuaacaagcaggccaucagacggcugaaagcuccugcccagaugagcauccagcuuauuaauaaggcggugaacgcccugaucaaugaccaacucauuaugaagaaccaucugcgcgauaucaugugcauucccuauuguaauuacuccaaauauugguaccugaaccacacaagcaccggcagaacgucucucccucggugcuggcuggucuccaaugggagcuaccuuaacgagacacacuucucugacgacaucgaacagcaggcugauaauaugaucaccgagaugcugcaaaaggaguaucucgaccgccagggaaaaaccccgcugggccugguggaucuuuucguguuuagcacauccuucuaccucauuucuaucuuucugcaucuggucaagauucccacccacagacauaucguugggaaaccuugucccaagccucaccggcucaaccacaugggaauuugcagcuguggccuguauaaacagcccggcgugccggugcgcuggaagagauga

SEQ ID NO: 28187 - RNA, 1476 nt, Artificial Sequence
  derived and/or modified CDS sequence (opt5) from LASV(G1180-SLE-2010;Clade IV)__AIT17168__GPCmut5
augggccagaucgugaccuucuuucaagaggucccccacguuauugaagaggugaugaacaucgugcugauugcccucagcauccuggcuguccuuaaggggcuguacaauuucgccacaugcggacucgugggccugcuuacguuucugcuccugugugggagauccugcaccgcgucucgguauaaaggaguuuacgaacugcagacacucgagcugaacauggaaacccuuaauaugacaaugccucugagcuguaccaagaacaauucccaucacuauauuauggugggcaacgagacagggcucgagcugacccuuacgaauaccucuaucaucaaccauaaauucugcaaucugagcgacgcucacaagaaaaaccucuacgaucaugcccugauguccauuaucucuacauuucaccugagcauuccgaauuucaaccaguaugaagccauguccugugacuuuaauggaggcaagaucagcguccaguacaaccucucucacuccuaugcuggcgaugccgcuaaucauugcgggaccguggccaacggaguucugcaaacauucaugcgcauggcguggggcgggagcuacauugcccuugacucuggauguggcuccugggauugcaucaugaccagcuaccaguaucugauuauccagaacacgacaugggaggaccacugucaguuuucuagacccuccccuaucggguaccucggacugcuuagccaacggacccgcgauauuuauaucuccagacggcugcucggcacauucaccuggacccugucugacagcgaaggcaaggauacacccgggggauacugccugacgcgcuggaugcucauugaggcugagcugaaauguuuuggcaauaccgccguggcuaagugcaacgaaaaacaugacgaggaguucugcgauaugcuuagacuguuugacuucaauaagcaggccauccagcggcucaaagcgccugcccagauguccauucaacugaucaacaaggcugucaaugcccuuaucaacgaucagcugauuaugaagaaucaccuccgcgacaucauguguauucccuauugcaacuacagcaaauauugguaccugaaucacacaaccacagggaagaccucucugccuaaauguuggcucguguccaacggaagcuaccugaaugaaacgcauuucucugacgauaucgaacagcaagcugacaacaugauuacagagaugcuucagaaggaguauauggaaagacagggcaaaaccccgcuggggcucguggaucuguuugucuucagcaccuccuuuuaccugaucucuaucuuccuucaccucguuaagauucccacacaucggcacaucgugggaaaaagcugcccuaagccccaucgccugaaucacaugggcauuuguuccugcggccuguauaagcagccuggggugcccgucaaauggaagagauga

SEQ ID NO: 28188 - RNA, 1476 nt, Artificial Sequence
  derived and/or modified CDS sequence (opt5) from LASV(G1442-SLE-2011;Clade IV)__AIT17180__GPCmut5
augggccagaucgugaccuucuuucaagaggucccccacguuauugaagaggugaugaacaucgugcugauugcccucagcauccuggcuguccuuaaggggcuguacaauguggccacaugcggacucauuggccugguuacguuccuucugcucugugggagauccugcaccacaacccuguauaaaggaguguacgaacugcagacacucgagcugaacauggaaacccuuaauaugacaaugccucugucuuguaccaagaacaauagccaucacuauauccgggucggcaacgagacggggcucgagcugacccuuacaaauaccuccaucauuaaccauaaauuuugcaaucugucugacgcgcacaagaaaaaccucuacgaucaugcucugaugagcaucauuuccacauuccaccugucuaucccgaauuuuaaccaguaugaagccaugagcugugacuucaauggaggcaagauuuccgugcaguacaaccucagccacucuuaugccggcgaugcugccaaucauugcgggaccguugcuaacggagugcugcaaacguuuaugcgcauggccuggggcggguccuacaucgcgcuugacagcggauguggcaacugggauugcauuaugacaucuuaccaguaucugaucauccagaauaccacaugggacgaucacugucaguucuccagacccagcccuauuggguaccucggacugcuuucucaacggacccgcgacgucuauaucuccagacggcugcucggcaccuuuacauggacgcugagcgauuccgagggcaaggacacccccgggggauacugccugacacgcuggaugcucauugaagccgagcugaaauguuucggcaacaccgcuguggccaagugcaaugagaaacaugaugaagaguuuugcgacaugcuuagacuguucgauuuuaacaagcaggcuauccagcggcucaaagccccugcgcagaugucuauucaacugaucaauaaggccgugaacgcucuuaucaaugaccagcugauuaugaagaaccaccuccgcgacaucauguguauucccuauugcaauuacagcaaauauugguaccugaacaauacagccaccgggaagacgucccugccuaaauguuggcucaucagcaacggaucuuaccugaaugaaacacacuucuccgaugacauugagcaggaagcugauaacaugaucaccgagaugcuucaaaaggaguauauggaaagacagggcaaaaccccgcuggggcucgucgaccuguucguuuuuagcacaucuuucuaccugaucagcauuuuucuucaucucgugaagauccccacccaccggcauauugugggaaaauccugcccuaagccccaccgccugaaucauaugggcaucuguucuugcggccuguauaagcagccugggguccccgugagauggaaacgguga

SEQ ID NO: 28189 - RNA, 1476 nt, Artificial Sequence
  derived and/or modified CDS sequence (opt5) from LASV(G3010-SLE-2013;Clade IV)__AIT17344__GPCmut5
augggccagaucgugaccuucuuucaagaggucccccacguuauugaagaggugaugaacaucgugcugauugcccucagcauccuggcuguccuuaaggggcuguacaauuucgccacaugcggacucgugggccugguuacguuucuucugcucugugggagauccugcaccacaucucuguauaaaggaguguacgaacugcagacccucgagcugaacauggaaacacuuaauaugaccaugccucugagcuguacaaagaacaauucccaucacuauauuauggucggcaacgagaccgggcucgagcugacgcuuaccaauacaucuaucaucaaccauaaauucugcaaucugagcgacgcgcacaagaaaaaccucuacaaucaugcucugauguccauuaucucuaccuuucaccugagcauuccgaacuucaaucaguaugaagccauguccugugauuuuaacggaggcaagaucagcgugcaguacaaucucucucacuccuaugccggcgacgcugccagccauugcgggacaguugcuaacggagugcugcaaaccuucaugcggauggccuggggcgggucuuacauugcgcuugauuccggauguggcaagugggacugcaucaugacgagcuaccaguaucugauuauccagaacacaaccugggaggaucacugucaguuuucucgccccuccccuaucggguaccucggacugcuuagccaaagaacacgggacauuuauaucucccgcagacugcucggcaccuucaccuggacacugucugauagcgaaggcaaagacacgcccgggggauacugccugacccgguggaugcucauugaggccgagcugaaguguuuuggcaauacagcugucgccaaaugcaacgaaaagcaugaugaggaguucugcgacaugcuucgccuguuugauuucaauaaacaggcuauccagagacucaagaccccugcccagauguccauucaacugaucaacaaggcggugaaugcccuuaucaacgaccagcugauuaugaaaaaucaccuccgggauaucauguguauucccuauugcaacuacagcaaguauugguaccugaaucacacaaccacggggaaaacaucucugccuaaguguuggcucguguccaacggaagcuaccugaaugaaacccauuucucugacgacaucgaacagcaagcugauaacaugauuaccgagaugcuucagaaagaguauauggaacgccagggcaagacaccgcuggggcucgucgaccuguuuguuuucagcaccuccuuuuaccugaucucuaucuuccuucaccucgugaaaauucccacacauagacacaucgugggaaagagcugcccuaagccccaucggcugaaucacaugggcauuuguuccugcggccuguauaaacagccugggguccccgugcgcuggaagagauga

SEQ ID NO: 28190 - RNA, 1476 nt, Artificial Sequence
  derived and/or modified CDS sequence (opt5) from LASV(G502-SLE-2009;Clade IV)__AIT17126__GPCmut5
augggccagaucgugaccuucuuucaagaggucccccacguuauugaagaggugaugaacaucgugcugauugcccucagcauccuggcuguccuuaaggggcuguacaauuucgccacaugcggacucgugggccugcuuacguuucugcuccugugugggagauccugcaccacaggacuguauaaaggcguuuacgaacuccagacccuggagcuuaacauggaaacacugaauaugaccaugccucucucuuguacaaagaacaauagccaucacuauauuaugguggggaacgagaccggacuggagcuuacgcugaccaauacauccaucaucaaccauaaauucugcaaucucucugacgcgcacaagaaaaaccuguacgaucaugcucugaugagcauuaucuccaccuuucaccucucuauuccgaauuucaaccaguaugaagccaugagcugugacuuuaauggcggcaagaucuccguccaguacaaccugagccacucuuaugccggggaugcugccgaccauugcggaacaguggcuaauggcguucuucaaaccuucaugcggauggccuggggaggguccuacauugcgcuggauagcggcugugggcgcugggacugcaucaugacgucuuaccaguaucucauuauccagaacacaaccugggaggaucacugucaguuuuccagacccagcccuaucggauaccugggccuucugucucaacggacacgcgacauuuauaucuccagacggcuccugggcaccuucaccuggacacugagcgauuccgaagggaaggacacgcccggaggcuacugccucacccgcuggaugcugauugaggccgagcuuaaauguuuugggaacacagcuguggccaagugcaaugaaaaacaugaugaggaguucugcgacaugcugagacucuuugauuucaacaagcaggcuauccagcggcugaaagccccugcgcagaugucuauucaacuuaucaauaaggccgucaacgcucugaucaaugaccagcucgugaugaagaaccaucugcgcgacauuauguguauccccuauugcaauuacagcagauauugguaccugaaccacaccacaaccggacggacgucccucccuaaauguuggcuggugagcaauggcucuuaccuuaacgaaacacacuucuccgaugacauugaacagcaagccgauaauaugaucaccgagaugcugcagaaggaguauauggaacgccaggggaaaaccccgcucggacuggucgaccuguuuguuuucagcacaucuuuuuaccuuauuagcaucuuccuccaccuggugaagauccccacccauagacacauugugggcaaauccugcccuaagccccaucggcugaaccacaugggcaucuguucuugcgggcucuauaaacagccuggaguccccgugaaguggaagcgcuga

SEQ ID NO: 28191 - RNA, 1476 nt, Artificial Sequence
  derived and/or modified CDS sequence (opt5) from LASV(G733-SLE-2010;Clade IV)__AIT17154__GPCmut5
augggccagaucgugaccuucuuucaagaggucccccacguuauugaagaggugaugaacaucgugcugauugcccucagcauccuggcuguccuuaaggggcuguacaauuucgccacaugcggaauugugggccucguuuccuuucugcuucugugugggagaucuugcacgaccagccucuauaaaggaguguacgaacugcagacacuggagcucaacauggaaacccugaauaugacaaugccucuuuccuguaccaagaacaauucucaucacuauaucauggucggcaacgagacagggcuggagcucacccugacgaauaccagcaucauuaaccauaaauucugcaaucuuuccgacgcgcacaagaaaaaccuguacgaucaugcucucaugucuaucauuagcacauuucaccuguccaucccgaauuucaaccaguaugaagccaugagcugugacuuuaauggaggcaagauuucugugcaguacaaccugucccacagcuaugccggcgaugcugccaaucauugcgggaccaucgcuaacggaguucuccaaacauucaugcggauggccuggggcgggucuuacauugcgcuggacuccggaugugaucgcugggacugcaucaugaccagcuaccaguaucuuaucauucagaacacgacaugggaggaucacugucaguuuucuagacccuccccuaucggcuaccuggggcuccugagccaacggacccgcgacauuuauaucuccagacggcuucugggaacauucaccuggacccucucugauagcgaaggcaaggacacacccggcggguacugccugacgcgcuggaugcugauugaggccgagcucaaauguuuuggaaauaccgcuguggccaagugcaacgaaaaacaugaugaggaguucugcgacaugcugagacuuuuugauuucaauaagcaggcuauccagcggcugaaagccccugcgcagauguccauccaacucauuaacaaggccgucaaugcucugaucaacgaccagcuuauuaugaagaaucaucugcgcgacaucauguguauucccuauugcaacuacagcaaauauugguaccucaaucacacaaccacaggcaagaccucucugccuaaauguuggcugguguccaacgggagcuaccucaaugaaacgcacuucucugaugacaucgaacagcaagccgauaacaugaucacagagaugcugcagaaggaguauauggaaagacagggaaaaaccccgcuuggccugguggaccucuuugucuucagcaccuccuuuuaccugauuucuaucuuccugcaccuuguuaagauucccacacaucggcacgugguggggaaaagcugcccuaagccccaucgccucaaucacaugggaaucuguuccugcggccuguauggccagccugggguccccgugaaguggaaaagauga

SEQ ID NO: 28192 - RNA, 1476 nt, Artificial Sequence
  derived and/or modified CDS sequence (opt5) from MOPV/LASV reassortant(IGS-1;Clade IV)__AFY05576__GPCmut5
augggccagaucgugaccuucuuucaagaggucccccacguuauugaagaggugaugaacaucgugcugauugcccucagcguccuggcugugcuuaaggggcuguacaauuucgccacaugcggacucguuggccuggugacguuucuucugcucugugggagauccugcaccacaucucuguauaaaggagucuacgaacugcagacccucgagcugaacauggaaacacuuaauaugaccaugccucugagcuguacaaagaacaauucccaucacuauaucauggugggcaacgagaccgggcucgagcugacgcuuaccaauacaucuauuaucaaccauaaauucugcaaucugagcgacgcgcacaagaaaaaccucuacgaucaugcucugauguccaucauuucuaccuuucaccugagcaucccgaauuucaaccaguaugaagccauguccugugacuuuaauggaggcaagauuagcguucaguacaaccucucucacuccuaugccggcgaugcugccaaucauugcgggacaguggcuaacggaguccugcaaaccuucaugcggauggccuggggcgggagcuacaucgcgcuugacucuggauguggcaacugggauugcauuaugacguccuaccaguaucugaucauucagaauacaaccugggaggaccacugucaguuuagccgccccucuccuaucggguaccucggacugcuuucccaaagaacacgggauaucuauauuagccgcagacugcucggcaccuucaccuggacacuguccgacucugaaggcgaggauacgcccgggggauacugccugacccgguggaugcucaucgaggccgaacugaaguguuuuggcaacacagcuguggccaaaugcaaugagaagcaugacgaagaguucugcgauaugcuucgccuguuugacuucaacaaacaggcuauucagagacucaaggccccugcgcagaugagcauccaacugauuaauaaagccgugaacgcucuuaucaaugaucagcugaucaugaagaaccaccuccgggacauuauguguauccccuauugcaauuacuccaaguauugguaccugaaccacaccacaaccgggcgcacgagccugccuaaauguuggcucgucucuaauggauccuaccugaacgaaacacauuucagcgacgauauugagcagcaagccgacaauaugaucaccgagaugcuucagaaggaauauauggagagacagggcaaaaccccgcuggggcucguugaucuguuuguguucucuaccagcuuuuaccugauuuccaucuuccuucaccucgugaagauccccacacaucggcacauugucggaaaaucuugcccuaagccccaucgccugaaccacaugggcaucuguagcugcggccuguauaaacagccuggggugcccguuaaguggaagagauga

SEQ ID NO: 28193 - RNA, 1476 nt, Artificial Sequence
  derived and/or modified CDS sequence (opt5) from LASV(LM765-SLE-2012;Clade IV)__AIT17814__GPCmut5
augggccagaucgugaccuucuuucaagaggucccccacguuauugaagaggugaugaacaucgugcugauugcccucagcauccuggcuguccuuaaggggcuguacaauuucgccacaugcggacucgugggccugguuacguuucuucugcucugugggagauccugcaccacaucucuguauaaaggaguguacgaacugcagacccucgagcugaacauggaaacacuuaauaugaccaugccucugagcuguacaaagaacaauucccaucacuauauuauggucggcaacgagaccgggcucgagcugacgcuuaccaauacaucuaucaucgaccauaaauucugcaaccugagcgaugcgcaccggaagaaucucuacgaccaugcucugauguccauuaucucuaccuuucaccugagcauuccgaacuucaaucaguaugaagccauguccugugauuuuaacggaggcaaaaucagcgugcaguacaaucucucucacuccuaugccaaggacgcugccgaucauugcggcacaguugcuaacggggugcugcaaaccuucaugcgcauggccuggggaggcagcuacauugcgcuugacucuggguguggaagaugggauugcaucaugacguccuaccaguaucugauuauccagaauacaaccugggaggaccacugucaguuuagccggcccucuccuaucggcuaccucgggcugcuuucccaacgcacaagagauauuuauaucagccggcgccugcucggaaccuucaccuggacacuguccgacucugaaggcaaggauacgcccggcggguacugccugaccagauggaugcucauugaggccgagcugaaauguuuuggaaacacagcugucgccaagugcaacgaaaaacaugacgaggaguucugcgauaugcuucggcuguuugacuucaauaagcaggcuauccagcgccucaaagccccugcgcagaugagcauucaacugaucaacaaggccgugaaugcucuuaucaacgaccagcugauuaugaagaaucaccucagagauaucauguguauucccuauugcaacuacuccaaauauugguaccugaaucacaccacaaccggcaagacgagccugccuaaauguuggcucgugucuaacggguccuaccugaaugaaacacauuucagcgacgauaucgaacagcaagccgacaacaugauuaccgagaugcuucagaaggaguauauggaacggcagggaaaaaccccgcugggccucgucgaucuguuuguuuucucuaccagcuuuuaccugaucuccaucuuccuucaccucgugaagauucccacacaucgccacaucguggggaaaccuugccccaagccucauagacugaaucacaugggaauuuguucuugcggccuguauaagcagcccggcgucccggugaaauggaagcgguga

SEQ ID NO: 28194 - RNA, 1476 nt, Artificial Sequence
  derived and/or modified CDS sequence (opt5) from LASV(LM776-SLE-2012;Clade IV)__AIT17824__GPCmut5
augggccagaucgugaccuucuuucaagaggucccccacguuauugaagaggugaugaacaucgugcugauugcccucagcauccuggcuguccuuaaggggcuguacaauuucgccacaugcggacucgugggccugguuacguuucuucugcucugugggagauccugcaccacaucuguguauaaaggagucuacgaacugcagacccuggagcucaacauggaaacacugaauaugaccaugccucuuagcuguacaaagaacaauucccaucacuauauuauggugggcaacgagaccgggcuggagcucacgcugaccaauacaucuaucaucaaccauaaauucugcaaucuuagcgacgcgcacaagaaaaaccuguacgaucaugcucucauguccauuaucucuaccuuucaccugagcauuccgaauuucaaccaguaugaagccauguccugugacuuuaauggaggcaagaucagcguucaguacaaccugucucacuccuaugccggcgaugcugccaaucauugcgggacaguggcuaacggaguccuccaaaccuucaugcggauggccuggggcgggagcuacauugcgcuggacucuggauguggcaagugggauugcaucaugacguccuaccaguaucuuauuauccagaacacaaccugggaggaccacugucaguuuagccgccccucuccuaucggguaccugggacuccugucccaaagaacacgggauauuuauaucagccgcagacuucugggcaccuucaccuggacacucuccgacucugaaggcaaagauacgcccgggggauacugccugacccgguggaugcugauugaggccgagcucaaguguuuuggcaauacagcuguggccaaaugcaacgaaaagcaugacgaggaguucugcgauaugcugcgccuuuuugacuucaauaaacaggcuauccagagacugaaggccccugcgcagaugagcauucaacucaucaacaaggccgugaaugcucugaucaacgaucagcuuauuaugaaaaaucaucugcgggacaucauguguauucccuauugcaacuacuccaaguauugguaccucaaucacaccacaaccgggaaaacgagccugccuaaguguuggcuggucucuaacggauccuaccucaaugaaacacacuucagcgacgauaucgaacagcaagccgacaacaugauuaccgagaugcugcagaaagaguauauggaacgccagggcaagaccccgcuugggcugguugaucucuuuguguucucuaccagcuuuuaccugaucuccaucuuccugcaccuugugaaaauucccacacauagacacaucgucggaaagucuugcccuaagccccaucggcucaaucacaugggcauuuguagcugcggccuguauaaacagccuggggugcccguucgcuggaagagauga

SEQ ID NO: 28195 - RNA, 1476 nt, Artificial Sequence
  derived and/or modified CDS sequence (opt5) from LASV(Mad39;Clade IV)__ANH09722__GPCmut5
augggccagaucgugaccuucuuucaagaggucccccacguuauugaagaggugaugaacaucgugcugauugcccucagcauccuggcuguccuuaaggggcuguacaauguggccacaugcggacucauuggccugguuacguuccuucugcucugugggagauccugcaccacaacccuguauaaaggaguguacgaacugcaggcgcucgagcugaacauggaaacacuuaauaugaccaugccucugucuuguacaaagaacaauagccaucacuauauccgggucggcaacgagaccgggcucgagcugacgcuuaccaauacaucccugaucaaccauaaauuuugcaaucucucugacgcucacaagaaaaaccuguacgaucaugcccugaugagcauuaucuccaccuuccaccucucuauuccgaauuuuaaccaguaugaagccaugagcugugacuucaaugauggaaagaucuccgugcaguacaaccugagccacacauaugcuggcgacaccgccaaucauugcggcacgguugcuaacggggugcuucaaacauuuaugcgcauggccuggggaggcucuuacauugcgcuggauuccggguguggaggcugggacugcaucaugaccagcuaccaguaucucauuauccagaacacaaccugggaggaucacugucaguucucuagacccuccccuaucggguaccugggacuucugagccaacggacccgcgacauuuauaucucuagacggcuccugggcacauuuacguggacccuguccgauagcgaaggcaaggacacacccgggggauacugccucacccgcuggaugcugauugaggccgagcuuaaauguuucggcaauacagcugucgccaagugcaacgaaaaacaugaugaggaauuuugcgacaugcugagacucuucgauuuuaauaagcaggcuauccagcggcugaaagccccugcgcagauguccauucaacuuaucaacaaggccgugaaugcucugaucaacgaccagcucauuaugaagaaucaucugcgcgacaucauguguauucccuauugcaacuacucuaaauauugguaccugaaucacaccgugacggggaagacaagccucccuaaauguuggcuggucuccaacggaagcuaccuuaaugagacccacuucucugaugacaucgaacagcaagccgauaacaugauuaccgagaugcugcagaaggaguauauggaaagacagggcaaaacaccgcucgggcugguugaccuguucguguuuuccaccagcuucuaccuuaucucuaucuuucuccaccuggugaagauucccacacaucggcacgucgugggaaaaccuugccccaagccucaucgccugaaucacaugggcaucuguagcugcggcuucuauaagcagcccgggguuccggugagauggaaacgguga

SEQ ID NO: 28196 - RNA, 1476 nt, Artificial Sequence
  derived and/or modified CDS sequence (opt5) from LASV(Z0947-SLE-2011;Clade IV)__AIT17840__GPCmut5
augggccagaucgugaccuucuuucaagaggucccccacguuauugaagaggugaugaacaucgugcugauugcccucagcauccuggcuguccuuaaggggcuguacaauuucgccacaugcggacucgugggccugguuacguuucuucugcucugugggagauccugcaccauuucucuguauaaaggaguguacgaacugcagacacucgagcugaacauggaaacccuuaauaugacaaugccucugagcuguaccaagaacaauucccaucacuauaucauggucggcaacgagacagggcucgagcugacccuuacgaauaccucuaucauuaaccauaaauucugcaaucugagcgacgcgcacaagaaaaaccucuacgaucaugcucugauguccaucauuucuacauuucaccugagcaucccgaauuucaaccaguaugaagccauguccugugacuuuaauggaggcaagauuagcgugcaguacaaccucucucacuccuaugccggcgaugcugccaaucauugcgggaccguugcuaacggagugcugcaaacauucaugcggauggccuggggcgggagcuacaucgcgcuugacucuggaugugaucgcugggacugcauuaugaccuccuaccaguaucugaucauccagaacacgacaugggaggaucacugucaguuuagcagacccucuccuauuggcuaccucgggcugcuuucccaacggacccgcgacaucuauauuagcagacggcugcucggaacauucaccuggacccuguccgauucugaaggcaaggacacacccggcggguacugccugacgcgcuggaugcucaucgaggccgagcugaaauguuuuggaaauaccgcugucgccaagugcaacgaaaaacaugaugaggaguucugcgacaugcuuagacuguuugauuucaauaagcaggcuauucagcggcucaaagccccugcgcagaugagcauccaacugaucaacaaggccgugaaugcucuuauuaacgaccagcugaucaugaagaaucaccuccgcgacauuauguguauccccuauugcaacuacuccaaauauugguaccugaaucacacaaccacaggcaagaccagccugccuaaauguuggcucgugucuaacggguccuaccugaaugaaacgcauuucagcgaugacauugaacagcaagccgauaacaugaucacagagaugcuucagaaggaguauauggaaagacagggaaaaaccccgcugggccucgucgaccuguuuguuuucucuaccagcuuuuaccugaucuccauuuuccuucaccucgugaagauccccacacaucggcacauuguggggaaaccuugccccaagccucaucgccugaaucacaugggaaucuguucuugcggccuguauaagcagcccggcgucccggugaaauggaagagauga

SEQ ID NO: 28197 - RNA, 1717 nt, Artificial Sequence
  mRNA product Design a-1 (hSL-A64-N5) comprising derived and/or modified sequence from LASV(Josiah;Clade IV)__NP_694870__GPCmut5 (opt1)
aggagagucccgcagucggcguccagcggcucugcuuguucgugugugugucguugcaggccuuauucaagcuuaccaugggccagaucgugaccuucuuccaggaggucccccacgugaucgaggaggugaugaacaucguccugaucgcccucagcgugcuggccgugcugaaggggcucuacaacuucgcgaccugcggccuggucgggcuggugacguuccuccugcugugcggccgcuccugcaccaccagccucuacaaggggguguacgagcugcagacccuggagcucaacauggagacgcugaacaugaccaugccgcuguccugcaccaagaacaacagccaccacuacaucauggucggcaacgagaccggccucgagcugacgcugaccaacaccuccaucaucaaccacaaguucugcaaccucagcgacgcccacaagaagaaccuguacgaccacgcccugauguccaucaucagcaccuuccaccucuccauccccaacuucaaccaguacgaggccaugagcugcgacuucaacgggggcaagaucuccgugcaguacaaccugagccacuccuacgccggggacgcggccaaccacugcggcacgguggccaacgggguccugcagaccuucaugcggauggccuggggcggcagcuacaucgcgcucgacuccgggugcggcaacugggacugcaucaugaccagcuaccaguaccugaucauccagaacaccacgugggaggaccacugccaguucucccggcccagccccaucggguaccugggccuccugucccagcgcacccgggacaucuacaucagccgccggcugcucggcaccuucaccuggacgcugagcgacuccgaggggaaggacaccccgggcggguacugccugacccgcuggaugcucaucgaggccgagcugaagugcuucggcaacaccgccguggccaagugcaacgagaagcacgacgaggaguucugcgacaugcugcggcuguucgacuucaacaagcaggccauccagcgccugaaggcgcccgcccagaugagcauccagcugaucaacaaggccgugaacgcccucaucaacgaccagcugaucaugaagaaccaccuccgggacaucaugugcauccccuacugcaacuacuccaaguacugguaccucaaccacacgaccaccggccgcaccagccugcccaagugcuggcuggucuccaacggcagcuaccucaacgagacgcacuucuccgacgacaucgagcagcaggccgacaacaugaucaccgagaugcugcagaaggaguacauggagcggcaggggaagacgccccugggccucguggaccuguucguguucagcaccuccuucuaccugaucagcaucuuccugcaccucgucaagaucccgacccaccgccacaucguggggaaguccugccccaagccccaccggcugaaccacaugggcaucugcagcugcgggcuguacaagcagcccggcgugccggucaaguggaagcgcugaggacuagucccuguucccagagcccacuuuuuuuucuuuuuuugaaauaaaauagccugucuuucagaucucaaaggcucuuuucagagccaccaaaaaaaaaaaaaaaaaaaaaaaaaaaaaaaaaaaaaaaaaaaaaaaaaaaaaaaaaaaaaaaaagaauu

SEQ ID NO: 28198 - RNA, 1714 nt, Artificial Sequence
  mRNA product Design a-1 (hSL-A64-N5) comprising derived and/or modified sequence from LASV(LP;Clade I)__AAF86701__GPCmut5 (opt1)
aggagagucccgcagucggcguccagcggcucugcuuguucgugugugugucguugcaggccuuauucaagcuuaccaugggccagaucaucaccuucuuccaggaggugccccacgucaucgaggaggugaugaacaucgugcugaucgcccucagccugcuggccauccucaaggggcuguacaacaucgcgaccugcggcaucaucgggcuggucgccuuccucuuccugugcggcaaguccugcagccugacgcucaagggcggguacgagcugcagacccuggagcucaacauggagacccugaacaugaccaugccgcuguccugcacgaagaacagcucccaccacuacauccgcgugggcaacgagaccgggcucgagcugacccugaccaacacgagcaucaucaaccacaaguucugcaaccucuccgacgcccacaagaagaaccuguacgaccacgcccugaugagcaucaucuccaccuuccaccucagcauccccaacuucaaccaguacgaggccauguccugcgacuucaacggcgggaagaucagcgugcaguacaaccugucccacagcuacgcgggcgacgccgccgagcacugcgggaccgucgccaacggcgugcugcagaccuucaugcggauggcguggggcgggcgcuacaucgcccucgacuccggcugcgggaacugggacugcaucaugacgagcuaccaguaccugaucauccagaacaccaccugggaggaccacugccaguucucccggcccagccccaucggcuaccugggccuccugucccagcgcacccgggacaucuacaucagccgccggcugcucgggacguucaccuggacccugagcgacuccgagggcaacgagacccccgggggcuacugccugacgcgcuggaugcucaucgaggccgagcugaagugcuucgggaacaccgccguggccaagugcaacgagaagcacgacgaggaguucugcgacaugcugcggcuguucgacuucaacaagcaggcgauccgccggcugaaggcccccgcccagaugagcauccagcugaucaacaaggccgucaacgcccucaucaacgaccagcugaucaugaagaaccaccuccgcgacaucaugugcauccccuacugcaacuacuccaaguacugguaccucaaccacaccagcuccggccggaccagccugcccaagugcuggcugaucuccaacgggagcuaccucaacgagacgcaguucuccgacgacaucgagcagcaggcggacaacaugaucaccgagaugcugcagaaggaguacaucgagcgccagggcaagaccccgcuggggcucguggacaucuucaucuucagcaccuccuucuaccugaucagcaucuuccugcaccugaucaagaucccgacgcaccggcacaucgugggcaagcccugccccaagccccaccgccucaaccacaugggggucugcuccugcggccuguacaagcacccgggcgugcccaccaaguggaagcggugaggacuagucccuguucccagagcccacuuuuuuuucuuuuuuugaaauaaaauagccugucuuucagaucucaaaggcucuuuucagagccaccaaaaaaaaaaaaaaaaaaaaaaaaaaaaaaaaaaaaaaaaaaaaaaaaaaaaaaaaaaaaaaaaagaauu

SEQ ID NO: 28199 - RNA, 1714 nt, Artificial Sequence
  mRNA product Design a-1 (hSL-A64-N5) comprising derived and/or modified sequence from LASV(803213;Clade II)__AAF86703__GPCmut5 (opt1)
aggagagucccgcagucggcguccagcggcucugcuuguucgugugugugucguugcaggccuuauucaagcuuaccaugggccagaucaucaccuucuuccaggaggugccccacgucaucgaggaggugaugaacaucgugcugaucgcccucagccugcuggccauccucaaggggaucuacaacgucgcgaccugcggccuguucgggcugaucuccuuccuccugcugugcggccgcagcugcuccgugacguacaaggggguguacgagcuccagacccuggagcugaacauggccaaccucaacaugaccaugccgcugagcugcaccaagaacaacucccaccacuacaucauggucggcaacgagacgggccuggagcucacccugaccaacaccagcaucaucaaccacaaguucugcaaccuguccgacgcccacaagaagaaccucuacgaccacgcccugaugagcaucaucuccacguuccaccugagcauccccaacuucaaccaguacgaggccauguccugcgacuucaacgggggcaagaucagcgugcaguacaaccucucccacagcuucgcgguggacgccgccaaccacugcgggaccaucgccaacggcguccugcagaccuucaugcggauggcguggggcggguccuacaucgcccuggacagcggcugcgggaacugggacugcaucaugaccuccuaccaguaccucaucauccagaacacgaccugggaggaccacugccaguucagccgccccucccccaucggcuaccuggggcugcucagccagcggacccgcgacaucuacaucagccggcgccugcugggcaccuucacguggacccucuccgacagcgagggcaacgaggcccccgggggcuacugccugacccgguggaugcugaucgaggccgagcucaagugcuucgggaacaccgccguggcgaagugcaacgagaagcacgacgaggaguucugcgacaugcugcgccuguucgacuucaacaagcaggccaucaagcggcucaagacgcccgcccagauguccauccagcugaucaacaaggccgugaacgcccugaucaacgaccagcucaucaugaagaaccaccuccgcgacaucaugugcauccccuacugcaacuacagccgguacugguaccugaaccacaccgucaccgggaagaccucccugccccgcugcuggcuggugagcaacggcuccuaccugaacgagacgcacuucagcgacgacaucgagcagcaggcggacaacaugaucaccgagaugcuccagaaggaguacauggaccggcagggcaagaccccgcuggggcugguggaccucuucgucuucuccaccagcuucuaccugaucuccaucuuccugcaccuggugaagaucccgacgcaccgccacaucgugggcaagcccugccccaagccccaccggcucaaccacauggggaucugcagcugcggccuguacaagcacccggggguccccgugaaguggaagcgcugaggacuagucccuguucccagagcccacuuuuuuuucuuuuuuugaaauaaaauagccugucuuucagaucucaaaggcucuuuucagagccaccaaaaaaaaaaaaaaaaaaaaaaaaaaaaaaaaaaaaaaaaaaaaaaaaaaaaaaaaaaaaaaaaagaauu

SEQ ID NO: 28200 - RNA, 1714 nt, Artificial Sequence
  mRNA product Design a-1 (hSL-A64-N5) comprising derived and/or modified sequence from LASV(GA391;Clade III)__CAA36645__GPCmut5 (opt1)
aggagagucccgcagucggcguccagcggcucugcuuguucgugugugugucguugcaggccuuauucaagcuuaccaugggccagaucgugaccuucuuccaggaggucccccacgugaucgaggaggugaugaacaucguccugaucgcccucagcauccuggccauccugaaggggcucuacaacguggcgaccugcggccugaucgggcuggugacguuccuccugcuguccggccgcagcugcucccucaucuacaaggggaccuacgagcugcagacccuggagcucaacauggagacccugaacaugacgaugccgcugagcugcaccaagaacaacucccaccacuacauccgggucggcaacgagaccggccucgagcugacccugacgaacaccagcauccucaaccacaaguucugcaaccuguccgacgcccacaagcgcaaccuguacgaccacagccucauguccaucaucagcaccuuccaccuguccauccccaacuucaaccaguacgaggccaugagcugcgacuucaacgggggcaagaucaccgugcaguacaaccugucccacagcuucgccguggacgccgcggggcacugcggcacgcucgccaacgggguccugcagaccuucaugcggauggccuggggcggcuccuacaucgcccuggacagcgggugcggcaacugggacugcaucaugaccuccuaccaguaccucaucauccagaacaccacgugggacgaccacugccaguucagccggcccucccccaucggguaccugggccugcucagccagcgcacccgggacaucuacaucagccgccggcugcugggcaccuucaccuggacgcucuccgacagcgaggggaacgagaccccgggcggguacugccugacccgcuggaugcugaucgaggcggagcucaagugcuucggcaacaccgccguggccaagugcaacgagaagcacgacgaggaguucugcgacaugcugcggcuguucgacuucaacaagcaggccauccgccggcucaagacgcccgcccagauguccauccagcugaucaacaaggcggugaacgcccugaucaacgaccagcucaucaugaagaaccaccuccgcgacaucaugugcauccccuacugcaacuacagccgguacugguaccugaaccacaccuccaccggcaagaccagccugccccgcugcuggcugaucuccaacggcagcuaccugaacgagacgaaguucuccgacgacaucgagcagcaggccgacaacaugaucaccgagaugcuccagaaggaguacaucgaccggcaggggaagacgccccugggccuggucgaccuguucguguucagcaccuccuucuaccucaucagcaucuuccugcaccuggugaagaucccgacccaccgccacaucgucgggaagcccugccccaagccccaccggcucaaccacaugggcaucugcuccugcgggcuguacaagcagccgggcgugcccgugcgcuggaagcggugaggacuagucccuguucccagagcccacuuuuuuuucuuuuuuugaaauaaaauagccugucuuucagaucucaaaggcucuuuucagagccaccaaaaaaaaaaaaaaaaaaaaaaaaaaaaaaaaaaaaaaaaaaaaaaaaaaaaaaaaaaaaaaaaagaauu

SEQ ID NO: 28201 - RNA, 1717 nt, Artificial Sequence
  mRNA product Design a-1 (hSL-A64-N5) comprising derived and/or modified sequence from LASV(AV;Clade V)__CCA30314__GPCmut5 (opt1)
aggagagucccgcagucggcguccagcggcucugcuuguucgugugugugucguugcaggccuuauucaagcuuaccaugggccagaucgugaccuucuuccaggaggucccccacgugaucgaggaggugaugaacaucguccugaucgcccucagcauccuggccgugcugaaggggcucuacaacaucgcgaccugcggccugaucgggcugaucacguuccuccugcugugcggccgcuccugcagcuccaaccucuacaaggggguguacgagcugcagagccuggaccucaacauggagacccugaacaugaccaugccgcuguccugcaccaagaacaacagccaccacuacauccgggucggcaacgacacgggccucgagcugacccugaccaacaccuccauccucaaccacaaguucugcaaccugagcgacgcccacaagaaggaccuguacgaccacgcccucauguccaucaucagcacguuccaccuguccauccccaacuucaaccaguacgaggccaugagcugcgacuucaacgggggcaagaucuccgugcaguacaaccugagccacuccuacgccaucgacgcggccaaccacugcgggaccguggccaacggcauccuccagaccuucaugcgcauggccuggggcgggagcuacaucgcgcuggacuccggcugcgggaacugggacugcaucaugaccagcuaccaguaccugaucauccagaacacgaccugggagaaccacugccaguucucccgccccagccccaucggcuaccucgggcugcugagccagcggacccgcgacaucuacaucucccggcgccuccugggcaccuucacguggacccugagcgacuccgagggcaacgccacccccgggggcuacugccucacccgguggaugcugaucgaggccgagcugaagugcuucgggaacacggccgucgccaagugcaacgagaagcacgacgaggaguucugcgacaugcuccgccuguucgacuucaacaagcaggcgaucagccggcugaagucccccgcccagaugagcauccagcucaucaacaaggccgugaacgcccugaucaacgaccagcugaucaugaagaaccaccuccgcgacaucaugugcauccccuacugcaacuacuccaaguacugguaccugaaccacaccaucaccgggaagaccagccugcccaagugcuggcucguguccaacggcagcuaccugaacgagacgcacuucuccgacgacaucgagcagcaggccgacaacaugaucaccgagaugcugcagaaggaguacauggagcggcagggcaagaccccgcucgggcuggucgaccuguucguguucagcaccuccuucuaccugaucagcaucuuccuccgccuggugaagaucccgacgcaccggcacaucgucggcaagcccugccccaagccccaccgccugaaccacauggggaucugcuccugcggccucuacaagcagccgggggugcccgugcgguggaagcgcugaggacuagucccuguucccagagcccacuuuuuuuucuuuuuuugaaauaaaauagccugucuuucagaucucaaaggcucuuuucagagccaccaaaaaaaaaaaaaaaaaaaaaaaaaaaaaaaaaaaaaaaaaaaaaaaaaaaaaaaaaaaaaaaaagaauu

SEQ ID NO: 28202 - RNA, 1714 nt, Artificial Sequence
  mRNA product Design a-1 (hSL-A64-N5) comprising derived and/or modified sequence from LASV(Togo/2016/7082;Clade VI)__AMR44577__GPCmut5 (opt1)
aggagagucccgcagucggcguccagcggcucugcuuguucgugugugugucguugcaggccuuauucaagcuuaccaugggccagaucaucaccuucuuccaggaggugccccacgucaucgaggaggugaugaacaucgugcugaucgcccucagccugcuggccauccucaagggggucuacaacguggcgaccugcggcaucaucgggcuggugacguuccuguuccucugcggccgcuccugcagccugaucuacaagggguccuacgagcugcagacccucgagcugaacauggagacccugaacaugaccaugccgcucagcugcacgaagaacuccagccaccacuacauccgggucggcaacgagaccggccuggagcugacccucaccaacacguccaucaucaaccacaaguucugcaaccugagcgacgcccacaagcgcaaccuguacgaccacgcccucauguccauccugagcaccuuccaccuguccauccccaacuucaaccaguacgaggccaugagcugcgacuucaacgggggcaagaucuccgugcaguacaaccucagccacgccuacgcgguggacgccgccgagcacugcgggaccgucgccaacggcgugcugcagaccuucaugcggauggcguggggcggguccuacaucgcccuggacagcggcugcgggaacugggacugcaucaugacguccuaccaguaccucaucauccagaacaccaccugggaggaccacugccaguucagccggcccucccccaucggcuaccuggggcugcucagccagcgcacccgggacaucuacaucagccgccggcugcugggcacguucaccuggacccucuccgacagcgagggcaacgagacccccgggggcuacugccugacgcgcuggaugcugaucgaggccgagcucaagugcuucgggaacaccgccguggccaagugcaacgagaagcacgacgaggaguucugcgacaugcugcggcuguucgacuucaacaagcaggcgauccagcgccucaagucccccgcccagaugagcauccagcugaucaacaaggccgucaacgcccugaucaacgaccagcucaucaugaagaaccaccuccgggacaugaugugcauccccuacugcaacuacuccaaguacugguaccugaaccacaccagcuccgggcgcaccagccugcccaagugcuggcugguguccaacggcagcuaccugaacgagacgcacuucuccgacgacaucgagcagcaggccgacaacaugaucaccgagaugcuccagaaggaguacaucgaccggcagggcaagaccccgcuggggcugguggaccucuucgucuucagcaccuccuucuaccugaucagcaucuuccugcaccugaucaagaucccgacgcaccgccacaucgugggcaagcccugccccaagccccaccggcucaaccacauggggaucugcuccugcggccuguacaagcagccgggggugcccacccgcuggaagcggugaggacuagucccuguucccagagcccacuuuuuuuucuuuuuuugaaauaaaauagccugucuuucagaucucaaaggcucuuuucagagccaccaaaaaaaaaaaaaaaaaaaaaaaaaaaaaaaaaaaaaaaaaaaaaaaaaaaaaaaaaaaaaaaaagaauu

SEQ ID NO: 28203 - RNA, 1714 nt, Artificial Sequence
  mRNA product Design a-1 (hSL-A64-N5) comprising derived and/or modified sequence from LASV(KAK-428;Clade n.d. (VII))__ANH09740__GPCmut5 (opt1)
aggagagucccgcagucggcguccagcggcucugcuuguucgugugugugucguugcaggccuuauucaagcuuaccaugggccagaucgugaccuucuuccaggaggucccccacgugaucgaggaggugaugaacaucguccugaucgcccucagccugcuggccauccucaaggggcuguacaacuucgcgaccugcggcgugaucgggcugaucacguuccuccugcugugcggccgcuccugcagcgccaccuacaaggggcaguacgagcuccagacccuggagcugaacauggagucccucaacaugaccaugccgcugagcugcacgaagaacaacucccaccacuacauccgggccggcaacaacaccggccuggagcucacccugaccaacacgagcaucaucucccacaaguucugcaaccugagcgacgcccacaagaagaaccucuacgaccacacccugauguccaucaucaccaccuuccaccugagcauccccaacuucaaccaguacgaggccauguccugcgacuucaacgggggcaagaucagcauccaguacaaccucucccacagcuacgcgggggacgccgcccagcacugcggcacgguggccaacgggguccugcagaccuucaugcgcauggcguggggcggcuccuaccuggcccucgacagcgggugccgcggcugggacugcaucaucuccagcuaccaguaccugaucauccagaacaccaccugggacgaccacugccaguucucccggcccagccccaucggguaccugggcuucgugagccagaagacgcgcgacaucuacaucucccggcgccuccugggcaccuucaccuggacccugagcgacuccgaggggcacgacaugccgggcggguacugccucacgcgguggaugcugaucgaggccgaccugaagugcuucggcaacaccgccguggccaagugcaacgagaagcacgacgaggaguucugcgacauguggcgccucuucgacuucaacaagcaggcgauccagcggcugaaggcccccgcccagaugaacauccagcugaucaacaaggccgucaacgcccucaucaacgaccagcugaugaugaagaaccaccuccgcgacaucaugugcauccccuacugcaacuacagcaaguucugguaccugaacaacaccaccacgggccggaccucccugccccgcugcuggcugaucagcaacggcuccuaccucaacgagacccacuucagcgacgacaucgagcagcaggcggacaacaugaucaccgagaugcugcagaaggaguacauggaccggcaggggaagacgccccugggccucguggaccuguucguguucuccaccagcuucuaccugaucaccaucuuccuccaccuggucaagaucccgacccaccgccacaucguggggaagcccugccccaagccccaccggcugaaccacaugggcaucugcuccugcgggcuguacaagcagccgggcgugcccguccgcuggaagcggugaggacuagucccuguucccagagcccacuuuuuuuucuuuuuuugaaauaaaauagccugucuuucagaucucaaaggcucuuuucagagccaccaaaaaaaaaaaaaaaaaaaaaaaaaaaaaaaaaaaaaaaaaaaaaaaaaaaaaaaaaaaaaaaaagaauu

SEQ ID NO: 28204 - RNA, 1714 nt, Artificial Sequence; identical to SEQ ID NO: 28198
  mRNA product Design a-1 (hSL-A64-N5) comprising derived and/or modified sequence from LASV(Pinneo-NIG-1969;Clade I)__AIT17836__GPCmut5 (opt1)

SEQ ID NO: 28205 - RNA, 1714 nt, Artificial Sequence
  mRNA product Design a-1 (hSL-A64-N5) comprising derived and/or modified sequence from LASV(ISTH0009-NIG-2011;Clade II)__AIT17404__GPCmut5 (opt1)
aggagagucccgcagucggcguccagcggcucugcuuguucgugugugugucguugcaggccuuauucaagcuuaccaugggccagaucaucaccuucuuccaggaggugccccacgucaucgaggaggugaugaacaucgugcugaucgcccucagccugcuggccauccucaaggggaucuacaacgucgcgaccugcggccuguucgggcugguguccuuccuccugcugugcggccgcagcugcuccacgaccuacaaggggguguacgagcuccagacccuggagcuggacauggccagccucaacaugaccaugccgcuguccugcacgaagaacaacagccaccacuacaucauggucggcaacgagaccggccuggagcucacccugaccaacacguccaucaucaaccacaaguucugcaaccugagcgacgcccacaagaagaaccucuacgaccacgcccugauguccaucaucagcaccuuccaccuguccauccccaacuucaaccaguacgaggccaugagcugcgacuucaacgggggcaagaucuccgugcaguacaaccucagccacgcguacgccguggacgccgccaaccacugcgggaccaucgcgaacggcguccugcagaccuucaugcggauggccuggggcggguccuacaucgcccuggacagcggcugcggguccugggacugcaucaugacgagcuaccaguaccucaucauccagaacaccaccugggaggaccacugccaguucucccgccccagccccaucggcuaccuggggcugcucagccagcggacccgcgacaucuacaucucccggcgccugcugggcacguucaccuggacccucagcgacuccgagggcaacgagacccccgggggcuacugccugacgcgguggaugcugaucgaggccgagcucaagugcuucgggaacaccgccguggcgaagugcaacgagaagcacgacgaggaguucugcgacaugcugcgccuguucgacuucaacaagcaggccauccggcgccucaagacccccgcccagaugagcauccagcugaucaacaaggccgugaacgcccugaucaacgaccagcucaucaugaagaaccaccuccgggacaucaugugcaucccguacugcaacuacuccaaguacugguaccugaaccacaccgucacggggaagaccagccugccccgcugcuggcugguguccaacggcagcuaccugaacgagacccacuucuccgacgacaucgagcagcaggcggacaacaugaucaccgagcuccugcagaaggaguacauggaccggcagggcaagacgccccuggggcucguggaccuguucgucuucagcaccuccuucuaccugaucagcaucuuccugcaccucaucaagaucccgacccaccgccacaucaccggcaagcccugccccaagccccaccggcugaaccacauggggaucugcuccugcggccuguacaagcacccgggggugcccgugaaguggaagcgcugaggacuagucccuguucccagagcccacuuuuuuuucuuuuuuugaaauaaaauagccugucuuucagaucucaaaggcucuuuucagagccaccaaaaaaaaaaaaaaaaaaaaaaaaaaaaaaaaaaaaaaaaaaaaaaaaaaaaaaaaaaaaaaaaagaauu

SEQ ID NO: 28206 - RNA, 1714 nt, Artificial Sequence
  mRNA product Design a-1 (hSL-A64-N5) comprising derived and/or modified sequence from LASV(ISTH2010-NIG-2012;Clade II)__AIT17482__GPCmut5 (opt1)
aggagagucccgcagucggcguccagcggcucugcuuguucgugugugugucguugcaggccuuauucaagcuuaccaugggccagaucaucaccuucuuccaggaggugccccacgucaucgaggaggugaugaacaucgugcugaucgcccucagccugcuggccauccucaaggggaucuacaacgucgcgaccugcggccuguucgggcugguguccuuccuccugcugugcggccgcagcugcuccacgaccuacaaggggguguacgagcuccagacccuggagcuggacauggccagccucaacaugaccaugccgcuguccugcacgaagaacaacagccaccacuacaucauggucggcaacgagaccggccuggagcucacccugaccaacacguccaucaucaaccacaaguucugcaaccugagcgacgcccacaagaagaaccucuacgaccacgcccugauguccaucaucagcaccuuccaccuguccauccccaacuucaaccaguacgaggccaugagcugcgacuucaacgggggcaagaucuccgugcaguacaaccucagccacgcguacgccguggacgccgccaaccacugcgggaccaucgcgaacggcguccugcagaccuucaugcggauggccuggggcggguccuacaucgcccuggacagcggcugcggguccugggacugcaucaugacgagcuaccaguaccucaucauccagaacaucaccugggaggaccacugccaguucucccgccccagccccaucggcuaccuggggcugcucagccagcggacccgcgacaucuacaucucccggcgccugcugggcaccuucacguggacccucagcgacuccgagggcaacgagacccccgggggcuacugccugacccgguggaugcugaucgaggccgagcucaagugcuucgggaacacggccguggcgaagugcaacgagaagcacgacgaggaguucugcgacaugcugcgccuguucgacuucaacaagcaggccauccggcgccucaagacccccgcccagaugagcauccagcugaucaacaaggccgugaacgcccugaucaacgaccagcucaucaugaagaaccaccuccgggacaucaugugcauccccuacugcaacuacuccaaguacugguaccugaaccacaccgucaccgggaagacgagccugccccgcugcuggcugguguccaacggcagcuaccugaacgagacccacuucuccgacgacaucgagcagcaggcggacaacaugaucaccgagcuccugcagaaggaguacaucgaccggcagggcaagaccccgcuggggcucguggaccuguucgucuucagcacguccuucuaccugaucagcaucuuccugcaccucgugaagaucccgacccaccgccacguggucggcaagcccugccccaagccccaccggcugaaccacauggggaucugcuccugcggccuguacaagcacccgggggugcccgugaaguggaagcgcugaggacuagucccuguucccagagcccacuuuuuuuucuuuuuuugaaauaaaauagccugucuuucagaucucaaaggcucuuuucagagccaccaaaaaaaaaaaaaaaaaaaaaaaaaaaaaaaaaaaaaaaaaaaaaaaaaaaaaaaaaaaaaaaaagaauu

SEQ ID NO: 28207 - RNA, 1714 nt, Artificial Sequence
  mRNA product Design a-1 (hSL-A64-N5) comprising derived and/or modified sequence from LASV(Lassa virus/H.sapiens-wt/NGA/2015/ISTH_0543;Clade II)__AVO03639__GPCmut5 (opt1)
aggagagucccgcagucggcguccagcggcucugcuuguucgugugugugucguugcaggccuuauucaagcuuaccaugggccagaucaucaccuucuuccaggaggugccccacgucaucgaggaggugaugaacaucgugcugaucgcccucagccugcuggccauccucaaggggaucuacaacgucgcgaccugcggccuguucgggcugguguccuuccuccugcugugcggccgcagcugcuccacgaccuacaaggggguguacgagcuccagacccuggagcuggacauggccaaccucaacaugaccaugccgcugagcugcacgaagaacaacucccaccacuacaucauggucggcaacgagaccggccuggagcucacccugaccaacacgagcaucaucaaccacaaguucugcaaccuguccgacgcccacaagaagaaccucuacgaccacgcccugaugagcaucaucuccaccuuccaccugagcauccccaacuucaaccaguacgaggccauguccugcgacuucaacgggggcaagaucagcgugcaguacaaccucucccacaccuacgcgguggacgccgccaaccacugcgggaccaucgccaacggcguccugcagacguucaugcggauggcguggggcgggagcuacaucgcccuggacuccggcugcgggagcugggacugcaucaugaccuccuaccaguaccucgugauccagaacaccaccugggaggaccacugccaguucagccgccccucccccaucggcuaccuggggcugcucagccagcggacgcgcgacaucuacaucagccggcgccugcugggcaccuucaccuggacccucuccgacagcgagggcaacgagacgcccgggggcuacugccugacccgguggaugcugaucgaggccgagcucaagugcuucgggaacaccgccguggccaagugcaacgagaagcacgacgaggaguucugcgacaugcugcgccuguucgacuucaacaagcaggcgauccggcgccucaagacccccgcccagauguccauccagcugaucaacaaggccgucaacgcccugaucaacgaccagcucaucaugaagaaccaccuccgggacaucaugugcauccccuacugcaacuacagcaaguacugguaccugaaccacacggugaccgggaagaccucccugccccgcugcuggcuggugagcaacggcuccuaccugaacgagacccacuucagcgacgacaucgagcagcaggccgacaacaugaucacggagcuccugcagaaggaguacaucgaccggcagggcaagaccccgcuggggcucgucgaccuguucguguucuccaccagcuucuaccugaucuccaucuuccugcaccucgugaagaucccgacccaccgccacaucacgggcaagcccugccccaagccccaccggcugaaccacauggggaucugcagcugcggccuguacaagcacccggggguccccgugaaguggaagcgcugaggacuagucccuguucccagagcccacuuuuuuuucuuuuuuugaaauaaaauagccugucuuucagaucucaaaggcucuuuucagagccaccaaaaaaaaaaaaaaaaaaaaaaaaaaaaaaaaaaaaaaaaaaaaaaaaaaaaaaaaaaaaaaaaagaauu

SEQ ID NO: 28208 - RNA, 1714 nt, Artificial Sequence
  mRNA product Design a-1 (hSL-A64-N5) comprising derived and/or modified sequence from LASV(Lassa virus/H.sapiens-wt/NGA/2016/ISTH_0009;Clade II)__AVO03571__GPCmut5 (opt1)
aggagagucccgcagucggcguccagcggcucugcuuguucgugugugugucguugcaggccuuauucaagcuuaccaugggccagaucaucaccuucuuccaggaggugccccacgucaucgaggaggugaugaacaucgugcugaucgcccucagccugcuggccauccucaaggggaucuacaacgucgcgaccugcggccugcuggggcucguguccuuccugcugcucugcggccgcagcugcuccacgaccuacaaggggguguacgagcugcagacccuggagcucgacauggccagccugaacaugaccaugccgcuguccugcacgaagaacaacagccaccacuacaucauggucggcaacgagaccggccucgagcugacccugaccaacacguccaucaucaaccacaaguucugcaaccucagcgacgcccacaagaagaaccuguacgaccacgcccugauguccaucaucagcaccuuccaccucuccauccccaacuucaaccaguacgaggccaugagcugcgacuucaacgggggccggaucuccgugcaguacaaccugagccacuccuacgcgguggacgccgccaaccacugcgggaccaucgccaacggcguccugcagaccuucaugcgcauggcguggggcgggagcuacaucgcccucgacuccggcugcgggagcugggacugcaucaugacguccuaccaguaccugaucauccagaacaccaccugggaggaccacugccaguucagccggcccagccccaucggcuaccuggggcuccugucccagcgcacccgggacaucuacaucagccgccggcugcucggcacguucaccuggacccuguccgacagcgagggcaacgagacccccgggggcuacugccugacgcgcuggaugcucaucgaggccgagcugaagugcuucgggaacaccgccguggccaagugcaacgagaagcacgacgaggaguucugcgacaugcugcggcuguucgacuucaacaagcaggcgauccgccggcugaagacccccgcccagauguccauccagcugaucaacaaggccgugaacgcccucaucaacgaccagcugaucaugaagaaccaccuccgcgacaucaugugcaucccguacugcaacuacagcaaguacugguaccucaaccacaccgucacggggaagaccucccugccccggugcuggcuggugagcaacggcuccuaccucaacgagacccacuucagcgacgacaucgagcagcaggccgacaacaugaucaccgagcugcugcagaaggaguacaucgaccgccagggcaagacgccccucgggcugguggaccuguucgucuucuccaccagcuucuaccugaucuccaucuuccuccaccuggugaagaucccgacccaccggcacaucaccggcaagcccugccccaagccccaccgccugaaccacauggggaucugcagcugcggccucuacaaccacccgggggugcccgucaaguggaagcggugaggacuagucccuguucccagagcccacuuuuuuuucuuuuuuugaaauaaaauagccugucuuucagaucucaaaggcucuuuucagagccaccaaaaaaaaaaaaaaaaaaaaaaaaaaaaaaaaaaaaaaaaaaaaaaaaaaaaaaaaaaaaaaaaagaauu

SEQ ID NO: 28209 - RNA, 1714 nt, Artificial Sequence
  mRNA product Design a-1 (hSL-A64-N5) comprising derived and/or modified sequence from LASV(Lassa virus/H.sapiens-wt/NGA/2016/ISTH_0017;Clade II)__AVO03567__GPCmut5 (opt1)
aggagagucccgcagucggcguccagcggcucugcuuguucgugugugugucguugcaggccuuauucaagcuuaccaugggccagaucaucaccuucuuccaggaggugccccacgucaucgaggaggugaugaacaucgugcugaucgcccucagccugcuggccauccucaaggggaucuacaacgucgcgaccugcggccuguucgggcugguguccuuccuccugcugugcggccgcagcugcuccacgaccuacaaggggguguacgagcuccagacccuggagcuggacauggccagccucaacaugaccaugccgcuguccugcacgaagaacaacagccaccacuacaucauggucggcaacgagaccggccuggagcucacccugaccaacacguccaucaucaaccacaaguucugcaaccugagcgacgcccacaagaagaaccucuacgaccacgcccugauguccaucaucagcaccuuccaccuguccauccccaacuucaaccaguacgaggccaugagcugcgacuucaacgggggcaagaucuccgugcaguacaaccucagccacaccuacgcgaucgacgccgccaaccacugcgggaccaucgccaacggcgugcugcagacguucaugcggauggcguggggcggguccuacaucgcccuggacagcggcugcggguccugggacugcaucaugaccagcuaccaguaccucaucauccagaacaccaccugggaggaccacugccaguucucccgccccagccccaucggcuaccuggggcugcucagccagcggacgcgcgacaucuacaucucccggcgccugcugggcaccuucaccuggacccucagcgacuccgagggcaacgagacgcccgggggcuacugccugacccgguggaugcugaucgaggccgagcucaagugcuucgggaacaccgccgucgccaagugcaacgagaagcacgacgaggaguucugcgacaugcugcgccuguucgacuucaacaagcaggcgauccggcgccucaagacccccgcccagaugagcauccagcugaucaacaaggccgugaacgcccugaucaacgaccagcucaucaugaagaaccaccuccgggacaucaugugcauccccuacugcaacuacuccaaguacugguaccugaaccacacggugaccgggaagaccagccugccccgcugcuggcuggucuccaacggcagcuaccugaacgagacccacuucuccgacgacaucgagcagcaggccgacaacaugaucacggagcuccugcagaaggaguacauggaccggcagggcaagaccccgcuggggcucguggaccuguucguguucagcaccuccuucuaccugaucagcaucuuccugcaccucguccgcaucccgacccaccggcacgugaucggcaagcccugccccaagccccaccgccugaaccacauggggaucugcuccugcggccuguacaagcacccgggggugcccgucaaguggaagcggugaggacuagucccuguucccagagcccacuuuuuuuucuuuuuuugaaauaaaauagccugucuuucagaucucaaaggcucuuuucagagccaccaaaaaaaaaaaaaaaaaaaaaaaaaaaaaaaaaaaaaaaaaaaaaaaaaaaaaaaaaaaaaaaaagaauu

SEQ ID NO: 28210 - RNA, 1714 nt, Artificial Sequence
  mRNA product Design a-1 (hSL-A64-N5) comprising derived and/or modified sequence from LASV(Lassa virus/H.sapiens-wt/NGA/2018/ISTH_0959;Clade II)__AVV65099__GPCmut5 (opt1)
aggagagucccgcagucggcguccagcggcucugcuuguucgugugugugucguugcaggccuuauucaagcuuaccaugggccagaucaucaccuucuuccaggaggugccccacgucaucgaggaggugaugaacaucgugcugaucgcccucagccugcuggccauccucaaggggaucuacaacgucgugaccugcggccuguucgggcugguguccuuccuccugcugugcggccgcagcugcuccacgaccuacaagggggucuacgagcuccagacccuggagcuggacauggcgagccucaacaugaccaugccgcuguccugcacgaagaacaacagccaccacuacaucauggugggcaacgagaccggccuggagcucacccugaccaacacguccaucaucaaccacaaguucugcaaccugagcgacgcccacaagaagaaccucuacgaccacgcccugauguccaucaucagcaccuuccaccuguccauccccaacuucaaccaguacgaggccaugagcugcgacuucaacgggggcaagaucuccgugcaguacaaccucagccacgccuacgcgaucgacgccgccaaccacugcgggaccaucgccaacggcguccugcagaccuucaugcggauggcguggggcggguccuacaucgcccuggacagcggcugcggguccugggacugcaucaugacgagcuaccaguaccucaucauccagaacaccaccugggaggaccacugccaguucucccgccccagccccaucggcuaccuggggcugcucagccagcggacccgcgacaucuacaucucccggcgccugcugggcacguucaccuggacccucagcgacuccgagggcaacgagacccccgggggcuacugccugacgcgguggaugcugaucgaggccgagcucaagugcuucgggaacaccgccguggccaagugcaacgagaagcacgacgaggaguucugcgacaugcugcgccuguucgacuucaacaagcaggcgauccggcgccucaagacccccgcccagaugagcauccagcugaucaacaaggccgugaacgcccugaucaacgaccagcucaucaugaagaaccaccuccgggacaucaugugcaucccguacugcaacuacuccaaguacugguaccugaaccacaccgucacggggaagaccagccugccccgcugcuggcugguguccaacggcagcuaccugaacgagacccacuucuccgacgacaucgagcagcaggccgacaacaugaucaccgagcuccugcagaaggaguacaucgaccggcagggcaagacgccccuggggcucguggaccuguucgucuucagcaccuccuucuaccugaucagcaucuuccugcaccucgugaagaucccgacccaccgccacgugaucggcaagcccugccccaagccccaccggcugaaccacauggggaucugcuccugcggccuguacaagcacccggggguccccgugaaguggaagcgcugaggacuagucccuguucccagagcccacuuuuuuuucuuuuuuugaaauaaaauagccugucuuucagaucucaaaggcucuuuucagagccaccaaaaaaaaaaaaaaaaaaaaaaaaaaaaaaaaaaaaaaaaaaaaaaaaaaaaaaaaaaaaaaaaagaauu

SEQ ID NO: 28211 - RNA, 1714 nt, Artificial Sequence
  mRNA product Design a-1 (hSL-A64-N5) comprising derived and/or modified sequence from LASV(LASV003-NIG-2008;Clade II)__AIT17580__GPCmut5 (opt1)
aggagagucccgcagucggcguccagcggcucugcuuguucgugugugugucguugcaggccuuauucaagcuuaccaugggccagaucaucaccuucuuccaggaggugccccacgucaucgaggaggugaugaacaucgugcugaucgcccucagccugcuggccauccucaaggggaucuacaacgucgcgaccugcggccuguucgggcugguguccuuccuccugcugugcggccgcagcugcuccacgaccuacaaggggguguacgagcuccagacccuggagcuggacauggccagccucaacaugaccaugccgcuguccugcacgaagaacaacagccaccacuacaucauggucggcaacgagaccggccuggagcucacccugaccaacacguccaucaucaaccacaaguucugcaaccugagcgacgcccacaagaagaaccucuacgaccacgcccugauguccaucaucagcaccuuccaccuguccauccccaacuucaaccaguacgaggccaugagcugcgacuucaacgggggcaagaucuccgugcaguacaaccucagccacaccuacgcgguggacgccgccaaccacugcgggaccaucgccaacggcguccugcagacguucaugcggauggcguggggcggguccuacaucgcccuggacagcggcugcggguccugggacugcaucaugaccagcuaccaguaccucaucauccagaacaccaccugggaggaccacugccaguucucccgccccagccccaucggcuaccuggggcugcucagccagcggacgcgcgacaucuacaucucccggcgccugcugggcaccuucaccuggacccucagcgacuccgagagcaacgagacgccgggcggguacugccugacccgguggaugcugaucgaggccgagcucaagugcuucggcaacaccgccguggccaagugcaacgagaagcacgacgaggaguucugcgacaugcugcgccuguucgacuucaacaagcaggcgauccggcgccucaaggcccccgcccagauguccauccagcugaucaacaaggccgugaacgcccugaucaacgaccagcucaucaugaagaaccaccuccgggacaucaugugcauccccuacugcaacuacagcaaguacugguaccugaaccacaccgucacgggccgcaccucccugccccggugcuggcuggugagcaacggguccuaccugaacgagacccacuucagcgacgacaucgagcagcaggcggacaacaugaucaccgagcuccugcagaaggaguacauggaccgccagggcaagacgccccugggccucguggaccuguucgucuucuccaccagcuucuaccugaucuccaucuuccugcaccucgugaagaucccgacccaccggcacgugaucgggaagcccugccccaagccccaccgccugaaccacaugggcaucugcagcugcgggcuguacaagcacccgggcguccccgugaaguggaagcggugaggacuagucccuguucccagagcccacuuuuuuuucuuuuuuugaaauaaaauagccugucuuucagaucucaaaggcucuuuucagagccaccaaaaaaaaaaaaaaaaaaaaaaaaaaaaaaaaaaaaaaaaaaaaaaaaaaaaaaaaaaaaaaaaagaauu

SEQ ID NO: 28212 - RNA, 1714 nt, Artificial Sequence
  mRNA product Design a-1 (hSL-A64-N5) comprising derived and/or modified sequence from LASV(LASV035-NIG-2009;Clade II)__AIT17588__GPCmut5 (opt1)
aggagagucccgcagucggcguccagcggcucugcuuguucgugugugugucguugcaggccuuauucaagcuuaccaugggccagaucaucaccuucuuccaggaggugccccacgucaucgaggaggugaugaacaucgugcugaucgcccucagccugcuggccauccucaaggggaucuacaacgucgcgaccugcggccuguucgggcugguguccuuccuccugcugugcggccgcagcugcuccacgaccuacaaggggguguacgagcuccagacccuggagcuggacauggccagccucaacaugaccaugccgcuguccugcacgaagaacaacagccaccacuacaucauggucggcaacgagaccggccuggagcucacccugaccaacacguccaucaucaaccacaaguucugcaaccugagcgacgcccacaagaagaaccucuacgaccacgcccugauguccaucaucagcaccuuccaccuguccauccccaacuucaaccaguacgaggccaugagcugcgacuucaacgggggcaagaucuccgugcaguacaaccucagccacgcguacgccguggacgccgccaaccacugcgggaccaucgcgaacggcguccugcagaccuucaugcggauggccuggggcggguccuacaucgcccuggacagcggcugcggguccugggacugcaucaugacgagcuaccaguaccucaucauccagaacaccaccugggaggaccacugccaguucucccgccccagccccaucggcuaccuggggcugcucagccagcggacccgcgacaucuacaucucccggcgccugcugggcacguucaccuggacccucagcgacuccgagggcaacgagacccccgggggcuacugccugacgcgguggaugcugaucgaggccgagcucaagugcuucgggaacaccgccguggcgaagugcaacgagaagcacgacgaggaguucugcgacaugcugcgccuguucgacuucaacaagcaggccauccggcgccucaaggcccccgcccagaugagcauccagcugaucaacaaggccgugaacgcgcugaucaacgaccagcucaucaugaagaaccaccuccgggacaucaugugcauccccuacugcaacuacuccaaguacugguaccugaaccacaccgucaccgggaagacgagccugccccgcugcuggcugguguccaacggcagcuaccugaacgagacccacuucuccgacgacaucgagcagcaggccgacaacaugaucaccgagcuccugcagaaggaguacaucgaccggcagggcaagaccccgcuggggcucguggaccuguucgucuucagcacguccuucuaccugaucagcaucuuccugcaccucgugaagaucccgacccaccgccacgugaucggcaagcccugccccaagccccaccggcugaaccacauggggaucugcuccugcggccuguacaagcacccggggguccccgugaaguggaagcgcugaggacuagucccuguucccagagcccacuuuuuuuucuuuuuuugaaauaaaauagccugucuuucagaucucaaaggcucuuuucagagccaccaaaaaaaaaaaaaaaaaaaaaaaaaaaaaaaaaaaaaaaaaaaaaaaaaaaaaaaaaaaaaaaaagaauu

SEQ ID NO: 28213 - RNA, 1714 nt, Artificial Sequence
  mRNA product Design a-1 (hSL-A64-N5) comprising derived and/or modified sequence from LASV(LASV1000-NIG-2009;Clade II)__AIT17782__GPCmut5 (opt1)
aggagagucccgcagucggcguccagcggcucugcuuguucgugugugugucguugcaggccuuauucaagcuuaccaugggccagaucaucaccuucuuccaggaggugccccacgucaucgaggaggugaugaacaucgugcugaucgcccucagccugcuggccauccucaaggggaucuacaacgucgcgaccugcggccuguucgggcugguguccuuccuccugcugugcggccgcagcugcuccacgaccuacaaggggguguacgagcuccagacccuggagcuggacauggccagccucaacaugaccaugccgcuguccugcacgaagaacaacagccaccacuacaucauggucggcaacgagaccggccuggagcucacccugaccaacacguccaucaucaaccacaaguucugcaaccugagcgacgcccacaagaagaaccucuacgaccacgcccugauguccaucaucagcaccuuccaccuguccauccccaacuucaaccaguacgaggccaugagcugcgacuucaacgggggcaagaucuccgugcaguacaaccucagccacaccuacgcgguggacgccgccaaccacugcgggaccaucgccaacggcguccugcagacguucaugcggauggcguggggcggguccuacaucgcccuggacagcggcugcggguccugggacugcaucaugaccagcuaccaguaccucaucauccagaacaccaccugggaggaccacugccaguucucccgccccagccccaucggcuaccuggggcugcucagccagcggacgcgcgacaucuacaucucccggcgccugcugggcaccuucaccuggacccucagcgacuccgagggcaacgagacgcccgggggcuacugccugacccgguggaugcugaucgaggccgagcucaagugcuucgggaacaccgccguggccaagugcaacgagaagcacgacgaggaguucugcgacaugcugcgccuguucgacuucaacaagcaggcgaucaagcggcucaagacccccgcccagaugagcauccagcugaucaacaaggccgugaacgcccugaucaacgaccagcucaucaugaagaaccaccuccgcgacaucaugugcauccccuacugcaacuacuccaaguacugguaccugaaccacacggucaccgggaagaccagccugccccggugcuggcugguguccaacggcagcuaccugaacgagacccacuucuccgacgacaucgagcagcaggccgacaacaugaucacggagcuccugcagaaggaguacaucgaccgccagggcaagaccccgcuggggcucguggaccuguucgucuucagcaccuccuucuaccugaucagcaucuuccugcaccucgugaagaucccgacccaccggcacguggucggcaagcccugccccaagccccaccgccugaaccacauggggaucugcuccugcggccuguacaagcacccgggggugcccgugaaguggaagcggugaggacuagucccuguucccagagcccacuuuuuuuucuuuuuuugaaauaaaauagccugucuuucagaucucaaaggcucuuuucagagccaccaaaaaaaaaaaaaaaaaaaaaaaaaaaaaaaaaaaaaaaaaaaaaaaaaaaaaaaaaaaaaaaaagaauu

SEQ ID NO: 28214 - RNA, 1714 nt, Artificial Sequence
  mRNA product Design a-1 (hSL-A64-N5) comprising derived and/or modified sequence from LASV(LASV221-NIG-2010;Clade II)__AIT17624__GPCmut5 (opt1)
aggagagucccgcagucggcguccagcggcucugcuuguucgugugugugucguugcaggccuuauucaagcuuaccaugggccagaucaucaccuucuuccaggaggugccccacgucaucgaggaggugaugaacaucgugcugaucgcccucagccugcuggccauccucaaggggaucuacaacgucgcgaccugcggccuguucgggcugguguccuuccuccugcugugcggccgcagcugcuccacgaccuacaaggggguguacgagcuccagacccuggagcuggacauggccagccucaacaugaccaugccgcuguccugcacgaagaacaacagccaccacuacaucauggucggcaacgagaccggccuggagcucacccugaccaacacguccaucaucaaccacaaguucugcaaccugagcgacgcccacaagaagaaccucuacgaccacgcccugauguccaucaucagcaccuuccaccuguccauccccaacuucaaccaguacgaggccaugagcugcgacuucaacgggggcaagaucuccgugcaguacaaccucagccacaccuacgcgaucgacgccgccaaccacugcgggaccaucgccaacggcgugcugcagacguucaugcggauggcguggggcggguccuacaucgcccuggacagcggcugcggguccugggacugcaucaugaccagcuaccaguaccucaucauccagaacaccaccugggaggaccacugccaguucucccgccccagccccaucggcuaccuggggcugcucagccagcggacgcgcgacaucuacaucucccggcgccugcugggcaccuucaccuggacccucagcgacuccgagggcaacgagacgcccgggggcuacugccugacccgguggaugcugaucgaggccgagcucaagugcuucgggaacaccgccgucgccaagugcaacgagaagcacgacgaggaguucugcgacaugcugcgccuguucgacuucaacaagcaggcgauccggcgccucaagacccccgcccagaugagcauccagcugaucaacaaggccgugaacgcccugaucaacgaccagcucaucaugaagaaccaccuccgggacaucaugugcauccccuacugcaacuacuccaaguacugguaccugaaccacacggugaccgggaagaccagccugccccgcugcuggcuggucuccaacggcagcuaccugaacgagacccacuucuccgacgacaucgagcagcaggccgacaacaugaucacggagaugcuccagaaggaguacauggaccggcagggcaagaccccgcuggggcugguggaccucuucguguucagcaccuccuucuaccugaucagcaucuuccugcaccuggucaagaucccgacccaccgccacgugaucggcaagcccugccccaagccccaccggcucaaccacauggggaucugcuccugcggccuguacaagcacccgggggugcccgucaaguggaagcgcugaggacuagucccuguucccagagcccacuuuuuuuucuuuuuuugaaauaaaauagccugucuuucagaucucaaaggcucuuuucagagccaccaaaaaaaaaaaaaaaaaaaaaaaaaaaaaaaaaaaaaaaaaaaaaaaaaaaaaaaaaaaaaaaaagaauu

SEQ ID NO: 28215 - RNA, 1714 nt, Artificial Sequence
  mRNA product Design a-1 (hSL-A64-N5) comprising derived and/or modified sequence from LASV(LASV237-NIG-2010;Clade II)__AIT17638__GPCmut5 (opt1)
aggagagucccgcagucggcguccagcggcucugcuuguucgugugugugucguugcaggccuuauucaagcuuaccaugggccagaucaucaccuucuuccaggaggugccccacgucaucgaggaggugaugaacaucgugcugaucgcccucagccugcuggccauccucaaggggaucuacaacgucgcgaccugcggccuguucgggcugguguccuuccuccugcugugcggccgcagcugcuccacgaccuacaaggggguguacgagcuccagacccuggagcuggacauggccagccucaacaugaccaugccgcuguccugcacgaagaacaacagccaccacuacaucauggucggcaacgagaccggccuggagcucacccugaccaacacguccaucaucaaccacaaguucugcaaccugagcgacgcccacaagaaggaccucuacgaccacgcccugauguccaucaucagcaccuuccaccuguccauccccaacuucaaccaguacgaggccaugagcugcgacuucaacgggggcaagaucuccgugcaguacaaccucagccacaccuacgcgguggacgccgccaaccacugcgggaccaucgccaacggcguccugcagacguucaugcggauggcguggggcggguccuacaucgcccuggacagcggcugcggguccugggacugcaucaugaccagcuaccaguaccucaucauccagaacaccaccugggaggaccacugccaguucucccgccccagccccaucggcuaccuggggcugcucagccagcggacgcgcgacaucuacaucucccggcgccugcugggcaccuucaccuggacccucagcgacuccgagggcaacgagacgcccgggggcuacugccugacccgguggaugcugaucgaggccgagcucaagugcuucgggaacaccgccguggccaagugcaacgagaagcacgacgaggaguucugcgacaugcugcgccuguucgacuucaacaagcaggcgauccggcgccucaagacccccgcccagaugagcauccagcugaucaacaaggccgugaacgcccugaucaacgaccagcucaucaugaagaaccaccuccgggacaucaugugcauccccuacugcaacuacuccaaguacugguaccugaaccacacggucaccgggaagaccagccugccccgcugcuggcugguguccaacggcagcuaccugaacgagacccacuucuccgacgacaucgagcagcaggccgacaacaugaucacggagcuccugcagaaggaguacauggaccggcagggcaagaccccgcuggggcucguggaccuguucgucuucagcaccuccuucuaccugaucagcaucuuccugcaccucaucaagaucccgacccaccgccacaucacgggcaagcccugccccaagccccaccggcugaaccacauggggaucugcuccugcggccuguacaagcacccgggggugcccgugaaguggaagcgcugaggacuagucccuguucccagagcccacuuuuuuuucuuuuuuugaaauaaaauagccugucuuucagaucucaaaggcucuuuucagagccaccaaaaaaaaaaaaaaaaaaaaaaaaaaaaaaaaaaaaaaaaaaaaaaaaaaaaaaaaaaaaaaaaagaauu

SEQ ID NO: 28216 - RNA, 1714 nt, Artificial Sequence
  mRNA product Design a-1 (hSL-A64-N5) comprising derived and/or modified sequence from LASV(LASV253-NIG-2011;Clade II)__AIT17670__GPCmut5 (opt1)
aggagagucccgcagucggcguccagcggcucugcuuguucgugugugugucguugcaggccuuauucaagcuuaccaugggccagaucaucaccuucuuccaggaggugccccacgucaucgaggaggugaugaacaucgugcugaucgcccucagccugcuggccauccucaaggggaucuacaacgucgcgaccugcggccuguucgggcugguguccuuccuccugcugugcggccgcagcugcuccacgaccuacaaggggguguacgagcuccagacccuggagcuggacauggccagccucaacaugaccaugccgcuguccugcacgaagaacaacagccaccacuacaucauggucggcaacgagaccggccuggagcucacccugaccaacacguccaucaucaaccacaaguucugcaaccugagcgacgcccacaagaagaaccucuacgaccacgcccugauguccaucaucagcaccuuccaccuguccauccccaacuucaaccaguacgaggccaugagcugcgacuucaacgggggcaagaucuccgugcaguacaaccucagccacaccuacgcgguggacgccgccaaccacugcgggaccaucgccaacggcguccugcagacguucaugcggauggcguggggcggguccuacaucgcccuggacagcggcugcggguccugggacugcaucaugaccagcuaccaguaccucaucauccagaacaccaccugggaggaccacugccaguucucccgccccagccccaucggcuaccuggggcugcucagccagcggacgcgcgacaucuacaucucccggcgccugcugggcaccuucaccuggacccucagcgacuccgagggcaacgagacgcccgggggcuacugccugacccgguggaugcugaucgaggccgagcucaagugcuucgggaacaccgccguggccaagugcaacgagaagcacgacgaggaguucugcgacaugcugcgccuguucgacuucaacaagcaggcgauccggcgccucaaggcccccgcccagaugagcauccagcugaucaacaaggccgugaacgcccugaucaacgaccagcucaucaugaagaaccaccuccgggacaucaugugcaucccguacugcaacuacuccaaguacugguaccugaaccacaccgucacggggcgcaccagccugccccggugcuggcugguguccaacggcagcuaccugaacgagacccacuucuccgacgacaucgagcagcaggcggacaacaugaucaccgagcuccugcagaaggaguacaucgaccgccagggcaagacgccccuggggcucguggaccuguucgucuucagcaccuccuucuaccugaucagcaucuuccugcaccucgugaagaucccgacccaccggcacaucaucggcaagcccugccccaagccccaccgccugaaccacauggggaucugcuccugcggccuguacaagcacccgggggugcccgucaaguggaagcggugaggacuagucccuguucccagagcccacuuuuuuuucuuuuuuugaaauaaaauagccugucuuucagaucucaaaggcucuuuucagagccaccaaaaaaaaaaaaaaaaaaaaaaaaaaaaaaaaaaaaaaaaaaaaaaaaaaaaaaaaaaaaaaaaagaauu

SEQ ID NO: 28217 - RNA, 1714 nt, Artificial Sequence
  mRNA product Design a-1 (hSL-A64-N5) comprising derived and/or modified sequence from LASV(LASV254-NIG-2011;Clade II)__AIT17674__GPCmut5 (opt1)
aggagagucccgcagucggcguccagcggcucugcuuguucgugugugugucguugcaggccuuauucaagcuuaccaugggccagaucaucaccuucuuccaggaggugccccacgucaucgaggaggugaugaacaucgugcugaucgcccucagccugcuggccauccucaaggggaucuacaacgucgcgaccugcggccuguucgggcugguguccuuccuccugcugugcggccgcagcugcuccacgaccuacaaggggguguacgagcuccagacccuggagcuggacaugaccaaccucaacaugacgaugccgcugagcugcaccaagaacaacucccaccacuacaucauggucggcaacgagaccggccuggagcucacccugacgaacaccagcaucaucaaccacaaguucugcaaccuguccgacgcccacaagaagaaccucuacaaccacgcccugaugagcaucaucuccaccuuccaccugagcauccccaacuucaaccaguacgaggccauguccugcgacuucaacgggggcaagaucagcgugcaguacaaccucucccacagcuacgccguggacgcggccaaccacugcgggaccaucgccaacggcguccugcagacguucaugcggauggccuggggcggguccuacaucgcgcuggacagcggcugcgggaacugggacugcaucaugaccuccuaccaguaccucaucauccagaacaccaccugggaggaccacugccaguucagccgccccucccccaucggcuaccuggggcugcucagccagcggacgcgcgacaucuacaucagccggcgccugcugggcaccuucaccuggacccucuccgacagcgagggcaacgagacgcccgggggcuacugccugacccgguggaugcugaucgaggccgagcucaagugcuucgggaacaccgccguggccaagugcaacgagaagcacgacgaggaguucugcgacaugcugcgccuguucgacuucaacaagcaggccauccggcgccucaagacccccgcgcaggccaacauccagcugaucaacaaggccgugaacgcccugaucaacgaccagcucaucaugaagaaccaccuccgggacaucaugugcauccccuacugcaacuacuccaaguacugguaccugaaccacacggucaccgggaagaccagccugccccgcugcuggcugguguccaacggcagcuaccugaacgagacccacuucuccgacgacaucgagcagcaggccgacaacaugaucacggagcuccugcagaaggaguacauggaccggcagggcaagaccccgcuggggcucguggaccuguucgucuucagcaccuccuucuaccugaucagcaucuuccugcaccucgugaagaucccgacccaccgccacgugaucggcaagcccugccccaagccccaccggcugaaccacauggggaucugcuccugcggccuguacaagcacccggggguccccgugaaguggaagcgcugaggacuagucccuguucccagagcccacuuuuuuuucuuuuuuugaaauaaaauagccugucuuucagaucucaaaggcucuuuucagagccaccaaaaaaaaaaaaaaaaaaaaaaaaaaaaaaaaaaaaaaaaaaaaaaaaaaaaaaaaaaaaaaaaagaauu

SEQ ID NO: 28218 - RNA, 1714 nt, Artificial Sequence
  mRNA product Design a-1 (hSL-A64-N5) comprising derived and/or modified sequence from LASV(Nig08-A19;Clade III)__ADU56618__GPCmut5 (opt1)
aggagagucccgcagucggcguccagcggcucugcuuguucgugugugugucguugcaggccuuauucaagcuuaccaugggccagaucgugaccuucuuccaggaggucccccacgugaucgaggaggugaugaacaucguccugaucgcccucagcauccuggccauccugaaggggcucuacaacaucgcgaccugcggccugaucgggcuggugacguuccuccugcuguccggccgcagcugcuccaugaccuacaaggggguguacgagcuccagacccuggagcugaacaugaacacccucaacaugacgaugccgcugagcugcaccaagaacaacucccaccacuacaucauggucggcaacgagaccggccuggagcucacccugacgaacaccagccugcuccaccacaaguucugcaaccuguccgacgcccacaagaagaaccuguacgaccacacccucaugagcaucaucuccaccuuccaccugagcauccccaacuucaaccaguacgaggccauguccugcgacuucaacgggggcaagaucacggugcaguacaaccugagccacuccuacgccaucgacgccgcgaaccacugcgggaccguggccaacggcguccuccagaccuucaugcggauggccuggggcgggagcuacaucgcccuggacuccggcugcgggaagugggacugcaucaugaccagcuaccaguaccugaucauccagaacacgaccugggaggaccacugccaguucucccggcccagccccaucggcuaccucgggcugcugucccagcgcacccgggacaucuacaucagccgccggcuccugggcaccuucacguggacccugagcgacuccgagggcaacgagacccccgggggcuacugccucacccgcuggaugcugaucgaggcggagcugaagugcuucgggaacacggccguggccaagugcaacgagaagcacgacgaggaguucugcgacaugcuccggcuguucgacuucaacaagcaggccauccgccggcugaaggcccccgcgcagaugagcauccagcucaucaacaaggccgugaacgcccugaucaacgaccagcugaucaugaagaaccaccuccgcgacaucaugugcauccccuacugcaacuacuccaaguacugguaccugaaccacaccagcaccgggcggaccucccugccccgcugcuggcucgucagcaacggcuccuaccugaacgagacgcacuucagcgacgacaucgagcagcaggccgacaacaugaucaccgagaugcugcagaaggaguaccucgaccggcagggcaagaccccgcuggggcugguggaccuguucguguucuccaccagcuucuaccucaucuccaucuuccugcaccuggucaagaucccgacgcaccgccacaucgugggcaagcccugccccaagccccaccggcucaaccacauggggaucugcagcugcggccuguacaagcagccgggggugcccguccgcuggaagcggugaggacuagucccuguucccagagcccacuuuuuuuucuuuuuuugaaauaaaauagccugucuuucagaucucaaaggcucuuuucagagccaccaaaaaaaaaaaaaaaaaaaaaaaaaaaaaaaaaaaaaaaaaaaaaaaaaaaaaaaaaaaaaaaaagaauu

SEQ ID NO: 28219 - RNA, 1717 nt, Artificial Sequence
  mRNA product Design a-1 (hSL-A64-N5) comprising derived and/or modified sequence from LASV(G1180-SLE-2010;Clade IV)__AIT17168__GPCmut5 (opt1)
aggagagucccgcagucggcguccagcggcucugcuuguucgugugugugucguugcaggccuuauucaagcuuaccaugggccagaucgugaccuucuuccaggaggucccccacgugaucgaggaggugaugaacaucguccugaucgcccucagcauccuggccgugcugaaggggcucuacaacuucgcgaccugcggccugguggggcugcucaccuuccugcugcucugcggccgcuccugcaccgccagccgguacaagggggucuacgagcugcagacccuggagcucaacauggagacccugaacaugacgaugccgcuguccugcaccaagaacaacagccaccacuacaucauggugggcaacgagaccggccucgagcugacccugacgaacaccuccaucaucaaccacaaguucugcaaccucagcgacgcccacaagaagaaccuguacgaccacgcccugauguccaucaucagcaccuuccaccucuccauccccaacuucaaccaguacgaggccaugagcugcgacuucaacgggggcaagaucuccgugcaguacaaccugagccacuccuacgcgggggacgccgccaaccacugcggcaccgucgccaacggggugcugcagacguucaugcgcauggcguggggcggcagcuacaucgcccucgacuccgggugcggcagcugggacugcaucaugaccuccuaccaguaccugaucauccagaacaccaccugggaggaccacugccaguucagccggcccucccccaucggguaccugggccuccugagccagcgcacgcgggacaucuacaucagccgccggcugcucggcaccuucaccuggacccuguccgacagcgaggggaaggacacgccgggcggguacugccugacccgcuggaugcucaucgaggccgagcugaagugcuucggcaacaccgccguggccaagugcaacgagaagcacgacgaggaguucugcgacaugcugcggcuguucgacuucaacaagcaggcgauccagcgccugaaggcccccgcccagauguccauccagcugaucaacaaggccgucaacgcccucaucaacgaccagcugaucaugaagaaccaccuccgggacaucaugugcauccccuacugcaacuacagcaaguacugguaccucaaccacaccacgaccggcaagaccucccugcccaagugcuggcuggugagcaacggcuccuaccucaacgagacccacuucagcgacgacaucgagcagcaggcggacaacaugaucacggagaugcugcagaaggaguacauggagcgccaggggaagacgccccugggccucguggaccuguucgucuucuccaccagcuucuaccugaucuccaucuuccugcaccucgugaagaucccgacccaccggcacaucgugggcaagagcugccccaagccccaccgccugaaccacauggggaucugcuccugcgggcuguacaagcagcccggcgucccggugaaguggaagcggugaggacuagucccuguucccagagcccacuuuuuuuucuuuuuuugaaauaaaauagccugucuuucagaucucaaaggcucuuuucagagccaccaaaaaaaaaaaaaaaaaaaaaaaaaaaaaaaaaaaaaaaaaaaaaaaaaaaaaaaaaaaaaaaaagaauu

SEQ ID NO: 28220 - RNA, 1717 nt, Artificial Sequence
  mRNA product Design a-1 (hSL-A64-N5) comprising derived and/or modified sequence from LASV(G1442-SLE-2011;Clade IV)__AIT17180__GPCmut5 (opt1)
aggagagucccgcagucggcguccagcggcucugcuuguucgugugugugucguugcaggccuuauucaagcuuaccaugggccagaucgugaccuucuuccaggaggucccccacgugaucgaggaggugaugaacaucguccugaucgcccucagcauccuggccgugcugaaggggcucuacaacguggcgaccugcggccugaucgggcuggucacguuccuccugcugugcggccgcuccugcaccaccacccucuacaaggggguguacgagcugcagacgcuggagcucaacauggagacccugaacaugaccaugccgcugagcugcaccaagaacaacucccaccacuacauccgggugggcaacgagacgggccucgagcugacccugaccaacaccagcaucaucaaccacaaguucugcaaccucuccgacgcccacaagaagaaccuguacgaccacgcccugaugagcaucaucuccacguuccaccucagcauccccaacuucaaccaguacgaggccauguccugcgacuucaacgggggcaagaucagcguccaguacaaccugucccacagcuacgccggggacgcggccaaccacugcggcaccguggccaacggggugcugcagaccuucaugcgcauggccuggggcggcuccuacaucgcgcucgacagcgggugcggcaacugggacugcaucaugaccuccuaccaguaccugaucauccagaacacgaccugggacgaccacugccaguucagccgccccucccccaucggguaccugggccuccugagccagcggacccgcgacgucuacaucucccggcgccugcucggcaccuucacguggacccugagcgacagcgaggggaaggacaccccgggcggguacugccugacccgguggaugcucaucgaggccgagcugaagugcuucggcaacacggccguggccaagugcaacgagaagcacgacgaggaguucugcgacaugcugcgccucuucgacuucaacaagcaggccauccagcggcugaaggcgcccgcccagauguccauccagcugaucaacaaggccgugaacgcccucaucaacgaccagcugaucaugaagaaccaccuccgcgacaucaugugcauccccuacugcaacuacagcaaguacugguaccugaacaacaccgccaccggcaagaccucccugcccaagugcuggcugaucagcaacggcuccuaccucaacgagacgcacuucagcgacgacaucgagcaggaggcggacaacaugaucaccgagaugcugcagaaggaguacauggagcggcaggggaagacgccccugggccucgucgaccuguucguguucuccaccagcuucuaccugaucuccaucuuccugcaccucgugaagaucccgacccaccgccacaucgucggcaagagcugccccaagccccaccggcugaaccacauggggaucugcuccugcgggcuguacaagcagcccggcgugccggugcgcuggaagcggugaggacuagucccuguucccagagcccacuuuuuuuucuuuuuuugaaauaaaauagccugucuuucagaucucaaaggcucuuuucagagccaccaaaaaaaaaaaaaaaaaaaaaaaaaaaaaaaaaaaaaaaaaaaaaaaaaaaaaaaaaaaaaaaaagaauu

SEQ ID NO: 28221 - RNA, 1717 nt, Artificial Sequence
  mRNA product Design a-1 (hSL-A64-N5) comprising derived and/or modified sequence from LASV(G3010-SLE-2013;Clade IV)__AIT17344__GPCmut5 (opt1)
aggagagucccgcagucggcguccagcggcucugcuuguucgugugugugucguugcaggccuuauucaagcuuaccaugggccagaucgugaccuucuuccaggaggucccccacgugaucgaggaggugaugaacaucguccugaucgcccucagcauccuggccgugcugaaggggcucuacaacuucgcgaccugcggccugguggggcuggucacguuccuccugcugugcggccgcuccugcaccaccagccucuacaaggggguguacgagcugcagacccuggagcucaacauggagacgcugaacaugaccaugccgcuguccugcaccaagaacaacagccaccacuacaucauggugggcaacgagaccggccucgagcugacgcugaccaacaccuccaucaucaaccacaaguucugcaaccucagcgacgcccacaagaagaaccuguacaaccacgcccugauguccaucaucagcaccuuccaccucuccauccccaacuucaaccaguacgaggccaugagcugcgacuucaacgggggcaagaucuccguccaguacaaccugagccacuccuacgccggggacgcggccagccacugcggcacgguggccaacggggugcugcagaccuucaugcggauggccuggggcggcuccuacaucgcgcucgacagcgggugcggcaagugggacugcaucaugaccuccuaccaguaccugaucauccagaacaccacgugggaggaccacugccaguucagccgccccucccccaucggguaccugggccuccugagccagcggacccgcgacaucuacaucagccggcgccugcucggcaccuucaccuggacgcuguccgacagcgaggggaaggacaccccgggcggguacugccugacccgguggaugcucaucgaggccgagcugaagugcuucggcaacaccgccgucgccaagugcaacgagaagcacgacgaggaguucugcgacaugcugcgccucuucgacuucaacaagcaggccauccagcggcugaagacgcccgcgcagauguccauccagcugaucaacaaggccgugaacgcccucaucaacgaccagcugaucaugaagaaccaccuccgcgacaucaugugcauccccuacugcaacuacagcaaguacugguaccugaaccacaccaccaccggcaagacgucccugcccaagugcuggcuggugagcaacggcuccuaccucaacgagacccacuucagcgacgacaucgagcagcaggccgacaacaugaucaccgagaugcugcagaaggaguacauggagcggcaggggaagacgccccugggccucgucgaccuguucguguucuccaccagcuucuaccugaucuccaucuuccugcaccucgugaagaucccgacccaccgccacaucgucggcaagagcugccccaagccccaccggcugaaccacauggggaucugcuccugcgggcuguacaagcagcccggcgugccggugcgcuggaagcggugaggacuagucccuguucccagagcccacuuuuuuuucuuuuuuugaaauaaaauagccugucuuucagaucucaaaggcucuuuucagagccaccaaaaaaaaaaaaaaaaaaaaaaaaaaaaaaaaaaaaaaaaaaaaaaaaaaaaaaaaaaaaaaaaagaauu

SEQ ID NO: 28222 - RNA, 1717 nt, Artificial Sequence
  mRNA product Design a-1 (hSL-A64-N5) comprising derived and/or modified sequence from LASV(G502-SLE-2009;Clade IV)__AIT17126__GPCmut5 (opt1)
aggagagucccgcagucggcguccagcggcucugcuuguucgugugugugucguugcaggccuuauucaagcuuaccaugggccagaucgugaccuucuuccaggaggucccccacgugaucgaggaggugaugaacaucguccugaucgcccucagcauccuggccgugcugaaggggcucuacaacuucgcgaccugcggccugguggggcugcucacguuccugcugcucugcggccgcuccugcaccaccgggcuguacaagggcgucuacgagcugcagacccucgagcugaacauggagacgcugaacaugaccaugccgcucagcugcaccaagaacaacucccaccacuacaucauggugggcaacgagaccgggcuggagcugacgcucaccaacaccagcaucaucaaccacaaguucugcaaccuguccgacgcccacaagaagaaccuguacgaccacgcccucaugagcaucaucuccaccuuccaccugagcauccccaacuucaaccaguacgaggccauguccugcgacuucaacggcgggaagaucagcgugcaguacaaccugucccacagcuacgccggcgacgcggccgaccacugcgggacggucgccaacggcgugcuccagaccuucaugcggauggccuggggcggguccuacaucgcgcuggacagcggcugcgggcggugggacugcaucaugaccuccuaccaguaccugaucauccagaacaccacgugggaggaccacugccaguucagccgccccucccccaucggcuaccucggccugcugagccagcggacccgcgacaucuacaucucccggcgccuccuggggaccuucaccuggacgcugagcgacagcgagggcaaggacacccccgggggcuacugccucacccgguggaugcugaucgaggccgagcugaagugcuucgggaacaccgccguggccaagugcaacgagaagcacgacgaggaguucugcgacaugcuccgccuguucgacuucaacaagcaggccauccagcggcugaaggcgcccgcccagauguccauccagcucaucaacaaggccgucaacgcccugaucaacgaccagcuggugaugaagaaccaccuccgcgacaucaugugcauccccuacugcaacuacagccgguacugguaccugaaccacacgaccaccggccgcaccucccugcccaagugcuggcucgugagcaacggguccuaccugaacgagacgcacuucagcgacgacaucgagcagcaggccgacaacaugaucaccgagaugcugcagaaggaguacauggagcggcagggcaagaccccgcucgggcuggucgaccuguucguguucuccaccagcuucuaccugaucuccaucuuccuccaccuggugaagaucccgacgcaccgccacaucgucggcaagagcugccccaagccccaccggcugaaccacauggggaucugcuccugcggccucuacaagcagcccggcgugccggugaaguggaagcgcugaggacuagucccuguucccagagcccacuuuuuuuucuuuuuuugaaauaaaauagccugucuuucagaucucaaaggcucuuuucagagccaccaaaaaaaaaaaaaaaaaaaaaaaaaaaaaaaaaaaaaaaaaaaaaaaaaaaaaaaaaaaaaaaaagaauu

SEQ ID NO: 28223 - RNA, 1717 nt, Artificial Sequence
  mRNA product Design a-1 (hSL-A64-N5) comprising derived and/or modified sequence from LASV(G733-SLE-2010;Clade IV)__AIT17154__GPCmut5 (opt1)
aggagagucccgcagucggcguccagcggcucugcuuguucgugugugugucguugcaggccuuauucaagcuuaccaugggccagaucgugaccuucuuccaggaggucccccacgugaucgaggaggugaugaacaucguccugaucgcccucagcauccuggccgugcugaaggggcucuacaacuucgcgaccugcggcaucguggggcuggucuccuuccugcuccugugcggccgcagcugcacgaccucccuguacaaggggguguacgagcuccagacccuggagcugaacauggagacccucaacaugacgaugccgcugagcugcaccaagaacaacucccaccacuacaucauggugggcaacgagaccggccuggagcucacccugacgaacaccagcaucaucaaccacaaguucugcaaccuguccgacgcccacaagaagaaccucuacgaccacgcccugaugagcaucaucuccaccuuccaccugagcauccccaacuucaaccaguacgaggccauguccugcgacuucaacgggggcaagaucagcguccaguacaaccucucccacagcuacgccggggacgcggccaaccacugcggcaccaucgccaacggggugcugcagacguucaugcggauggccuggggcggcuccuacaucgcgcuggacagcgggugcgaccggugggacugcaucaugaccuccuaccaguaccucaucauccagaacaccaccugggaggaccacugccaguucagccgccccucccccaucggcuaccuggggcugcucagccagcggacgcgcgacaucuacaucagccggcgccugcugggcaccuucaccuggacccucuccgacagcgagggcaaggacacgcccgggggcuacugccugacccgguggaugcugaucgaggccgagcucaagugcuucgggaacaccgccguggccaagugcaacgagaagcacgacgaggaguucugcgacaugcugcgccuguucgacuucaacaagcaggccauccagcggcucaaggcgcccgcccagauguccauccagcugaucaacaaggccgucaacgcccugaucaacgaccagcucaucaugaagaaccaccuccgcgacaucaugugcauccccuacugcaacuacagcaaguacugguaccugaaccacaccacgaccgggaagaccucccugcccaagugcuggcuggugagcaacggcuccuaccugaacgagacccacuucagcgacgacaucgagcagcaggccgacaacaugaucacggagaugcuccagaaggaguacauggagcggcagggcaagaccccgcuggggcugguggaccucuucgucuucuccaccagcuucuaccugaucuccaucuuccugcaccuggugaagaucccgacccaccgccacguggucggcaagagcugccccaagccccaccggcucaaccacauggggaucugcuccugcggccuguacgggcagcccggcgugccggugaaguggaagcgcugaggacuagucccuguucccagagcccacuuuuuuuucuuuuuuugaaauaaaauagccugucuuucagaucucaaaggcucuuuucagagccaccaaaaaaaaaaaaaaaaaaaaaaaaaaaaaaaaaaaaaaaaaaaaaaaaaaaaaaaaaaaaaaaaagaauu

SEQ ID NO: 28224 - RNA, 1717 nt, Artificial Sequence
  mRNA product Design a-1 (hSL-A64-N5) comprising derived and/or modified sequence from MOPV/LASV reassortant(IGS-1;Clade IV)__AFY05576__GPCmut5 (opt1)
aggagagucccgcagucggcguccagcggcucugcuuguucgugugugugucguugcaggccuuauucaagcuuaccaugggccagaucgugaccuucuuccaggaggucccccacgugaucgaggaggugaugaacaucguccugaucgcccucagcgugcuggccgugcugaaggggcucuacaacuucgcgaccugcggccuggucgggcuggugacguuccuccugcugugcggccgcuccugcaccaccagccucuacaaggggguguacgagcugcagacccuggagcucaacauggagacgcugaacaugaccaugccgcuguccugcaccaagaacaacagccaccacuacaucauggucggcaacgagaccggccucgagcugacgcugaccaacaccuccaucaucaaccacaaguucugcaaccucagcgacgcccacaagaagaaccuguacgaccacgcccugauguccaucaucagcaccuuccaccucuccauccccaacuucaaccaguacgaggccaugagcugcgacuucaacgggggcaagaucuccgugcaguacaaccugagccacuccuacgccggggacgcggccaaccacugcggcacgguggccaacgggguccugcagaccuucaugcggauggccuggggcggcagcuacaucgcgcucgacuccgggugcggcaacugggacugcaucaugaccagcuaccaguaccugaucauccagaacaccacgugggaggaccacugccaguucucccggcccagccccaucggguaccugggccuccugucccagcgcacccgggacaucuacaucagccgccggcugcucggcaccuucaccuggacgcugagcgacuccgagggggaggacaccccgggcggguacugccugacccgcuggaugcucaucgaggccgagcugaagugcuucggcaacaccgccguggccaagugcaacgagaagcacgacgaggaguucugcgacaugcugcggcuguucgacuucaacaagcaggccauccagcgccugaaggcgcccgcccagaugagcauccagcugaucaacaaggccgugaacgcccucaucaacgaccagcugaucaugaagaaccaccuccgggacaucaugugcauccccuacugcaacuacuccaaguacugguaccucaaccacacgaccaccggccgcaccagccugcccaagugcuggcuggucuccaacggcagcuaccucaacgagacgcacuucuccgacgacaucgagcagcaggccgacaacaugaucaccgagaugcugcagaaggaguacauggagcggcaggggaagacgccccugggccucguggaccuguucguguucagcaccuccuucuaccugaucagcaucuuccugcaccucgucaagaucccgacccaccgccacaucguggggaaguccugccccaagccccaccggcugaaccacaugggcaucugcagcugcgggcuguacaagcagcccggcgugccggucaaguggaagcgcugaggacuagucccuguucccagagcccacuuuuuuuucuuuuuuugaaauaaaauagccugucuuucagaucucaaaggcucuuuucagagccaccaaaaaaaaaaaaaaaaaaaaaaaaaaaaaaaaaaaaaaaaaaaaaaaaaaaaaaaaaaaaaaaaagaauu

SEQ ID NO: 28225 - RNA, 1717 nt, Artificial Sequence
  mRNA product Design a-1 (hSL-A64-N5) comprising derived and/or modified sequence from LASV(LM765-SLE-2012;Clade IV)__AIT17814__GPCmut5 (opt1)
aggagagucccgcagucggcguccagcggcucugcuuguucgugugugugucguugcaggccuuauucaagcuuaccaugggccagaucgugaccuucuuccaggaggucccccacgugaucgaggaggugaugaacaucguccugaucgcccucagcauccuggccgugcugaaggggcucuacaacuucgcgaccugcggccugguggggcuggucacguuccuccugcugugcggccgcuccugcaccaccagccucuacaaggggguguacgagcugcagacccuggagcucaacauggagacgcugaacaugaccaugccgcuguccugcaccaagaacaacagccaccacuacaucauggugggcaacgagaccggccucgagcugacgcugaccaacaccuccaucaucgaccacaaguucugcaaccucagcgacgcccaccggaagaaccuguacgaccacgcccugauguccaucaucagcaccuuccaccucuccauccccaacuucaaccaguacgaggccaugagcugcgacuucaacgggggcaagaucuccguccaguacaaccugagccacuccuacgccaaggacgcggccgaccacugcgggacgguggccaacggcgugcugcagaccuucaugcgcauggccuggggcgggagcuacaucgcgcucgacuccggcugcgggcgcugggacugcaucaugaccagcuaccaguaccugaucauccagaacaccacgugggaggaccacugccaguucucccggcccagccccaucggcuaccuggggcuccugucccagcgcacccgggacaucuacaucagccgccggcugcucggcaccuucaccuggacgcugagcgacuccgagggcaaggacacccccgggggcuacugccugacccgcuggaugcucaucgaggccgagcugaagugcuucgggaacaccgccgucgccaagugcaacgagaagcacgacgaggaguucugcgacaugcugcggcuguucgacuucaacaagcaggccauccagcgccugaaggcgcccgcccagaugagcauccagcugaucaacaaggccgugaacgcccucaucaacgaccagcugaucaugaagaaccaccuccgggacaucaugugcauccccuacugcaacuacuccaaguacugguaccucaaccacacgaccaccgggaagaccagccugcccaagugcuggcugguguccaacggcagcuaccucaacgagacgcacuucuccgacgacaucgagcagcaggccgacaacaugaucaccgagaugcugcagaaggaguacauggagcgccagggcaagaccccgcuggggcucgucgaccuguucguguucagcaccuccuucuaccugaucagcaucuuccugcaccucgugaagaucccgacgcaccggcacaucgucggcaagcccugccccaagccccaccgccugaaccacauggggaucugcuccugcggccuguacaagcagccgggggugcccgugaaguggaagcggugaggacuagucccuguucccagagcccacuuuuuuuucuuuuuuugaaauaaaauagccugucuuucagaucucaaaggcucuuuucagagccaccaaaaaaaaaaaaaaaaaaaaaaaaaaaaaaaaaaaaaaaaaaaaaaaaaaaaaaaaaaaaaaaaagaauu

SEQ ID NO: 28226 - RNA, 1717 nt, Artificial Sequence
  mRNA product Design a-1 (hSL-A64-N5) comprising derived and/or modified sequence from LASV(LM776-SLE-2012;Clade IV)__AIT17824__GPCmut5 (opt1)
aggagagucccgcagucggcguccagcggcucugcuuguucgugugugugucguugcaggccuuauucaagcuuaccaugggccagaucgugaccuucuuccaggaggucccccacgugaucgaggaggugaugaacaucguccugaucgcccucagcauccuggccgugcugaaggggcucuacaacuucgcgaccugcggccugguggggcuggucacguuccuccugcugugcggccgcuccugcaccaccagcguguacaaggggguguacgagcuccagacccuggagcugaacauggagacgcucaacaugaccaugccgcuguccugcaccaagaacaacagccaccacuacaucauggucggcaacgagaccggccuggagcucacgcugaccaacaccuccaucaucaaccacaaguucugcaaccugagcgacgcccacaagaagaaccucuacgaccacgcccugauguccaucaucagcaccuuccaccuguccauccccaacuucaaccaguacgaggccaugagcugcgacuucaacgggggcaagaucuccgugcaguacaaccucagccacuccuacgccggggacgcggccaaccacugcggcacgguggccaacgggguccugcagaccuucaugcggauggccuggggcggcagcuacaucgcgcuggacuccgggugcggcaagugggacugcaucaugaccagcuaccaguaccucaucauccagaacaccacgugggaggaccacugccaguucucccgccccagccccaucggguaccugggccugcucucccagcggacccgcgacaucuacaucagccggcgccugcugggcaccuucaccuggacgcucagcgacuccgaggggaaggacaccccgggcggguacugccugacccgguggaugcugaucgaggccgagcucaagugcuucggcaacaccgccguggccaagugcaacgagaagcacgacgaggaguucugcgacaugcugcgccuguucgacuucaacaagcaggccauccagcggcucaaggcgcccgcccagaugagcauccagcugaucaacaaggccgugaacgcccugaucaacgaccagcucaucaugaagaaccaccuccgcgacaucaugugcauccccuacugcaacuacuccaaguacugguaccugaaccacacgaccaccggcaagaccagccugcccaagugcuggcuggucuccaacggcagcuaccugaacgagacgcacuucuccgacgacaucgagcagcaggccgacaacaugaucaccgagaugcuccagaaggaguacauggagcggcaggggaagacgccccugggccugguggaccucuucguguucagcaccuccuucuaccugaucagcaucuuccugcaccuggucaagaucccgacccaccgccacaucguggggaaguccugccccaagccccaccggcucaaccacaugggcaucugcagcugcgggcuguacaagcagcccggcgugccgguccgcuggaagcggugaggacuagucccuguucccagagcccacuuuuuuuucuuuuuuugaaauaaaauagccugucuuucagaucucaaaggcucuuuucagagccaccaaaaaaaaaaaaaaaaaaaaaaaaaaaaaaaaaaaaaaaaaaaaaaaaaaaaaaaaaaaaaaaaagaauu

SEQ ID NO: 28227 - RNA, 1717 nt, Artificial Sequence
  mRNA product Design a-1 (hSL-A64-N5) comprising derived and/or modified sequence from LASV(Mad39;Clade IV)__ANH09722__GPCmut5 (opt1)
aggagagucccgcagucggcguccagcggcucugcuuguucgugugugugucguugcaggccuuauucaagcuuaccaugggccagaucgugaccuucuuccaggaggucccccacgugaucgaggaggugaugaacaucguccugaucgcccucagcauccuggccgugcugaaggggcucuacaacguggcgaccugcggccugaucgggcuggucacguuccuccugcugugcggccgcuccugcaccaccacccucuacaaggggguguacgagcugcaggcccuggagcucaacauggagacgcugaacaugaccaugccgcugagcugcaccaagaacaacucccaccacuacauccgggugggcaacgagaccggccucgagcugacgcugaccaacaccagccucaucaaccacaaguucugcaaccuguccgacgcccacaagaagaaccuguacgaccacgcccucaugagcaucaucuccaccuuccaccugagcauccccaacuucaaccaguacgaggccauguccugcgacuucaacgacgggaagaucagcguccaguacaaccugucccacacguacgcgggcgacaccgccaaccacugcgggaccguggccaacggcgugcuccagaccuucaugcgcauggccuggggcgggagcuacaucgcgcuggacuccggcugcgggggcugggacugcaucaugacgagcuaccaguaccugaucauccagaacaccaccugggaggaccacugccaguucucccggcccagccccaucggguaccucggccugcugucccagcggacccgcgacaucuacaucagccggcgccuccugggcacguucaccuggacccuguccgacagcgaggggaaggacaccccgggcggguacugccucacgcgguggaugcugaucgaggccgagcugaagugcuucggcaacaccgccgucgccaagugcaacgagaagcacgacgaggaguucugcgacaugcuccgccuguucgacuucaacaagcaggccauccagcggcugaaggcgcccgcccagaugagcauccagcucaucaacaaggccgugaacgcccugaucaacgaccagcugaucaugaagaaccaccuccgcgacaucaugugcauccccuacugcaacuacuccaaguacugguaccugaaccacaccgugaccggcaagacgagccugcccaagugcuggcucgucuccaacggcagcuaccugaacgagacccacuucuccgacgacaucgagcagcaggccgacaacaugaucaccgagaugcugcagaaggaguacauggagcggcaggggaagacgccccucggccugguggaccuguucguguucagcaccuccuucuaccugaucagcaucuuccuccaccuggucaagaucccgacccaccgccacgugguggggaagcccugccccaagccccaccggcugaaccacaugggcaucugcuccugcggguucuacaagcagccgggcguccccgugcgcuggaagcggugaggacuagucccuguucccagagcccacuuuuuuuucuuuuuuugaaauaaaauagccugucuuucagaucucaaaggcucuuuucagagccaccaaaaaaaaaaaaaaaaaaaaaaaaaaaaaaaaaaaaaaaaaaaaaaaaaaaaaaaaaaaaaaaaagaauu

SEQ ID NO: 28228 - RNA, 1717 nt, Artificial Sequence
  mRNA product Design a-1 (hSL-A64-N5) comprising derived and/or modified sequence from LASV(Z0947-SLE-2011;Clade IV)__AIT17840__GPCmut5 (opt1)
aggagagucccgcagucggcguccagcggcucugcuuguucgugugugugucguugcaggccuuauucaagcuuaccaugggccagaucgugaccuucuuccaggaggucccccacgugaucgaggaggugaugaacaucguccugaucgcccucagcauccuggccgugcugaaggggcucuacaacuucgcgaccugcggccugguggggcuggucacguuccuccugcugugcggccgcuccugcaccaucagccucuacaaggggguguacgagcugcagacccuggagcucaacauggagacccugaacaugacgaugccgcuguccugcaccaagaacaacagccaccacuacaucauggugggcaacgagaccggccucgagcugacccugacgaacaccuccaucaucaaccacaaguucugcaaccucagcgacgcccacaagaagaaccuguacgaccacgcccugauguccaucaucagcaccuuccaccucuccauccccaacuucaaccaguacgaggccaugagcugcgacuucaacgggggcaagaucuccguccaguacaaccugagccacuccuacgccggggacgcggccaaccacugcggcaccguggccaacggggugcugcagacguucaugcggauggccuggggcggcagcuacaucgcgcucgacuccgggugcgaccggugggacugcaucaugaccagcuaccaguaccugaucauccagaacaccaccugggaggaccacugccaguucucccgccccagccccaucggcuaccuggggcuccugucccagcggacgcgcgacaucuacaucagccggcgccugcucggcaccuucaccuggacccugagcgacuccgagggcaaggacacgcccgggggcuacugccugacccgguggaugcucaucgaggccgagcugaagugcuucgggaacaccgccgucgccaagugcaacgagaagcacgacgaggaguucugcgacaugcugcgccucuucgacuucaacaagcaggccauccagcggcugaaggcgcccgcccagaugagcauccagcugaucaacaaggccgugaacgcccucaucaacgaccagcugaucaugaagaaccaccuccgcgacaucaugugcauccccuacugcaacuacuccaaguacugguaccugaaccacaccacgaccgggaagaccagccugcccaagugcuggcugguguccaacggcagcuaccucaacgagacccacuucuccgacgacaucgagcagcaggccgacaacaugaucacggagaugcugcagaaggaguacauggagcggcagggcaagaccccgcuggggcucgucgaccuguucguguucagcaccuccuucuaccugaucagcaucuuccugcaccucgugaagaucccgacccaccgccacaucgucggcaagcccugccccaagccccaccggcugaaccacauggggaucugcuccugcggccuguacaagcagccgggggugcccgugaaguggaagcgcugaggacuagucccuguucccagagcccacuuuuuuuucuuuuuuugaaauaaaauagccugucuuucagaucucaaaggcucuuuucagagccaccaaaaaaaaaaaaaaaaaaaaaaaaaaaaaaaaaaaaaaaaaaaaaaaaaaaaaaaaaaaaaaaaagaauu

SEQ ID NO: 28229 - RNA, 1717 nt, Artificial Sequence
  mRNA product Design a-1 (hSL-A64-N5) comprising derived and/or modified sequence from LASV(Josiah;Clade IV)__NP_694870__GPCmut5 (opt1)
aggagagucccgcagucggcguccagcggcucugcuuguucgugugugugucguugcaggccuuauucaagcuuaccaugggccagaucgugaccuucuuccaggaggucccccacgugaucgaggaggugaugaacaucguccugaucgcccucagcgugcuggccgugcugaaggggcucuacaacuucgcgaccugcggccuggucgggcuggugacguuccuccugcugugcggccgcuccugcaccaccagccucuacaaggggguguacgagcugcagacccuggagcucaacauggagacgcugaacaugaccaugccgcuguccugcaccaagaacaacagccaccacuacaucauggucggcaacgagaccggccucgagcugacgcugaccaacaccuccaucaucaaccacaaguucugcaaccucagcgacgcccacaagaagaaccuguacgaccacgcccugauguccaucaucagcaccuuccaccucuccauccccaacuucaaccaguacgaggccaugagcugcgacuucaacgggggcaagaucuccgugcaguacaaccugagccacuccuacgccggggacgcggccaaccacugcggcacgguggccaacgggguccugcagaccuucaugcggauggccuggggcggcagcuacaucgcgcucgacuccgggugcggcaacugggacugcaucaugaccagcuaccaguaccugaucauccagaacaccacgugggaggaccacugccaguucucccgccccagccccaucggguaccugggccuccugucccagcggacccgcgacaucuacaucagccggcgccugcucggcaccuucaccuggacgcugagcgacuccgaggggaaggacaccccgggcggguacugccugacccgguggaugcucaucgaggccgagcugaagugcuucggcaacaccgccguggccaagugcaacgagaagcacgacgaggaguucugcgacaugcugcgccucuucgacuucaacaagcaggccauccagcggcugaaggcgcccgcccagaugagcauccagcugaucaacaaggccgugaacgcccucaucaacgaccagcugaucaugaagaaccaccuccgcgacaucaugugcauccccuacugcaacuacuccaaguacugguaccugaaccacacgaccaccgggcggaccagccugcccaagugcuggcuggucuccaacggcagcuaccucaacgagacgcacuucuccgacgacaucgagcagcaggccgacaacaugaucaccgagaugcugcagaaggaguacauggagcgccagggcaagaccccgcuggggcugguggaccucuucguguucagcaccuccuucuaccugaucagcaucuuccugcaccucgucaagauccccacgcaccggcacaucgugggcaaguccugccccaagccccaccgccugaaccacauggggaucugcagcugcggccuguacaagcagccgggggugcccgucaaguggaagcggugaggacuagucccuguucccagagcccacuuuuuuuucuuuuuuugaaauaaaauagccugucuuucagaucucaaaggcucuuuucagagccaccaaaaaaaaaaaaaaaaaaaaaaaaaaaaaaaaaaaaaaaaaaaaaaaaaaaaaaaaaaaaaaaaagaauu

SEQ ID NO: 28230 - RNA, 1714 nt, Artificial Sequence
  mRNA product Design a-1 (hSL-A64-N5) comprising derived and/or modified sequence from LASV(LP;Clade I)__AAF86701__GPCmut5 (opt1)
aggagagucccgcagucggcguccagcggcucugcuuguucgugugugugucguugcaggccuuauucaagcuuaccaugggccagaucaucaccuucuuccaggaggugccccacgucaucgaggaggugaugaacaucgugcugaucgcccucagccugcuggccauccucaaggggcuguacaacaucgcgaccugcggcaucaucgggcuggucgccuuccucuuccugugcggcaaguccugcagccugacgcucaagggcggguacgagcugcagacccuggagcucaacauggagacccugaacaugaccaugccgcuguccugcacgaagaacagcucccaccacuacauccgcgugggcaacgagaccgggcucgagcugacccugaccaacacgagcaucaucaaccacaaguucugcaaccucuccgacgcccacaagaagaaccuguacgaccacgcccugaugagcaucaucuccaccuuccaccucagcauccccaacuucaaccaguacgaggccauguccugcgacuucaacggcgggaagaucagcgugcaguacaaccugucccacagcuacgcgggcgacgccgccgagcacugcgggaccgucgccaacggcgugcugcagaccuucaugcggauggcguggggcgggcgcuacaucgcccucgacuccggcugcgggaacugggacugcaucaugacgagcuaccaguaccugaucauccagaacaccaccugggaggaccacugccaguucucccggcccagccccaucggcuaccugggccuccugucccagcgcacccgggacaucuacaucagccgccggcugcucgggacguucaccuggacccugagcgacuccgagggcaacgagacccccgggggcuacugccugacgcgcuggaugcucaucgaggccgagcugaagugcuucgggaacaccgccguggccaagugcaacgagaagcacgacgaggaguucugcgacaugcugcggcuguucgacuucaacaagcaggcgauccgccggcugaaggccccggcccagaugagcauccagcugaucaacaaggccgucaacgcccucaucaacgaccagcugaucaugaagaaccaccuccgcgacaucaugugcauccccuacugcaacuacuccaaguacugguaccucaaccacaccagcuccggccggaccagccugcccaagugcuggcugaucuccaacggcagcuaccucaacgagacgcaguucuccgacgacaucgagcagcaggcggacaacaugaucaccgagaugcugcagaaggaguacaucgagcgccaggggaagaccccgcugggccugguggacaucuucaucuucagcaccuccuucuaccucaucagcaucuuccugcaccugaucaagauccccacgcaccggcacaucguggggaagcccugccccaagccgcaccgccucaaccacaugggcgucugcuccugcgggcuguacaagcaccccggcgugcccaccaaguggaagcggugaggacuagucccuguucccagagcccacuuuuuuuucuuuuuuugaaauaaaauagccugucuuucagaucucaaaggcucuuuucagagccaccaaaaaaaaaaaaaaaaaaaaaaaaaaaaaaaaaaaaaaaaaaaaaaaaaaaaaaaaaaaaaaaaagaauu

SEQ ID NO: 28231 - RNA, 1714 nt, Artificial Sequence
  mRNA product Design a-1 (hSL-A64-N5) comprising derived and/or modified sequence from LASV(803213;Clade II)__AAF86703__GPCmut5 (opt1)
aggagagucccgcagucggcguccagcggcucugcuuguucgugugugugucguugcaggccuuauucaagcuuaccaugggccagaucaucaccuucuuccaggaggugccccacgucaucgaggaggugaugaacaucgugcugaucgcccucagccugcuggccauccucaaggggaucuacaacgucgcgaccugcggccuguucgggcugaucuccuuccuccugcugugcggccgcagcugcuccgugacguacaaggggguguacgagcuccagacccuggagcugaacauggccaaccucaacaugaccaugccgcugagcugcaccaagaacaacucccaccacuacaucauggucggcaacgagacgggccuggagcucacccugaccaacaccagcaucaucaaccacaaguucugcaaccuguccgacgcccacaagaagaaccucuacgaccacgcccugaugagcaucaucuccacguuccaccugagcauccccaacuucaaccaguacgaggccauguccugcgacuucaacgggggcaagaucagcgugcaguacaaccucucccacagcuucgcgguggacgccgccaaccacugcgggaccaucgccaacggcguccugcagaccuucaugcggauggcguggggcggguccuacaucgcccuggacagcggcugcgggaacugggacugcaucaugaccuccuaccaguaccucaucauccagaacacgaccugggaggaccacugccaguucagccgccccucccccaucggcuaccuggggcugcucagccagcggacccgcgacaucuacaucagccggcgccugcugggcaccuucacguggacccucuccgacagcgagggcaacgaggcccccgggggcuacugccugacccgguggaugcugaucgaggccgagcucaagugcuucgggaacaccgccguggcgaagugcaacgagaagcacgacgaggaguucugcgacaugcugcgccuguucgacuucaacaagcaggccaucaagcggcucaagacgccggcccagauguccauccagcugaucaacaaggccgugaacgcccugaucaacgaccagcucaucaugaagaaccaccuccgcgacaucaugugcauccccuacugcaacuacagccgguacugguaccugaaccacaccgucaccggcaagaccucccugccccgcugcuggcuggugagcaacggguccuaccugaacgagacgcacuucagcgacgacaucgagcagcaggcggacaacaugaucaccgagaugcuccagaaggaguacauggaccggcagggcaagaccccgcugggccugguggaccuguucgucuucuccaccagcuucuaccucaucuccaucuuccugcaccuggugaagauccccacgcaccgccacaucguggggaagcccugccccaagccgcaccggcucaaccacaugggcaucugcagcugcgggcuguacaagcaccccggcguccccgugaaguggaagcgcugaggacuagucccuguucccagagcccacuuuuuuuucuuuuuuugaaauaaaauagccugucuuucagaucucaaaggcucuuuucagagccaccaaaaaaaaaaaaaaaaaaaaaaaaaaaaaaaaaaaaaaaaaaaaaaaaaaaaaaaaaaaaaaaaagaauu

SEQ ID NO: 28232 - RNA, 1714 nt, Artificial Sequence
  mRNA product Design a-1 (hSL-A64-N5) comprising derived and/or modified sequence from LASV(GA391;Clade III)__CAA36645__GPCmut5 (opt1)
aggagagucccgcagucggcguccagcggcucugcuuguucgugugugugucguugcaggccuuauucaagcuuaccaugggccagaucgugaccuucuuccaggaggucccccacgugaucgaggaggugaugaacaucguccugaucgcccucagcauccuggccauccugaaggggcucuacaacguggcgaccugcggccugaucgggcuggugacguuccuccugcuguccggccgcagcugcucccucaucuacaaggggaccuacgagcugcagacccuggagcucaacauggagacccugaacaugacgaugccgcugagcugcaccaagaacaacucccaccacuacauccgggucggcaacgagaccggccucgagcugacccugacgaacaccagcauccucaaccacaaguucugcaaccuguccgacgcccacaagcgcaaccuguacgaccacagccucauguccaucaucagcaccuuccaccuguccauccccaacuucaaccaguacgaggccaugagcugcgacuucaacgggggcaagaucaccgugcaguacaaccugucccacagcuucgccguggacgccgcggggcacugcggcacgcucgccaacgggguccugcagaccuucaugcggauggccuggggcggcuccuacaucgcccuggacagcgggugcggcaacugggacugcaucaugaccuccuaccaguaccucaucauccagaacaccacgugggacgaccacugccaguucagccgccccucccccaucggguaccugggccugcucagccagcggacccgcgacaucuacaucagccggcgccugcugggcaccuucaccuggacgcucuccgacagcgaggggaacgagaccccgggcggguacugccugacccgguggaugcugaucgaggcggagcucaagugcuucggcaacaccgccguggccaagugcaacgagaagcacgacgaggaguucugcgacaugcugcgccuguucgacuucaacaagcaggccauccggcgccucaagacgcccgcccagauguccauccagcugaucaacaaggcggugaacgcccugaucaacgaccagcucaucaugaagaaccaccuccgggacaucaugugcauccccuacugcaacuacagccgcuacugguaccugaaccacaccuccaccgggaagaccagccugccccggugcuggcugaucuccaacggcagcuaccugaacgagacgaaguucuccgacgacaucgagcagcaggccgacaacaugaucaccgagaugcugcagaaggaguacaucgaccgccagggcaagaccccgcucgggcuggucgaccuguucguguucagcaccuccuucuaccucaucagcaucuuccugcaccuggugaagauccccacgcaccggcacaucgucggcaagcccugccccaagccgcaccgccucaaccacauggggaucugcuccugcggccuguacaagcagcccggggugcccgugcgguggaagcgcugaggacuagucccuguucccagagcccacuuuuuuuucuuuuuuugaaauaaaauagccugucuuucagaucucaaaggcucuuuucagagccaccaaaaaaaaaaaaaaaaaaaaaaaaaaaaaaaaaaaaaaaaaaaaaaaaaaaaaaaaaaaaaaaaagaauu

SEQ ID NO: 28233 - RNA, 1717 nt, Artificial Sequence
  mRNA product Design a-1 (hSL-A64-N5) comprising derived and/or modified sequence from LASV(AV;Clade V)__CCA30314__GPCmut5 (opt1)
aggagagucccgcagucggcguccagcggcucugcuuguucgugugugugucguugcaggccuuauucaagcuuaccaugggccagaucgugaccuucuuccaggaggucccccacgugaucgaggaggugaugaacaucguccugaucgcccucagcauccuggccgugcugaaggggcucuacaacaucgcgaccugcggccugaucgggcugaucacguuccuccugcugugcggccgcuccugcagcuccaaccucuacaaggggguguacgagcugcagagccuggaccucaacauggagacccugaacaugaccaugccgcuguccugcaccaagaacaacagccaccacuacauccgggucggcaacgacacgggccucgagcugacccugaccaacaccuccauccucaaccacaaguucugcaaccugagcgacgcccacaagaaggaccuguacgaccacgcccucauguccaucaucagcacguuccaccuguccauccccaacuucaaccaguacgaggccaugagcugcgacuucaacgggggcaagaucuccgugcaguacaaccugagccacuccuacgccaucgacgcggccaaccacugcgggaccguggccaacggcauccuccagaccuucaugcgcauggccuggggcgggagcuacaucgcgcuggacuccggcugcgggaacugggacugcaucaugaccagcuaccaguaccugaucauccagaacacgaccugggagaaccacugccaguucucccggcccagccccaucggcuaccucgggcugcugagccagcgcacccgggacaucuacaucucccgccggcuccugggcaccuucacguggacccugagcgacuccgagggcaacgccacccccgggggcuacugccucacccgcuggaugcugaucgaggccgagcugaagugcuucgggaacacggccgucgccaagugcaacgagaagcacgacgaggaguucugcgacaugcuccggcuguucgacuucaacaagcaggcgaucagccgccugaaguccccggcccagaugagcauccagcucaucaacaaggccgugaacgcccugaucaacgaccagcugaucaugaagaaccaccuccgggacaucaugugcauccccuacugcaacuacuccaaguacugguaccugaaccacaccaucaccggcaagaccagccugcccaagugcuggcucguguccaacgggagcuaccugaacgagacgcacuucuccgacgacaucgagcagcaggccgacaacaugaucaccgagaugcugcagaaggaguacauggagcgccagggcaagaccccgcugggccucgucgaccuguucguguucagcaccuccuucuaccugaucagcaucuuccuccggcuggugaagauccccacgcaccgccacaucgucgggaagcccugccccaagccgcaccggcugaaccacaugggcaucugcuccugcgggcucuacaagcagcccggcgugcccgugcgcuggaagcggugaggacuagucccuguucccagagcccacuuuuuuuucuuuuuuugaaauaaaauagccugucuuucagaucucaaaggcucuuuucagagccaccaaaaaaaaaaaaaaaaaaaaaaaaaaaaaaaaaaaaaaaaaaaaaaaaaaaaaaaaaaaaaaaaagaauu

SEQ ID NO: 28234 - RNA, 1714 nt, Artificial Sequence
  mRNA product Design a-1 (hSL-A64-N5) comprising derived and/or modified sequence from LASV(Togo/2016/7082;Clade VI)__AMR44577__GPCmut5 (opt1)
aggagagucccgcagucggcguccagcggcucugcuuguucgugugugugucguugcaggccuuauucaagcuuaccaugggccagaucaucaccuucuuccaggaggugccccacgucaucgaggaggugaugaacaucgugcugaucgcccucagccugcuggccauccucaagggggucuacaacguggcgaccugcggcaucaucgggcuggugacguuccuguuccucugcggccgcuccugcagccugaucuacaagggguccuacgagcugcagacccucgagcugaacauggagacccugaacaugaccaugccgcucagcugcacgaagaacuccagccaccacuacauccgggucggcaacgagaccggccuggagcugacccucaccaacacguccaucaucaaccacaaguucugcaaccugagcgacgcccacaagcgcaaccuguacgaccacgcccucauguccauccugagcaccuuccaccuguccauccccaacuucaaccaguacgaggccaugagcugcgacuucaacgggggcaagaucuccgugcaguacaaccucagccacgccuacgcgguggacgccgccgagcacugcgggaccgucgccaacggcgugcugcagaccuucaugcggauggcguggggcggguccuacaucgcccuggacagcggcugcgggaacugggacugcaucaugacguccuaccaguaccucaucauccagaacaccaccugggaggaccacugccaguucagccgccccucccccaucggcuaccuggggcugcucagccagcggacccgcgacaucuacaucagccggcgccugcugggcacguucaccuggacccucuccgacagcgagggcaacgagacccccgggggcuacugccugacgcgguggaugcugaucgaggccgagcucaagugcuucgggaacaccgccguggccaagugcaacgagaagcacgacgaggaguucugcgacaugcugcgccuguucgacuucaacaagcaggcgauccagcggcucaaguccccggcccagaugagcauccagcugaucaacaaggccgucaacgcccugaucaacgaccagcucaucaugaagaaccaccuccgcgacaugaugugcauccccuacugcaacuacuccaaguacugguaccugaaccacaccagcuccggccggaccagccugcccaagugcuggcugguguccaacgggagcuaccugaacgagacgcacuucuccgacgacaucgagcagcaggccgacaacaugaucaccgagaugcuccagaaggaguacaucgaccgccagggcaagaccccgcugggccugguggaccuguucgucuucagcaccuccuucuaccucaucagcaucuuccugcaccugaucaagauccccacgcaccggcacaucguggggaagcccugccccaagccgcaccgccucaaccacaugggcaucugcuccugcgggcuguacaagcagcccggcgugcccacccgguggaagcgcugaggacuagucccuguucccagagcccacuuuuuuuucuuuuuuugaaauaaaauagccugucuuucagaucucaaaggcucuuuucagagccaccaaaaaaaaaaaaaaaaaaaaaaaaaaaaaaaaaaaaaaaaaaaaaaaaaaaaaaaaaaaaaaaaagaauu

SEQ ID NO: 28235 - RNA, 1714 nt, Artificial Sequence
  mRNA product Design a-1 (hSL-A64-N5) comprising derived and/or modified sequence from LASV(KAK-428;Clade n.d. (VII))__ANH09740__GPCmut5 (opt1)
aggagagucccgcagucggcguccagcggcucugcuuguucgugugugugucguugcaggccuuauucaagcuuaccaugggccagaucgugaccuucuuccaggaggucccccacgugaucgaggaggugaugaacaucguccugaucgcccucagccugcuggccauccucaaggggcuguacaacuucgcgaccugcggcgugaucgggcugaucacguuccuccugcugugcggccgcuccugcagcgccaccuacaaggggcaguacgagcuccagacccuggagcugaacauggagucccucaacaugaccaugccgcugagcugcacgaagaacaacucccaccacuacauccgggccggcaacaacaccggccuggagcucacccugaccaacacgagcaucaucucccacaaguucugcaaccugagcgacgcccacaagaagaaccucuacgaccacacccugauguccaucaucaccaccuuccaccugagcauccccaacuucaaccaguacgaggccauguccugcgacuucaacgggggcaagaucagcauccaguacaaccucucccacagcuacgcgggggacgccgcccagcacugcggcacgguggccaacgggguccugcagaccuucaugcgcauggcguggggcggcuccuaccuggcccucgacagcgggugccggggcugggacugcaucaucuccagcuaccaguaccugaucauccagaacaccaccugggacgaccacugccaguucucccgccccagccccaucggguaccugggcuucgugagccagaagacgcgggacaucuacaucucccgccggcuccugggcaccuucaccuggacccugagcgacuccgaggggcacgacaugccgggcggguacugccucacgcgcuggaugcugaucgaggccgaccugaagugcuucggcaacaccgccguggccaagugcaacgagaagcacgacgaggaguucugcgacauguggcggcuguucgacuucaacaagcaggcgauccagcgccugaaggcccccgcccagaugaacauccagcugaucaacaaggccgucaacgcccucaucaacgaccagcugaugaugaagaaccaccuccgggacaucaugugcauccccuacugcaacuacagcaaguucugguaccucaacaacaccaccacggggcgcaccucccugccccggugcuggcugaucagcaacggcuccuaccucaacgagacccacuucagcgacgacaucgagcagcaggcggacaacaugaucaccgagaugcugcagaaggaguacauggaccgccagggcaagacgccgcuggggcucguggaccuguucguguucuccaccagcuucuaccugaucaccaucuuccugcaccucgucaagauccccacccaccggcacaucgugggcaagcccugccccaagccgcaccgccugaaccacauggggaucugcuccugcggccuguacaagcagcccggggugcccguccgguggaagcgcugaggacuagucccuguucccagagcccacuuuuuuuucuuuuuuugaaauaaaauagccugucuuucagaucucaaaggcucuuuucagagccaccaaaaaaaaaaaaaaaaaaaaaaaaaaaaaaaaaaaaaaaaaaaaaaaaaaaaaaaaaaaaaaaaagaauu

SEQ ID NO: 28236 - RNA, 1714 nt, Artificial Sequence; identical to SEQ ID NO: 28230
  mRNA product Design a-1 (hSL-A64-N5) comprising derived and/or modified sequence from LASV(Pinneo-NIG-1969;Clade I)__AIT17836__GPCmut5 (opt1)

SEQ ID NO: 28237 - RNA, 1714 nt, Artificial Sequence
  mRNA product Design a-1 (hSL-A64-N5) comprising derived and/or modified sequence from LASV(ISTH0009-NIG-2011;Clade II)__AIT17404__GPCmut5 (opt1)
aggagagucccgcagucggcguccagcggcucugcuuguucgugugugugucguugcaggccuuauucaagcuuaccaugggccagaucaucaccuucuuccaggaggugccccacgucaucgaggaggugaugaacaucgugcugaucgcccucagccugcuggccauccucaaggggaucuacaacgucgcgaccugcggccuguucgggcugguguccuuccuccugcugugcggccgcagcugcuccacgaccuacaaggggguguacgagcuccagacccuggagcuggacauggccagccucaacaugaccaugccgcuguccugcacgaagaacaacagccaccacuacaucauggucggcaacgagaccggccuggagcucacccugaccaacacguccaucaucaaccacaaguucugcaaccugagcgacgcccacaagaagaaccucuacgaccacgcccugauguccaucaucagcaccuuccaccuguccauccccaacuucaaccaguacgaggccaugagcugcgacuucaacgggggcaagaucuccgugcaguacaaccucagccacgcguacgccguggacgccgccaaccacugcgggaccaucgcgaacggcguccugcagaccuucaugcggauggccuggggcggguccuacaucgcccuggacagcggcugcggguccugggacugcaucaugacgagcuaccaguaccucaucauccagaacaccaccugggaggaccacugccaguucucccgccccagccccaucggcuaccuggggcugcucagccagcggacccgcgacaucuacaucucccggcgccugcugggcacguucaccuggacccucagcgacuccgagggcaacgagacccccgggggcuacugccugacgcgguggaugcugaucgaggccgagcucaagugcuucgggaacaccgccguggcgaagugcaacgagaagcacgacgaggaguucugcgacaugcugcgccuguucgacuucaacaagcaggccauccggcgccucaagaccccggcccagaugagcauccagcugaucaacaaggccgugaacgcccugaucaacgaccagcucaucaugaagaaccaccuccgggacaucaugugcauccccuacugcaacuacuccaaguacugguaccugaaccacaccgucacgggcaagaccagccugccccgcugcuggcugguguccaacgggagcuaccugaacgagacccacuucuccgacgacaucgagcagcaggcggacaacaugaucaccgagcuccugcagaaggaguacauggaccggcagggcaagacgccgcugggccugguggaccucuucgucuucagcaccuccuucuaccugaucagcaucuuccugcaccucaucaagauccccacccaccgccacaucaccgggaagcccugccccaagccgcaccggcugaaccacaugggcaucugcuccugcgggcuguacaagcaccccggcgugcccgugaaguggaagcgcugaggacuagucccuguucccagagcccacuuuuuuuucuuuuuuugaaauaaaauagccugucuuucagaucucaaaggcucuuuucagagccaccaaaaaaaaaaaaaaaaaaaaaaaaaaaaaaaaaaaaaaaaaaaaaaaaaaaaaaaaaaaaaaaaagaauu

SEQ ID NO: 28238 - RNA, 1714 nt, Artificial Sequence
  mRNA product Design a-1 (hSL-A64-N5) comprising derived and/or modified sequence from LASV(ISTH2010-NIG-2012;Clade II)__AIT17482__GPCmut5 (opt1)
aggagagucccgcagucggcguccagcggcucugcuuguucgugugugugucguugcaggccuuauucaagcuuaccaugggccagaucaucaccuucuuccaggaggugccccacgucaucgaggaggugaugaacaucgugcugaucgcccucagccugcuggccauccucaaggggaucuacaacgucgcgaccugcggccuguucgggcugguguccuuccuccugcugugcggccgcagcugcuccacgaccuacaaggggguguacgagcuccagacccuggagcuggacauggccagccucaacaugaccaugccgcuguccugcacgaagaacaacagccaccacuacaucauggucggcaacgagaccggccuggagcucacccugaccaacacguccaucaucaaccacaaguucugcaaccugagcgacgcccacaagaagaaccucuacgaccacgcccugauguccaucaucagcaccuuccaccuguccauccccaacuucaaccaguacgaggccaugagcugcgacuucaacgggggcaagaucuccgugcaguacaaccucagccacgcguacgccguggacgccgccaaccacugcgggaccaucgcgaacggcguccugcagaccuucaugcggauggccuggggcggguccuacaucgcccuggacagcggcugcggguccugggacugcaucaugacgagcuaccaguaccucaucauccagaacaucaccugggaggaccacugccaguucucccgccccagccccaucggcuaccuggggcugcucagccagcggacccgcgacaucuacaucucccggcgccugcugggcaccuucacguggacccucagcgacuccgagggcaacgagacccccgggggcuacugccugacccgguggaugcugaucgaggccgagcucaagugcuucgggaacacggccguggcgaagugcaacgagaagcacgacgaggaguucugcgacaugcugcgccuguucgacuucaacaagcaggccauccggcgccucaagaccccggcccagaugagcauccagcugaucaacaaggccgugaacgcccugaucaacgaccagcucaucaugaagaaccaccuccgggacaucaugugcauccccuacugcaacuacuccaaguacugguaccugaaccacaccgucaccggcaagacgagccugccccgcugcuggcugguguccaacgggagcuaccugaacgagacccacuucuccgacgacaucgagcagcaggcggacaacaugaucaccgagcuccugcagaaggaguacaucgaccggcagggcaagaccccgcugggccugguggaccucuucgucuucagcacguccuucuaccugaucagcaucuuccugcaccucgugaagauccccacccaccgccacguggucgggaagcccugccccaagccgcaccggcugaaccacaugggcaucugcuccugcgggcuguacaagcaccccggcgugcccgugaaguggaagcgcugaggacuagucccuguucccagagcccacuuuuuuuucuuuuuuugaaauaaaauagccugucuuucagaucucaaaggcucuuuucagagccaccaaaaaaaaaaaaaaaaaaaaaaaaaaaaaaaaaaaaaaaaaaaaaaaaaaaaaaaaaaaaaaaaagaauu

SEQ ID NO: 28239 - RNA, 1714 nt, Artificial Sequence
  mRNA product Design a-1 (hSL-A64-N5) comprising derived and/or modified sequence from LASV(Lassa virus/H.sapiens-wt/NGA/2015/ISTH_0543;Clade II)__AVO03639__GPCmut5 (opt1)
aggagagucccgcagucggcguccagcggcucugcuuguucgugugugugucguugcaggccuuauucaagcuuaccaugggccagaucaucaccuucuuccaggaggugccccacgucaucgaggaggugaugaacaucgugcugaucgcccucagccugcuggccauccucaaggggaucuacaacgucgcgaccugcggccuguucgggcugguguccuuccuccugcugugcggccgcagcugcuccacgaccuacaaggggguguacgagcuccagacccuggagcuggacauggccaaccucaacaugaccaugccgcugagcugcacgaagaacaacucccaccacuacaucauggucggcaacgagaccggccuggagcucacccugaccaacacgagcaucaucaaccacaaguucugcaaccuguccgacgcccacaagaagaaccucuacgaccacgcccugaugagcaucaucuccaccuuccaccugagcauccccaacuucaaccaguacgaggccauguccugcgacuucaacgggggcaagaucagcgugcaguacaaccucucccacaccuacgcgguggacgccgccaaccacugcgggaccaucgccaacggcguccugcagacguucaugcggauggcguggggcgggagcuacaucgcccuggacuccggcugcgggagcugggacugcaucaugaccuccuaccaguaccucgugauccagaacaccaccugggaggaccacugccaguucagccgccccucccccaucggcuaccuggggcugcucagccagcggacgcgcgacaucuacaucagccggcgccugcugggcaccuucaccuggacccucuccgacagcgagggcaacgagacgcccgggggcuacugccugacccgguggaugcugaucgaggccgagcucaagugcuucgggaacaccgccguggccaagugcaacgagaagcacgacgaggaguucugcgacaugcugcgccuguucgacuucaacaagcaggcgauccggcgccucaagaccccggcccagauguccauccagcugaucaacaaggccgucaacgcccugaucaacgaccagcucaucaugaagaaccaccuccgggacaucaugugcauccccuacugcaacuacagcaaguacugguaccugaaccacacggugaccggcaagaccucccugccccgcugcuggcuggugagcaacggguccuaccugaacgagacccacuucagcgacgacaucgagcagcaggccgacaacaugaucacggagcuccugcagaaggaguacaucgaccggcagggcaagaccccgcugggccuggucgaccucuucguguucuccaccagcuucuaccugaucuccaucuuccugcaccucgugaagauccccacccaccgccacaucacggggaagcccugccccaagccgcaccggcugaaccacaugggcaucugcagcugcgggcuguacaagcaccccggcguccccgugaaguggaagcgcugaggacuagucccuguucccagagcccacuuuuuuuucuuuuuuugaaauaaaauagccugucuuucagaucucaaaggcucuuuucagagccaccaaaaaaaaaaaaaaaaaaaaaaaaaaaaaaaaaaaaaaaaaaaaaaaaaaaaaaaaaaaaaaaaagaauu

SEQ ID NO: 28240 - RNA, 1714 nt, Artificial Sequence
  mRNA product Design a-1 (hSL-A64-N5) comprising derived and/or modified sequence from LASV(Lassa virus/H.sapiens-wt/NGA/2016/ISTH_0009;Clade II)__AVO03571__GPCmut5 (opt1)
aggagagucccgcagucggcguccagcggcucugcuuguucgugugugugucguugcaggccuuauucaagcuuaccaugggccagaucaucaccuucuuccaggaggugccccacgucaucgaggaggugaugaacaucgugcugaucgcccucagccugcuggccauccucaaggggaucuacaacgucgcgaccugcggccugcuggggcucguguccuuccugcugcucugcggccgcagcugcuccacgaccuacaaggggguguacgagcugcagacccuggagcucgacauggccagccugaacaugaccaugccgcuguccugcacgaagaacaacagccaccacuacaucauggucggcaacgagaccggccucgagcugacccugaccaacacguccaucaucaaccacaaguucugcaaccucagcgacgcccacaagaagaaccuguacgaccacgcccugauguccaucaucagcaccuuccaccucuccauccccaacuucaaccaguacgaggccaugagcugcgacuucaacgggggccggaucuccgugcaguacaaccugagccacuccuacgcgguggacgccgccaaccacugcgggaccaucgccaacggcguccugcagaccuucaugcgcauggcguggggcgggagcuacaucgcccucgacuccggcugcgggagcugggacugcaucaugacguccuaccaguaccugaucauccagaacaccaccugggaggaccacugccaguucagccggcccagccccaucggcuaccuggggcuccugucccagcgcacccgggacaucuacaucagccgccggcugcucggcacguucaccuggacccuguccgacagcgagggcaacgagacccccgggggcuacugccugacgcgcuggaugcucaucgaggccgagcugaagugcuucgggaacaccgccguggccaagugcaacgagaagcacgacgaggaguucugcgacaugcugcggcuguucgacuucaacaagcaggcgauccgccggcugaagaccccggcccagauguccauccagcugaucaacaaggccgugaacgcccucaucaacgaccagcugaucaugaagaaccaccuccgcgacaucaugugcauccccuacugcaacuacagcaaguacugguaccucaaccacaccgucacgggcaagaccucccugccccggugcuggcuggugagcaacggguccuaccucaacgagacccacuucagcgacgacaucgagcagcaggccgacaacaugaucaccgagcugcugcagaaggaguacaucgaccgccagggcaagacgccgcugggccucguggaccuguucgucuucuccaccagcuucuaccugaucuccaucuuccuccaccuggugaagauccccacccaccggcacaucaccgggaagcccugccccaagccgcaccgccugaaccacaugggcaucugcagcugcgggcucuacaaccaccccggcgugcccgucaaguggaagcggugaggacuagucccuguucccagagcccacuuuuuuuucuuuuuuugaaauaaaauagccugucuuucagaucucaaaggcucuuuucagagccaccaaaaaaaaaaaaaaaaaaaaaaaaaaaaaaaaaaaaaaaaaaaaaaaaaaaaaaaaaaaaaaaaagaauu

SEQ ID NO: 28241 - RNA, 1714 nt, Artificial Sequence
  mRNA product Design a-1 (hSL-A64-N5) comprising derived and/or modified sequence from LASV(Lassa virus/H.sapiens-wt/NGA/2016/ISTH_0017;Clade II)__AVO03567__GPCmut5 (opt1)
aggagagucccgcagucggcguccagcggcucugcuuguucgugugugugucguugcaggccuuauucaagcuuaccaugggccagaucaucaccuucuuccaggaggugccccacgucaucgaggaggugaugaacaucgugcugaucgcccucagccugcuggccauccucaaggggaucuacaacgucgcgaccugcggccuguucgggcugguguccuuccuccugcugugcggccgcagcugcuccacgaccuacaaggggguguacgagcuccagacccuggagcuggacauggccagccucaacaugaccaugccgcuguccugcacgaagaacaacagccaccacuacaucauggucggcaacgagaccggccuggagcucacccugaccaacacguccaucaucaaccacaaguucugcaaccugagcgacgcccacaagaagaaccucuacgaccacgcccugauguccaucaucagcaccuuccaccuguccauccccaacuucaaccaguacgaggccaugagcugcgacuucaacgggggcaagaucuccgugcaguacaaccucagccacaccuacgcgaucgacgccgccaaccacugcgggaccaucgccaacggcgugcugcagacguucaugcggauggcguggggcggguccuacaucgcccuggacagcggcugcggguccugggacugcaucaugaccagcuaccaguaccucaucauccagaacaccaccugggaggaccacugccaguucucccgccccagccccaucggcuaccuggggcugcucagccagcggacgcgcgacaucuacaucucccggcgccugcugggcaccuucaccuggacccucagcgacuccgagggcaacgagacgcccgggggcuacugccugacccgguggaugcugaucgaggccgagcucaagugcuucgggaacaccgccgucgccaagugcaacgagaagcacgacgaggaguucugcgacaugcugcgccuguucgacuucaacaagcaggcgauccggcgccucaagaccccggcccagaugagcauccagcugaucaacaaggccgugaacgcccugaucaacgaccagcucaucaugaagaaccaccuccgggacaucaugugcauccccuacugcaacuacuccaaguacugguaccugaaccacacggugaccggcaagaccagccugccccgcugcuggcuggucuccaacgggagcuaccugaacgagacccacuucuccgacgacaucgagcagcaggccgacaacaugaucacggagcuccugcagaaggaguacauggaccggcagggcaagaccccgcugggccugguggaccucuucguguucagcaccuccuucuaccugaucagcaucuuccugcaccucguccgcauccccacccaccggcacgugaucgggaagcccugccccaagccgcaccgccugaaccacaugggcaucugcuccugcgggcuguacaagcaccccggcgugcccgucaaguggaagcggugaggacuagucccuguucccagagcccacuuuuuuuucuuuuuuugaaauaaaauagccugucuuucagaucucaaaggcucuuuucagagccaccaaaaaaaaaaaaaaaaaaaaaaaaaaaaaaaaaaaaaaaaaaaaaaaaaaaaaaaaaaaaaaaaagaauu

SEQ ID NO: 28242 - RNA, 1714 nt, Artificial Sequence
  mRNA product Design a-1 (hSL-A64-N5) comprising derived and/or modified sequence from LASV(Lassa virus/H.sapiens-wt/NGA/2018/ISTH_0959;Clade II)__AVV65099__GPCmut5 (opt1)
aggagagucccgcagucggcguccagcggcucugcuuguucgugugugugucguugcaggccuuauucaagcuuaccaugggccagaucaucaccuucuuccaggaggugccccacgucaucgaggaggugaugaacaucgugcugaucgcccucagccugcuggccauccucaaggggaucuacaacgucgugaccugcggccuguucgggcugguguccuuccuccugcugugcggccgcagcugcuccacgaccuacaagggggucuacgagcuccagacccuggagcuggacauggcgagccucaacaugaccaugccgcuguccugcacgaagaacaacagccaccacuacaucauggugggcaacgagaccggccuggagcucacccugaccaacacguccaucaucaaccacaaguucugcaaccugagcgacgcccacaagaagaaccucuacgaccacgcccugauguccaucaucagcaccuuccaccuguccauccccaacuucaaccaguacgaggccaugagcugcgacuucaacgggggcaagaucuccgugcaguacaaccucagccacgccuacgcgaucgacgccgccaaccacugcgggaccaucgccaacggcguccugcagaccuucaugcggauggcguggggcggguccuacaucgcccuggacagcggcugcggguccugggacugcaucaugacgagcuaccaguaccucaucauccagaacaccaccugggaggaccacugccaguucucccgccccagccccaucggcuaccuggggcugcucagccagcggacccgcgacaucuacaucucccggcgccugcugggcacguucaccuggacccucagcgacuccgagggcaacgagacccccgggggcuacugccugacgcgguggaugcugaucgaggccgagcucaagugcuucgggaacaccgccguggccaagugcaacgagaagcacgacgaggaguucugcgacaugcugcgccuguucgacuucaacaagcaggcgauccggcgccucaagaccccggcccagaugagcauccagcugaucaacaaggccgugaacgcccugaucaacgaccagcucaucaugaagaaccaccuccgggacaucaugugcauccccuacugcaacuacuccaaguacugguaccugaaccacaccgucacgggcaagaccagccugccccgcugcuggcugguguccaacgggagcuaccugaacgagacccacuucuccgacgacaucgagcagcaggccgacaacaugaucaccgagcuccugcagaaggaguacaucgaccggcagggcaagacgccgcugggccugguggaccucuucgucuucagcaccuccuucuaccugaucagcaucuuccugcaccucgugaagauccccacccaccgccacgugaucgggaagcccugccccaagccgcaccggcugaaccacaugggcaucugcuccugcgggcuguacaagcaccccggcguccccgugaaguggaagcgcugaggacuagucccuguucccagagcccacuuuuuuuucuuuuuuugaaauaaaauagccugucuuucagaucucaaaggcucuuuucagagccaccaaaaaaaaaaaaaaaaaaaaaaaaaaaaaaaaaaaaaaaaaaaaaaaaaaaaaaaaaaaaaaaaagaauu

SEQ ID NO: 28243 - RNA, 1714 nt, Artificial Sequence
  mRNA product Design a-1 (hSL-A64-N5) comprising derived and/or modified sequence from LASV(LASV003-NIG-2008;Clade II)__AIT17580__GPCmut5 (opt1)
aggagagucccgcagucggcguccagcggcucugcuuguucgugugugugucguugcaggccuuauucaagcuuaccaugggccagaucaucaccuucuuccaggaggugccccacgucaucgaggaggugaugaacaucgugcugaucgcccucagccugcuggccauccucaaggggaucuacaacgucgcgaccugcggccuguucgggcugguguccuuccuccugcugugcggccgcagcugcuccacgaccuacaaggggguguacgagcuccagacccuggagcuggacauggccagccucaacaugaccaugccgcuguccugcacgaagaacaacagccaccacuacaucauggucggcaacgagaccggccuggagcucacccugaccaacacguccaucaucaaccacaaguucugcaaccugagcgacgcccacaagaagaaccucuacgaccacgcccugauguccaucaucagcaccuuccaccuguccauccccaacuucaaccaguacgaggccaugagcugcgacuucaacgggggcaagaucuccgugcaguacaaccucagccacaccuacgcgguggacgccgccaaccacugcgggaccaucgccaacggcguccugcagacguucaugcggauggcguggggcggguccuacaucgcccuggacagcggcugcggguccugggacugcaucaugaccagcuaccaguaccucaucauccagaacaccaccugggaggaccacugccaguucucccgccccagccccaucggcuaccuggggcugcucagccagcggacgcgcgacaucuacaucucccggcgccugcugggcaccuucaccuggacccucagcgacuccgagagcaacgagacgccgggcggguacugccugacccgguggaugcugaucgaggccgagcucaagugcuucggcaacaccgccguggccaagugcaacgagaagcacgacgaggaguucugcgacaugcugcgccuguucgacuucaacaagcaggcgauccggcgccucaaggcccccgcccagauguccauccagcugaucaacaaggccgugaacgcccugaucaacgaccagcucaucaugaagaaccaccuccgggacaucaugugcauccccuacugcaacuacagcaaguacugguaccugaaccacaccgucacggggcgcaccucccugccccggugcuggcuggugagcaacggcuccuaccugaacgagacccacuucagcgacgacaucgagcagcaggcggacaacaugaucaccgagcuccugcagaaggaguacauggaccgccaggggaagacgccgcugggccugguggaccucuucgucuucuccaccagcuucuaccugaucuccaucuuccugcaccucgugaagauccccacccaccggcacgugaucggcaagcccugccccaagccgcaccgccugaaccacauggggaucugcagcugcggccuguacaagcaccccgggguccccgugaaguggaagcggugaggacuagucccuguucccagagcccacuuuuuuuucuuuuuuugaaauaaaauagccugucuuucagaucucaaaggcucuuuucagagccaccaaaaaaaaaaaaaaaaaaaaaaaaaaaaaaaaaaaaaaaaaaaaaaaaaaaaaaaaaaaaaaaaagaauu

SEQ ID NO: 28244 - RNA, 1714 nt, Artificial Sequence
  mRNA product Design a-1 (hSL-A64-N5) comprising derived and/or modified sequence from LASV(LASV035-NIG-2009;Clade II)__AIT17588__GPCmut5 (opt1)
aggagagucccgcagucggcguccagcggcucugcuuguucgugugugugucguugcaggccuuauucaagcuuaccaugggccagaucaucaccuucuuccaggaggugccccacgucaucgaggaggugaugaacaucgugcugaucgcccucagccugcuggccauccucaaggggaucuacaacgucgcgaccugcggccuguucgggcugguguccuuccuccugcugugcggccgcagcugcuccacgaccuacaaggggguguacgagcuccagacccuggagcuggacauggccagccucaacaugaccaugccgcuguccugcacgaagaacaacagccaccacuacaucauggucggcaacgagaccggccuggagcucacccugaccaacacguccaucaucaaccacaaguucugcaaccugagcgacgcccacaagaagaaccucuacgaccacgcccugauguccaucaucagcaccuuccaccuguccauccccaacuucaaccaguacgaggccaugagcugcgacuucaacgggggcaagaucuccgugcaguacaaccucagccacgcguacgccguggacgccgccaaccacugcgggaccaucgcgaacggcguccugcagaccuucaugcggauggccuggggcggguccuacaucgcccuggacagcggcugcggguccugggacugcaucaugacgagcuaccaguaccucaucauccagaacaccaccugggaggaccacugccaguucucccgccccagccccaucggcuaccuggggcugcucagccagcggacccgcgacaucuacaucucccggcgccugcugggcacguucaccuggacccucagcgacuccgagggcaacgagacccccgggggcuacugccugacgcgguggaugcugaucgaggccgagcucaagugcuucgggaacaccgccguggcgaagugcaacgagaagcacgacgaggaguucugcgacaugcugcgccuguucgacuucaacaagcaggccauccggcgccucaaggccccggcccagaugagcauccagcugaucaacaaggccgugaacgcgcugaucaacgaccagcucaucaugaagaaccaccuccgggacaucaugugcauccccuacugcaacuacuccaaguacugguaccugaaccacaccgucaccggcaagacgagccugccccgcugcuggcugguguccaacgggagcuaccugaacgagacccacuucuccgacgacaucgagcagcaggccgacaacaugaucaccgagcuccugcagaaggaguacaucgaccggcagggcaagaccccgcugggccugguggaccucuucgucuucagcacguccuucuaccugaucagcaucuuccugcaccucgugaagauccccacccaccgccacgugaucgggaagcccugccccaagccgcaccggcugaaccacaugggcaucugcuccugcgggcuguacaagcaccccggcguccccgugaaguggaagcgcugaggacuagucccuguucccagagcccacuuuuuuuucuuuuuuugaaauaaaauagccugucuuucagaucucaaaggcucuuuucagagccaccaaaaaaaaaaaaaaaaaaaaaaaaaaaaaaaaaaaaaaaaaaaaaaaaaaaaaaaaaaaaaaaaagaauu

SEQ ID NO: 28245 - RNA, 1714 nt, Artificial Sequence
  mRNA product Design a-1 (hSL-A64-N5) comprising derived and/or modified sequence from LASV(LASV1000-NIG-2009;Clade II)__AIT17782__GPCmut5 (opt1)
aggagagucccgcagucggcguccagcggcucugcuuguucgugugugugucguugcaggccuuauucaagcuuaccaugggccagaucaucaccuucuuccaggaggugccccacgucaucgaggaggugaugaacaucgugcugaucgcccucagccugcuggccauccucaaggggaucuacaacgucgcgaccugcggccuguucgggcugguguccuuccuccugcugugcggccgcagcugcuccacgaccuacaaggggguguacgagcuccagacccuggagcuggacauggccagccucaacaugaccaugccgcuguccugcacgaagaacaacagccaccacuacaucauggucggcaacgagaccggccuggagcucacccugaccaacacguccaucaucaaccacaaguucugcaaccugagcgacgcccacaagaagaaccucuacgaccacgcccugauguccaucaucagcaccuuccaccuguccauccccaacuucaaccaguacgaggccaugagcugcgacuucaacgggggcaagaucuccgugcaguacaaccucagccacaccuacgcgguggacgccgccaaccacugcgggaccaucgccaacggcguccugcagacguucaugcggauggcguggggcggguccuacaucgcccuggacagcggcugcggguccugggacugcaucaugaccagcuaccaguaccucaucauccagaacaccaccugggaggaccacugccaguucucccgccccagccccaucggcuaccuggggcugcucagccagcggacgcgcgacaucuacaucucccggcgccugcugggcaccuucaccuggacccucagcgacuccgagggcaacgagacgcccgggggcuacugccugacccgguggaugcugaucgaggccgagcucaagugcuucgggaacaccgccguggccaagugcaacgagaagcacgacgaggaguucugcgacaugcugcgccuguucgacuucaacaagcaggcgaucaagcggcucaagaccccggcccagaugagcauccagcugaucaacaaggccgugaacgcccugaucaacgaccagcucaucaugaagaaccaccuccgcgacaucaugugcauccccuacugcaacuacuccaaguacugguaccugaaccacacggucaccggcaagaccagccugccccggugcuggcugguguccaacgggagcuaccugaacgagacccacuucuccgacgacaucgagcagcaggccgacaacaugaucacggagcuccugcagaaggaguacaucgaccgccagggcaagaccccgcugggccugguggaccucuucgucuucagcaccuccuucuaccugaucagcaucuuccugcaccucgugaagauccccacccaccggcacguggucgggaagcccugccccaagccgcaccgccugaaccacaugggcaucugcuccugcgggcuguacaagcaccccggcgugcccgugaaguggaagcggugaggacuagucccuguucccagagcccacuuuuuuuucuuuuuuugaaauaaaauagccugucuuucagaucucaaaggcucuuuucagagccaccaaaaaaaaaaaaaaaaaaaaaaaaaaaaaaaaaaaaaaaaaaaaaaaaaaaaaaaaaaaaaaaaagaauu

SEQ ID NO: 28246 - RNA, 1714 nt, Artificial Sequence
  mRNA product Design a-1 (hSL-A64-N5) comprising derived and/or modified sequence from LASV(LASV221-NIG-2010;Clade II)__AIT17624__GPCmut5 (opt1)
aggagagucccgcagucggcguccagcggcucugcuuguucgugugugugucguugcaggccuuauucaagcuuaccaugggccagaucaucaccuucuuccaggaggugccccacgucaucgaggaggugaugaacaucgugcugaucgcccucagccugcuggccauccucaaggggaucuacaacgucgcgaccugcggccuguucgggcugguguccuuccuccugcugugcggccgcagcugcuccacgaccuacaaggggguguacgagcuccagacccuggagcuggacauggccagccucaacaugaccaugccgcuguccugcacgaagaacaacagccaccacuacaucauggucggcaacgagaccggccuggagcucacccugaccaacacguccaucaucaaccacaaguucugcaaccugagcgacgcccacaagaagaaccucuacgaccacgcccugauguccaucaucagcaccuuccaccuguccauccccaacuucaaccaguacgaggccaugagcugcgacuucaacgggggcaagaucuccgugcaguacaaccucagccacaccuacgcgaucgacgccgccaaccacugcgggaccaucgccaacggcgugcugcagacguucaugcggauggcguggggcggguccuacaucgcccuggacagcggcugcggguccugggacugcaucaugaccagcuaccaguaccucaucauccagaacaccaccugggaggaccacugccaguucucccgccccagccccaucggcuaccuggggcugcucagccagcggacgcgcgacaucuacaucucccggcgccugcugggcaccuucaccuggacccucagcgacuccgagggcaacgagacgcccgggggcuacugccugacccgguggaugcugaucgaggccgagcucaagugcuucgggaacaccgccgucgccaagugcaacgagaagcacgacgaggaguucugcgacaugcugcgccuguucgacuucaacaagcaggcgauccggcgccucaagaccccggcccagaugagcauccagcugaucaacaaggccgugaacgcccugaucaacgaccagcucaucaugaagaaccaccuccgggacaucaugugcauccccuacugcaacuacuccaaguacugguaccugaaccacacggugaccggcaagaccagccugccccgcugcuggcuggucuccaacgggagcuaccugaacgagacccacuucuccgacgacaucgagcagcaggccgacaacaugaucacggagaugcuccagaaggaguacauggaccggcagggcaagaccccgcugggccugguggaccuguucguguucagcaccuccuucuaccucaucagcaucuuccugcaccuggucaagauccccacccaccgccacgugaucgggaagcccugccccaagccgcaccggcucaaccacaugggcaucugcuccugcgggcuguacaagcaccccggcgugcccgucaaguggaagcgcugaggacuagucccuguucccagagcccacuuuuuuuucuuuuuuugaaauaaaauagccugucuuucagaucucaaaggcucuuuucagagccaccaaaaaaaaaaaaaaaaaaaaaaaaaaaaaaaaaaaaaaaaaaaaaaaaaaaaaaaaaaaaaaaaagaauu

SEQ ID NO: 28247 - RNA, 1714 nt, Artificial Sequence
  mRNA product Design a-1 (hSL-A64-N5) comprising derived and/or modified sequence from LASV(LASV237-NIG-2010;Clade II)__AIT17638__GPCmut5 (opt1)
aggagagucccgcagucggcguccagcggcucugcuuguucgugugugugucguugcaggccuuauucaagcuuaccaugggccagaucaucaccuucuuccaggaggugccccacgucaucgaggaggugaugaacaucgugcugaucgcccucagccugcuggccauccucaaggggaucuacaacgucgcgaccugcggccuguucgggcugguguccuuccuccugcugugcggccgcagcugcuccacgaccuacaaggggguguacgagcuccagacccuggagcuggacauggccagccucaacaugaccaugccgcuguccugcacgaagaacaacagccaccacuacaucauggucggcaacgagaccggccuggagcucacccugaccaacacguccaucaucaaccacaaguucugcaaccugagcgacgcccacaagaaggaccucuacgaccacgcccugauguccaucaucagcaccuuccaccuguccauccccaacuucaaccaguacgaggccaugagcugcgacuucaacgggggcaagaucuccgugcaguacaaccucagccacaccuacgcgguggacgccgccaaccacugcgggaccaucgccaacggcguccugcagacguucaugcggauggcguggggcggguccuacaucgcccuggacagcggcugcggguccugggacugcaucaugaccagcuaccaguaccucaucauccagaacaccaccugggaggaccacugccaguucucccgccccagccccaucggcuaccuggggcugcucagccagcggacgcgcgacaucuacaucucccggcgccugcugggcaccuucaccuggacccucagcgacuccgagggcaacgagacgcccgggggcuacugccugacccgguggaugcugaucgaggccgagcucaagugcuucgggaacaccgccguggccaagugcaacgagaagcacgacgaggaguucugcgacaugcugcgccuguucgacuucaacaagcaggcgauccggcgccucaagaccccggcccagaugagcauccagcugaucaacaaggccgugaacgcccugaucaacgaccagcucaucaugaagaaccaccuccgggacaucaugugcauccccuacugcaacuacuccaaguacugguaccugaaccacacggucaccggcaagaccagccugccccgcugcuggcugguguccaacgggagcuaccugaacgagacccacuucuccgacgacaucgagcagcaggccgacaacaugaucacggagcuccugcagaaggaguacauggaccggcagggcaagaccccgcugggccugguggaccucuucgucuucagcaccuccuucuaccugaucagcaucuuccugcaccucaucaagauccccacccaccgccacaucacggggaagcccugccccaagccgcaccggcugaaccacaugggcaucugcuccugcgggcuguacaagcaccccggcgugcccgugaaguggaagcgcugaggacuagucccuguucccagagcccacuuuuuuuucuuuuuuugaaauaaaauagccugucuuucagaucucaaaggcucuuuucagagccaccaaaaaaaaaaaaaaaaaaaaaaaaaaaaaaaaaaaaaaaaaaaaaaaaaaaaaaaaaaaaaaaaagaauu

SEQ ID NO: 28248 - RNA, 1714 nt, Artificial Sequence
  mRNA product Design a-1 (hSL-A64-N5) comprising derived and/or modified sequence from LASV(LASV253-NIG-2011;Clade II)__AIT17670__GPCmut5 (opt1)
aggagagucccgcagucggcguccagcggcucugcuuguucgugugugugucguugcaggccuuauucaagcuuaccaugggccagaucaucaccuucuuccaggaggugccccacgucaucgaggaggugaugaacaucgugcugaucgcccucagccugcuggccauccucaaggggaucuacaacgucgcgaccugcggccuguucgggcugguguccuuccuccugcugugcggccgcagcugcuccacgaccuacaaggggguguacgagcuccagacccuggagcuggacauggccagccucaacaugaccaugccgcuguccugcacgaagaacaacagccaccacuacaucauggucggcaacgagaccggccuggagcucacccugaccaacacguccaucaucaaccacaaguucugcaaccugagcgacgcccacaagaagaaccucuacgaccacgcccugauguccaucaucagcaccuuccaccuguccauccccaacuucaaccaguacgaggccaugagcugcgacuucaacgggggcaagaucuccgugcaguacaaccucagccacaccuacgcgguggacgccgccaaccacugcgggaccaucgccaacggcguccugcagacguucaugcggauggcguggggcggguccuacaucgcccuggacagcggcugcggguccugggacugcaucaugaccagcuaccaguaccucaucauccagaacaccaccugggaggaccacugccaguucucccgccccagccccaucggcuaccuggggcugcucagccagcggacgcgcgacaucuacaucucccggcgccugcugggcaccuucaccuggacccucagcgacuccgagggcaacgagacgcccgggggcuacugccugacccgguggaugcugaucgaggccgagcucaagugcuucgggaacaccgccguggccaagugcaacgagaagcacgacgaggaguucugcgacaugcugcgccuguucgacuucaacaagcaggcgauccggcgccucaaggccccggcccagaugagcauccagcugaucaacaaggccgugaacgcccugaucaacgaccagcucaucaugaagaaccaccuccgggacaucaugugcauccccuacugcaacuacuccaaguacugguaccugaaccacaccgucacgggccgcaccagccugccccggugcuggcugguguccaacgggagcuaccugaacgagacccacuucuccgacgacaucgagcagcaggcggacaacaugaucaccgagcuccugcagaaggaguacaucgaccgccagggcaagacgccgcugggccugguggaccucuucgucuucagcaccuccuucuaccugaucagcaucuuccugcaccucgugaagauccccacccaccggcacaucaucgggaagcccugccccaagccgcaccgccugaaccacaugggcaucugcuccugcgggcuguacaagcaccccggcgugcccgucaaguggaagcggugaggacuagucccuguucccagagcccacuuuuuuuucuuuuuuugaaauaaaauagccugucuuucagaucucaaaggcucuuuucagagccaccaaaaaaaaaaaaaaaaaaaaaaaaaaaaaaaaaaaaaaaaaaaaaaaaaaaaaaaaaaaaaaaaagaauu

SEQ ID NO: 28249 - RNA, 1714 nt, Artificial Sequence
  mRNA product Design a-1 (hSL-A64-N5) comprising derived and/or modified sequence from LASV(LASV254-NIG-2011;Clade II)__AIT17674__GPCmut5 (opt1)
aggagagucccgcagucggcguccagcggcucugcuuguucgugugugugucguugcaggccuuauucaagcuuaccaugggccagaucaucaccuucuuccaggaggugccccacgucaucgaggaggugaugaacaucgugcugaucgcccucagccugcuggccauccucaaggggaucuacaacgucgcgaccugcggccuguucgggcugguguccuuccuccugcugugcggccgcagcugcuccacgaccuacaaggggguguacgagcuccagacccuggagcuggacaugaccaaccucaacaugacgaugccgcugagcugcaccaagaacaacucccaccacuacaucauggucggcaacgagaccggccuggagcucacccugacgaacaccagcaucaucaaccacaaguucugcaaccuguccgacgcccacaagaagaaccucuacaaccacgcccugaugagcaucaucuccaccuuccaccugagcauccccaacuucaaccaguacgaggccauguccugcgacuucaacgggggcaagaucagcgugcaguacaaccucucccacagcuacgccguggacgcggccaaccacugcgggaccaucgccaacggcguccugcagacguucaugcggauggccuggggcggguccuacaucgcgcuggacagcggcugcgggaacugggacugcaucaugaccuccuaccaguaccucaucauccagaacaccaccugggaggaccacugccaguucagccgccccucccccaucggcuaccuggggcugcucagccagcggacgcgcgacaucuacaucagccggcgccugcugggcaccuucaccuggacccucuccgacagcgagggcaacgagacgcccgggggcuacugccugacccgguggaugcugaucgaggccgagcucaagugcuucgggaacaccgccguggccaagugcaacgagaagcacgacgaggaguucugcgacaugcugcgccuguucgacuucaacaagcaggccauccggcgccucaagaccccggcgcaggccaacauccagcugaucaacaaggccgugaacgcccugaucaacgaccagcucaucaugaagaaccaccuccgggacaucaugugcauccccuacugcaacuacuccaaguacugguaccugaaccacacggucaccggcaagaccagccugccccgcugcuggcugguguccaacgggagcuaccugaacgagacccacuucuccgacgacaucgagcagcaggccgacaacaugaucacggagcuccugcagaaggaguacauggaccggcagggcaagaccccgcugggccugguggaccucuucgucuucagcaccuccuucuaccugaucagcaucuuccugcaccucgugaagauccccacccaccgccacgugaucgggaagcccugccccaagccgcaccggcugaaccacaugggcaucugcuccugcgggcuguacaagcaccccggcguccccgugaaguggaagcgcugaggacuagucccuguucccagagcccacuuuuuuuucuuuuuuugaaauaaaauagccugucuuucagaucucaaaggcucuuuucagagccaccaaaaaaaaaaaaaaaaaaaaaaaaaaaaaaaaaaaaaaaaaaaaaaaaaaaaaaaaaaaaaaaaagaauu

SEQ ID NO: 28250 - RNA, 1714 nt, Artificial Sequence
  mRNA product Design a-1 (hSL-A64-N5) comprising derived and/or modified sequence from LASV(Nig08-A19;Clade III)__ADU56618__GPCmut5 (opt1)
aggagagucccgcagucggcguccagcggcucugcuuguucgugugugugucguugcaggccuuauucaagcuuaccaugggccagaucgugaccuucuuccaggaggucccccacgugaucgaggaggugaugaacaucguccugaucgcccucagcauccuggccauccugaaggggcucuacaacaucgcgaccugcggccugaucgggcuggugacguuccuccugcuguccggccgcagcugcuccaugaccuacaaggggguguacgagcuccagacccuggagcugaacaugaacacccucaacaugacgaugccgcugagcugcaccaagaacaacucccaccacuacaucauggucggcaacgagaccggccuggagcucacccugacgaacaccagccugcuccaccacaaguucugcaaccuguccgacgcccacaagaagaaccuguacgaccacacccucaugagcaucaucuccaccuuccaccugagcauccccaacuucaaccaguacgaggccauguccugcgacuucaacgggggcaagaucacggugcaguacaaccugagccacuccuacgccaucgacgccgcgaaccacugcgggaccguggccaacggcguccuccagaccuucaugcggauggccuggggcgggagcuacaucgcccuggacuccggcugcgggaagugggacugcaucaugaccagcuaccaguaccugaucauccagaacacgaccugggaggaccacugccaguucucccgccccagccccaucggcuaccucgggcugcugucccagcggacccgcgacaucuacaucagccggcgccuccugggcaccuucacguggacccugagcgacuccgagggcaacgagacccccgggggcuacugccucacccgguggaugcugaucgaggcggagcugaagugcuucgggaacacggccguggccaagugcaacgagaagcacgacgaggaguucugcgacaugcuccgccuguucgacuucaacaagcaggccauccggcgccugaaggccccggcgcagaugagcauccagcucaucaacaaggccgugaacgcccugaucaacgaccagcugaucaugaagaaccaccuccgggacaucaugugcauccccuacugcaacuacuccaaguacugguaccugaaccacaccagcaccggccgcaccucccugccccggugcuggcucgucagcaacggguccuaccugaacgagacgcacuucagcgacgacaucgagcagcaggccgacaacaugaucaccgagaugcugcagaaggaguaccuggaccgccagggcaagaccccgcucggccugguggaccuguucguguucuccaccagcuucuaccucaucuccaucuuccugcaccuggucaagauccccacgcaccggcacaucguggggaagcccugccccaagccgcaccgccucaaccacaugggcaucugcagcugcgggcuguacaagcagcccggcgugcccguccgguggaagcgcugaggacuagucccuguucccagagcccacuuuuuuuucuuuuuuugaaauaaaauagccugucuuucagaucucaaaggcucuuuucagagccaccaaaaaaaaaaaaaaaaaaaaaaaaaaaaaaaaaaaaaaaaaaaaaaaaaaaaaaaaaaaaaaaaagaauu

SEQ ID NO: 28251 - RNA, 1717 nt, Artificial Sequence
  mRNA product Design a-1 (hSL-A64-N5) comprising derived and/or modified sequence from LASV(G1180-SLE-2010;Clade IV)__AIT17168__GPCmut5 (opt1)
aggagagucccgcagucggcguccagcggcucugcuuguucgugugugugucguugcaggccuuauucaagcuuaccaugggccagaucgugaccuucuuccaggaggucccccacgugaucgaggaggugaugaacaucguccugaucgcccucagcauccuggccgugcugaaggggcucuacaacuucgcgaccugcggccugguggggcugcucacguuccugcugcucugcggccgcuccugcaccgccagccgguacaagggggucuacgagcugcagacccuggagcucaacauggagacccugaacaugacgaugccgcuguccugcaccaagaacaacagccaccacuacaucauggugggcaacgagaccggccucgagcugacccugacgaacaccuccaucaucaaccacaaguucugcaaccucagcgacgcccacaagaagaaccuguacgaccacgcccugauguccaucaucagcaccuuccaccucuccauccccaacuucaaccaguacgaggccaugagcugcgacuucaacgggggcaagaucuccgugcaguacaaccugagccacuccuacgcgggggacgccgccaaccacugcggcaccgucgccaacggggugcugcagacguucaugcgcauggcguggggcggcagcuacaucgcccucgacuccgggugcggcagcugggacugcaucaugaccuccuaccaguaccugaucauccagaacaccaccugggaggaccacugccaguucagccggcccucccccaucggguaccugggccuccugagccagcgcacgcgggacaucuacaucagccgccggcugcucggcaccuucaccuggacccuguccgacagcgaggggaaggacacgccgggcggguacugccugacccgcuggaugcucaucgaggccgagcugaagugcuucggcaacaccgccguggccaagugcaacgagaagcacgacgaggaguucugcgacaugcugcggcuguucgacuucaacaagcaggcgauccagcgccugaaggcccccgcccagauguccauccagcugaucaacaaggccgucaacgcccucaucaacgaccagcugaucaugaagaaccaccuccgggacaucaugugcauccccuacugcaacuacagcaaguacugguaccucaaccacaccacgaccgggaagaccucccugcccaagugcuggcuggugagcaacggcuccuaccucaacgagacccacuucagcgacgacaucgagcagcaggcggacaacaugaucacggagaugcugcagaaggaguacauggagcgccagggcaagaccccgcuggggcugguggaccucuucgucuucuccaccagcuucuaccugaucuccaucuuccugcaccucgugaagauccccacccaccggcacaucgugggcaagagcugccccaagccccaccgccugaaccacauggggaucugcuccugcggccuguacaagcagccggggguccccgugaaguggaagcggugaggacuagucccuguucccagagcccacuuuuuuuucuuuuuuugaaauaaaauagccugucuuucagaucucaaaggcucuuuucagagccaccaaaaaaaaaaaaaaaaaaaaaaaaaaaaaaaaaaaaaaaaaaaaaaaaaaaaaaaaaaaaaaaaagaauu

SEQ ID NO: 28252 - RNA, 1717 nt, Artificial Sequence
  mRNA product Design a-1 (hSL-A64-N5) comprising derived and/or modified sequence from LASV(G1442-SLE-2011;Clade IV)__AIT17180__GPCmut5 (opt1)
aggagagucccgcagucggcguccagcggcucugcuuguucgugugugugucguugcaggccuuauucaagcuuaccaugggccagaucgugaccuucuuccaggaggucccccacgugaucgaggaggugaugaacaucguccugaucgcccucagcauccuggccgugcugaaggggcucuacaacguggcgaccugcggccugaucgggcuggucacguuccuccugcugugcggccgcuccugcaccaccacccucuacaaggggguguacgagcugcagacgcuggagcucaacauggagacccugaacaugaccaugccgcugagcugcaccaagaacaacucccaccacuacauccgggugggcaacgagacgggccucgagcugacccugaccaacaccagcaucaucaaccacaaguucugcaaccucuccgacgcccacaagaagaaccuguacgaccacgcccugaugagcaucaucuccacguuccaccucagcauccccaacuucaaccaguacgaggccauguccugcgacuucaacgggggcaagaucagcguccaguacaaccugucccacagcuacgccggggacgcggccaaccacugcggcaccguggccaacggggugcugcagaccuucaugcgcauggccuggggcggcuccuacaucgcgcucgacagcgggugcggcaacugggacugcaucaugaccuccuaccaguaccugaucauccagaacacgaccugggacgaccacugccaguucagccggcccucccccaucggguaccugggccuccugagccagcgcacccgggacgucuacaucucccgccggcugcucggcaccuucacguggacccugagcgacagcgaggggaaggacaccccgggcggguacugccugacccgcuggaugcucaucgaggccgagcugaagugcuucggcaacacggccguggccaagugcaacgagaagcacgacgaggaguucugcgacaugcugcggcuguucgacuucaacaagcaggccauccagcgccugaaggcgcccgcccagauguccauccagcugaucaacaaggccgugaacgcccucaucaacgaccagcugaucaugaagaaccaccuccgggacaucaugugcauccccuacugcaacuacagcaaguacugguaccucaacaacaccgccaccgggaagaccucccugcccaagugcuggcugaucagcaacggcuccuaccucaacgagacgcacuucagcgacgacaucgagcaggaggcggacaacaugaucaccgagaugcugcagaaggaguacauggagcgccagggcaagaccccgcuggggcuggucgaccucuucguguucuccaccagcuucuaccugaucuccaucuuccugcaccucgugaagauccccacgcaccggcacaucgucggcaagagcugccccaagccccaccgccugaaccacauggggaucugcuccugcggccuguacaagcagccgggggugcccgugcgguggaagcgcugaggacuagucccuguucccagagcccacuuuuuuuucuuuuuuugaaauaaaauagccugucuuucagaucucaaaggcucuuuucagagccaccaaaaaaaaaaaaaaaaaaaaaaaaaaaaaaaaaaaaaaaaaaaaaaaaaaaaaaaaaaaaaaaaagaauu

SEQ ID NO: 28253 - RNA, 1717 nt, Artificial Sequence
  mRNA product Design a-1 (hSL-A64-N5) comprising derived and/or modified sequence from LASV(G3010-SLE-2013;Clade IV)__AIT17344__GPCmut5 (opt1)
aggagagucccgcagucggcguccagcggcucugcuuguucgugugugugucguugcaggccuuauucaagcuuaccaugggccagaucgugaccuucuuccaggaggucccccacgugaucgaggaggugaugaacaucguccugaucgcccucagcauccuggccgugcugaaggggcucuacaacuucgcgaccugcggccugguggggcuggucacguuccuccugcugugcggccgcuccugcaccaccagccucuacaaggggguguacgagcugcagacccuggagcucaacauggagacgcugaacaugaccaugccgcuguccugcaccaagaacaacagccaccacuacaucauggugggcaacgagaccggccucgagcugacgcugaccaacaccuccaucaucaaccacaaguucugcaaccucagcgacgcccacaagaagaaccuguacaaccacgcccugauguccaucaucagcaccuuccaccucuccauccccaacuucaaccaguacgaggccaugagcugcgacuucaacgggggcaagaucuccguccaguacaaccugagccacuccuacgccggggacgcggccagccacugcggcacgguggccaacggggugcugcagaccuucaugcggauggccuggggcggcuccuacaucgcgcucgacagcgggugcggcaagugggacugcaucaugaccuccuaccaguaccugaucauccagaacaccacgugggaggaccacugccaguucagccgccccucccccaucggguaccugggccuccugagccagcggacccgcgacaucuacaucagccggcgccugcucggcaccuucaccuggacgcuguccgacagcgaggggaaggacaccccgggcggguacugccugacccgguggaugcucaucgaggccgagcugaagugcuucggcaacaccgccgucgccaagugcaacgagaagcacgacgaggaguucugcgacaugcugcgccucuucgacuucaacaagcaggccauccagcggcugaagacgcccgcgcagauguccauccagcugaucaacaaggccgugaacgcccucaucaacgaccagcugaucaugaagaaccaccuccgcgacaucaugugcauccccuacugcaacuacagcaaguacugguaccugaaccacaccaccaccgggaagacgucccugcccaagugcuggcuggugagcaacggcuccuaccucaacgagacccacuucagcgacgacaucgagcagcaggccgacaacaugaucaccgagaugcugcagaaggaguacauggagcggcagggcaagaccccgcuggggcuggucgaccucuucguguucuccacgagcuucuaccugaucuccaucuuccugcaccucgugaagauccccacccaccgccacaucgucggcaagagcugccccaagccccaccggcugaaccacauggggaucugcuccugcggccuguacaagcagccgggggugcccgugcgcuggaagcggugaggacuagucccuguucccagagcccacuuuuuuuucuuuuuuugaaauaaaauagccugucuuucagaucucaaaggcucuuuucagagccaccaaaaaaaaaaaaaaaaaaaaaaaaaaaaaaaaaaaaaaaaaaaaaaaaaaaaaaaaaaaaaaaaagaauu

SEQ ID NO: 28254 - RNA, 1717 nt, Artificial Sequence
  mRNA product Design a-1 (hSL-A64-N5) comprising derived and/or modified sequence from LASV(G502-SLE-2009;Clade IV)__AIT17126__GPCmut5 (opt1)
aggagagucccgcagucggcguccagcggcucugcuuguucgugugugugucguugcaggccuuauucaagcuuaccaugggccagaucgugaccuucuuccaggaggucccccacgugaucgaggaggugaugaacaucguccugaucgcccucagcauccuggccgugcugaaggggcucuacaacuucgcgaccugcggccugguggggcugcucacguuccugcugcucugcggccgcuccugcaccaccgggcuguacaagggcgucuacgagcugcagacccucgagcugaacauggagacgcugaacaugaccaugccgcucagcugcaccaagaacaacucccaccacuacaucauggugggcaacgagaccgggcuggagcugacgcucaccaacaccagcaucaucaaccacaaguucugcaaccuguccgacgcccacaagaagaaccuguacgaccacgcccucaugagcaucaucuccaccuuccaccugagcauccccaacuucaaccaguacgaggccauguccugcgacuucaacggcgggaagaucagcgugcaguacaaccugucccacagcuacgccggcgacgcggccgaccacugcgggacggucgccaacggcgugcuccagaccuucaugcggauggccuggggcggguccuacaucgcgcuggacagcggcugcgggcgcugggacugcaucaugaccuccuaccaguaccugaucauccagaacaccacgugggaggaccacugccaguucagccggcccucccccaucggcuaccucggccugcugagccagcgcacccgggacaucuacaucucccgccggcuccuggggaccuucaccuggacgcugagcgacagcgagggcaaggacacccccgggggcuacugccucacccgcuggaugcugaucgaggccgagcugaagugcuucgggaacaccgccguggccaagugcaacgagaagcacgacgaggaguucugcgacaugcuccggcuguucgacuucaacaagcaggccauccagcgccugaaggcgccggcccagauguccauccagcucaucaacaaggccgucaacgcccugaucaacgaccagcuggugaugaagaaccaccuccgggacaucaugugcauccccuacugcaacuacagccgcuacugguaccugaaccacacgaccaccggccggaccucccugcccaagugcuggcucgugagcaacggcuccuaccugaacgagacgcacuucagcgacgacaucgagcagcaggccgacaacaugaucaccgagaugcugcagaaggaguacauggagcgccaggggaagaccccgcugggccucgucgaccuguucguguucuccaccagcuucuaccugaucuccaucuuccuccaccuggugaagauccccacgcaccggcacaucgucggcaagagcugccccaagccccaccgccugaaccacauggggaucugcuccugcgggcucuacaagcagccgggcgugcccgugaaguggaagcggugaggacuagucccuguucccagagcccacuuuuuuuucuuuuuuugaaauaaaauagccugucuuucagaucucaaaggcucuuuucagagccaccaaaaaaaaaaaaaaaaaaaaaaaaaaaaaaaaaaaaaaaaaaaaaaaaaaaaaaaaaaaaaaaaagaauu

SEQ ID NO: 28255 - RNA, 1717 nt, Artificial Sequence
  mRNA product Design a-1 (hSL-A64-N5) comprising derived and/or modified sequence from LASV(G733-SLE-2010;Clade IV)__AIT17154__GPCmut5 (opt1)
aggagagucccgcagucggcguccagcggcucugcuuguucgugugugugucguugcaggccuuauucaagcuuaccaugggccagaucgugaccuucuuccaggaggucccccacgugaucgaggaggugaugaacaucguccugaucgcccucagcauccuggccgugcugaaggggcucuacaacuucgcgaccugcggcaucguggggcuggucuccuuccugcuccugugcggccgcagcugcacgaccucccuguacaaggggguguacgagcuccagacccuggagcugaacauggagacccucaacaugacgaugccgcugagcugcaccaagaacaacucccaccacuacaucauggugggcaacgagaccggccuggagcucacccugacgaacaccagcaucaucaaccacaaguucugcaaccuguccgacgcccacaagaagaaccucuacgaccacgcccugaugagcaucaucuccaccuuccaccugagcauccccaacuucaaccaguacgaggccauguccugcgacuucaacgggggcaagaucagcguccaguacaaccucucccacagcuacgccggggacgcggccaaccacugcggcaccaucgccaacggggugcugcagacguucaugcggauggccuggggcggcuccuacaucgcgcuggacagcgggugcgaccgcugggacugcaucaugaccuccuaccaguaccucaucauccagaacaccaccugggaggaccacugccaguucagccggcccucccccaucggcuaccuggggcugcucagccagcgcacgcgggacaucuacaucagccgccggcugcugggcaccuucaccuggacccucuccgacagcgagggcaaggacacgcccgggggcuacugccugacccgcuggaugcugaucgaggccgagcucaagugcuucgggaacaccgccguggccaagugcaacgagaagcacgacgaggaguucugcgacaugcugcggcuguucgacuucaacaagcaggccauccagcgccucaaggcgccggcccagauguccauccagcugaucaacaaggccgucaacgcccugaucaacgaccagcucaucaugaagaaccaccuccgggacaucaugugcauccccuacugcaacuacagcaaguacugguaccugaaccacaccacgaccggcaagaccucccugcccaagugcuggcuggugagcaacggguccuaccugaacgagacccacuucagcgacgacaucgagcagcaggccgacaacaugaucacggagaugcuccagaaggaguacauggagcgccagggcaagaccccgcugggccugguggaccuguucgucuucuccaccagcuucuaccucaucuccaucuuccugcaccuggugaagauccccacccaccggcacguggucggcaagagcugccccaagccccaccgccucaaccacauggggaucugcuccugcgggcuguacggccagccgggggugcccgugaaguggaagcggugaggacuagucccuguucccagagcccacuuuuuuuucuuuuuuugaaauaaaauagccugucuuucagaucucaaaggcucuuuucagagccaccaaaaaaaaaaaaaaaaaaaaaaaaaaaaaaaaaaaaaaaaaaaaaaaaaaaaaaaaaaaaaaaaagaauu

SEQ ID NO: 28256 - RNA, 1717 nt, Artificial Sequence
  mRNA product Design a-1 (hSL-A64-N5) comprising derived and/or modified sequence from MOPV/LASV reassortant(IGS-1;Clade IV)__AFY05576__GPCmut5 (opt1)
aggagagucccgcagucggcguccagcggcucugcuuguucgugugugugucguugcaggccuuauucaagcuuaccaugggccagaucgugaccuucuuccaggaggucccccacgugaucgaggaggugaugaacaucguccugaucgcccucagcgugcuggccgugcugaaggggcucuacaacuucgcgaccugcggccuggucgggcuggugacguuccuccugcugugcggccgcuccugcaccaccagccucuacaaggggguguacgagcugcagacccuggagcucaacauggagacgcugaacaugaccaugccgcuguccugcaccaagaacaacagccaccacuacaucauggucggcaacgagaccggccucgagcugacgcugaccaacaccuccaucaucaaccacaaguucugcaaccucagcgacgcccacaagaagaaccuguacgaccacgcccugauguccaucaucagcaccuuccaccucuccauccccaacuucaaccaguacgaggccaugagcugcgacuucaacgggggcaagaucuccgugcaguacaaccugagccacuccuacgccggggacgcggccaaccacugcggcacgguggccaacgggguccugcagaccuucaugcggauggccuggggcggcagcuacaucgcgcucgacuccgggugcggcaacugggacugcaucaugaccagcuaccaguaccugaucauccagaacaccacgugggaggaccacugccaguucucccgccccagccccaucggguaccugggccuccugucccagcggacccgcgacaucuacaucagccggcgccugcucggcaccuucaccuggacgcugagcgacuccgagggggaggacaccccgggcggguacugccugacccgguggaugcucaucgaggccgagcugaagugcuucggcaacaccgccguggccaagugcaacgagaagcacgacgaggaguucugcgacaugcugcgccucuucgacuucaacaagcaggccauccagcggcugaaggcgcccgcccagaugagcauccagcugaucaacaaggccgugaacgcccucaucaacgaccagcugaucaugaagaaccaccuccgcgacaucaugugcauccccuacugcaacuacuccaaguacugguaccugaaccacacgaccaccgggcggaccagccugcccaagugcuggcuggucuccaacggcagcuaccucaacgagacgcacuucuccgacgacaucgagcagcaggccgacaacaugaucaccgagaugcugcagaaggaguacauggagcgccagggcaagaccccgcuggggcugguggaccucuucguguucagcaccuccuucuaccugaucagcaucuuccugcaccucgucaagauccccacgcaccggcacaucgugggcaaguccugccccaagccccaccgccugaaccacauggggaucugcagcugcggccuguacaagcagccgggggugcccgucaaguggaagcggugaggacuagucccuguucccagagcccacuuuuuuuucuuuuuuugaaauaaaauagccugucuuucagaucucaaaggcucuuuucagagccaccaaaaaaaaaaaaaaaaaaaaaaaaaaaaaaaaaaaaaaaaaaaaaaaaaaaaaaaaaaaaaaaaagaauu

SEQ ID NO: 28257 - RNA, 1717 nt, Artificial Sequence
  mRNA product Design a-1 (hSL-A64-N5) comprising derived and/or modified sequence from LASV(LM765-SLE-2012;Clade IV)__AIT17814__GPCmut5 (opt1)
aggagagucccgcagucggcguccagcggcucugcuuguucgugugugugucguugcaggccuuauucaagcuuaccaugggccagaucgugaccuucuuccaggaggucccccacgugaucgaggaggugaugaacaucguccugaucgcccucagcauccuggccgugcugaaggggcucuacaacuucgcgaccugcggccugguggggcuggucacguuccuccugcugugcggccgcuccugcaccaccagccucuacaaggggguguacgagcugcagacccuggagcucaacauggagacgcugaacaugaccaugccgcuguccugcaccaagaacaacagccaccacuacaucauggugggcaacgagaccggccucgagcugacgcugaccaacaccuccaucaucgaccacaaguucugcaaccucagcgacgcccaccggaagaaccuguacgaccacgcccugauguccaucaucagcaccuuccaccucuccauccccaacuucaaccaguacgaggccaugagcugcgacuucaacgggggcaagaucuccguccaguacaaccugagccacuccuacgccaaggacgcggccgaccacugcgggacgguggccaacggcgugcugcagaccuucaugcgcauggccuggggcgggagcuacaucgcgcucgacuccggcugcgggcggugggacugcaucaugaccagcuaccaguaccugaucauccagaacaccacgugggaggaccacugccaguucucccgccccagccccaucggcuaccuggggcuccugucccagcggacccgcgacaucuacaucagccggcgccugcucggcaccuucaccuggacgcugagcgacuccgagggcaaggacacccccgggggcuacugccugacccgguggaugcucaucgaggccgagcugaagugcuucgggaacaccgccgucgccaagugcaacgagaagcacgacgaggaguucugcgacaugcugcgccucuucgacuucaacaagcaggccauccagcggcugaaggcgccggcccagaugagcauccagcugaucaacaaggccgugaacgcccucaucaacgaccagcugaucaugaagaaccaccuccgcgacaucaugugcauccccuacugcaacuacuccaaguacugguaccugaaccacacgaccaccggcaagaccagccugcccaagugcuggcugguguccaacgggagcuaccucaacgagacgcacuucuccgacgacaucgagcagcaggccgacaacaugaucaccgagaugcugcagaaggaguacauggagcggcagggcaagaccccgcugggccuggucgaccucuucguguucagcaccuccuucuaccugaucagcaucuuccugcaccucgugaagauccccacgcaccgccacaucgucgggaagcccugccccaagccgcaccggcugaaccacaugggcaucugcuccugcgggcuguacaagcagcccggcgugcccgugaaguggaagcgcugaggacuagucccuguucccagagcccacuuuuuuuucuuuuuuugaaauaaaauagccugucuuucagaucucaaaggcucuuuucagagccaccaaaaaaaaaaaaaaaaaaaaaaaaaaaaaaaaaaaaaaaaaaaaaaaaaaaaaaaaaaaaaaaaagaauu

SEQ ID NO: 28258 - RNA, 1717 nt, Artificial Sequence
  mRNA product Design a-1 (hSL-A64-N5) comprising derived and/or modified sequence from LASV(LM776-SLE-2012;Clade IV)__AIT17824__GPCmut5 (opt1)
aggagagucccgcagucggcguccagcggcucugcuuguucgugugugugucguugcaggccuuauucaagcuuaccaugggccagaucgugaccuucuuccaggaggucccccacgugaucgaggaggugaugaacaucguccugaucgcccucagcauccuggccgugcugaaggggcucuacaacuucgcgaccugcggccugguggggcuggucacguuccuccugcugugcggccgcuccugcaccaccagcguguacaaggggguguacgagcuccagacccuggagcugaacauggagacgcucaacaugaccaugccgcuguccugcaccaagaacaacagccaccacuacaucauggucggcaacgagaccggccuggagcucacgcugaccaacaccuccaucaucaaccacaaguucugcaaccugagcgacgcccacaagaagaaccucuacgaccacgcccugauguccaucaucagcaccuuccaccuguccauccccaacuucaaccaguacgaggccaugagcugcgacuucaacgggggcaagaucuccgugcaguacaaccucagccacuccuacgccggggacgcggccaaccacugcggcacgguggccaacgggguccugcagaccuucaugcggauggccuggggcggcagcuacaucgcgcuggacuccgggugcggcaagugggacugcaucaugaccagcuaccaguaccucaucauccagaacaccacgugggaggaccacugccaguucucccgccccagccccaucggguaccugggccugcucucccagcggacccgcgacaucuacaucagccggcgccugcugggcaccuucaccuggacgcucagcgacuccgaggggaaggacaccccgggcggguacugccugacccgguggaugcugaucgaggccgagcucaagugcuucggcaacaccgccguggccaagugcaacgagaagcacgacgaggaguucugcgacaugcugcgccuguucgacuucaacaagcaggccauccagcggcucaaggcgcccgcccagaugagcauccagcugaucaacaaggccgugaacgcccugaucaacgaccagcucaucaugaagaaccaccuccgcgacaucaugugcauccccuacugcaacuacuccaaguacugguaccugaaccacacgaccaccgggaagaccagccugcccaagugcuggcuggucuccaacggcagcuaccugaacgagacgcacuucuccgacgacaucgagcagcaggccgacaacaugaucaccgagaugcuccagaaggaguacauggagcggcagggcaagaccccgcuggggcugguggaccuguucguguucagcaccuccuucuaccucaucagcaucuuccugcaccuggucaagauccccacgcaccgccacaucgugggcaaguccugccccaagccccaccggcucaaccacauggggaucugcagcugcggccuguacaagcagccgggggugcccguccgcuggaagcggugaggacuagucccuguucccagagcccacuuuuuuuucuuuuuuugaaauaaaauagccugucuuucagaucucaaaggcucuuuucagagccaccaaaaaaaaaaaaaaaaaaaaaaaaaaaaaaaaaaaaaaaaaaaaaaaaaaaaaaaaaaaaaaaaagaauu

SEQ ID NO: 28259 - RNA, 1717 nt, Artificial Sequence
  mRNA product Design a-1 (hSL-A64-N5) comprising derived and/or modified sequence from LASV(Mad39;Clade IV)__ANH09722__GPCmut5 (opt1)
aggagagucccgcagucggcguccagcggcucugcuuguucgugugugugucguugcaggccuuauucaagcuuaccaugggccagaucgugaccuucuuccaggaggucccccacgugaucgaggaggugaugaacaucguccugaucgcccucagcauccuggccgugcugaaggggcucuacaacguggcgaccugcggccugaucgggcuggucacguuccuccugcugugcggccgcuccugcaccaccacccucuacaaggggguguacgagcugcaggcccuggagcucaacauggagacgcugaacaugaccaugccgcugagcugcaccaagaacaacucccaccacuacauccgggugggcaacgagaccggccucgagcugacgcugaccaacaccagccucaucaaccacaaguucugcaaccuguccgacgcccacaagaagaaccuguacgaccacgcccucaugagcaucaucuccaccuuccaccugagcauccccaacuucaaccaguacgaggccauguccugcgacuucaacgacgggaagaucagcguccaguacaaccugucccacacguacgcgggcgacaccgccaaccacugcgggaccguggccaacggcgugcuccagaccuucaugcgcauggccuggggcgggagcuacaucgcgcuggacuccggcugcgggggcugggacugcaucaugacgagcuaccaguaccugaucauccagaacaccaccugggaggaccacugccaguucucccggcccagccccaucggguaccucggccugcugucccagcgcacccgggacaucuacaucagccgccggcuccugggcacguucaccuggacccuguccgacagcgaggggaaggacaccccgggcggguacugccucacgcgcuggaugcugaucgaggccgagcugaagugcuucggcaacaccgccgucgccaagugcaacgagaagcacgacgaggaguucugcgacaugcuccggcuguucgacuucaacaagcaggccauccagcgccugaaggcgcccgcccagaugagcauccagcucaucaacaaggccgugaacgcccugaucaacgaccagcugaucaugaagaaccaccuccgggacaucaugugcauccccuacugcaacuacuccaaguacugguaccugaaccacaccgugaccgggaagacgagccugcccaagugcuggcucgucuccaacggcagcuaccugaacgagacccacuucuccgacgacaucgagcagcaggccgacaacaugaucaccgagaugcugcagaaggaguacauggagcgccagggcaagaccccgcuggggcucguggaccuguucguguucagcacguccuucuaccugaucagcaucuuccuccaccuggucaagauccccacccaccggcacguggugggcaagcccugccccaagccgcaccgccugaaccacauggggaucugcuccugcggcuucuacaagcagcccgggguccccgugcgguggaagcgcugaggacuagucccuguucccagagcccacuuuuuuuucuuuuuuugaaauaaaauagccugucuuucagaucucaaaggcucuuuucagagccaccaaaaaaaaaaaaaaaaaaaaaaaaaaaaaaaaaaaaaaaaaaaaaaaaaaaaaaaaaaaaaaaaagaauu

SEQ ID NO: 28260 - RNA, 1717 nt, Artificial Sequence
  mRNA product Design a-1 (hSL-A64-N5) comprising derived and/or modified sequence from LASV(Z0947-SLE-2011;Clade IV)__AIT17840__GPCmut5 (opt1)
aggagagucccgcagucggcguccagcggcucugcuuguucgugugugugucguugcaggccuuauucaagcuuaccaugggccagaucgugaccuucuuccaggaggucccccacgugaucgaggaggugaugaacaucguccugaucgcccucagcauccuggccgugcugaaggggcucuacaacuucgcgaccugcggccugguggggcuggucacguuccuccugcugugcggccgcuccugcaccaucagccucuacaaggggguguacgagcugcagacccuggagcucaacauggagacccugaacaugacgaugccgcuguccugcaccaagaacaacagccaccacuacaucauggugggcaacgagaccggccucgagcugacccugacgaacaccuccaucaucaaccacaaguucugcaaccucagcgacgcccacaagaagaaccuguacgaccacgcccugauguccaucaucagcaccuuccaccucuccauccccaacuucaaccaguacgaggccaugagcugcgacuucaacgggggcaagaucuccguccaguacaaccugagccacuccuacgccggggacgcggccaaccacugcggcaccguggccaacggggugcugcagacguucaugcggauggccuggggcggcagcuacaucgcgcucgacuccgggugcgaccgcugggacugcaucaugaccagcuaccaguaccugaucauccagaacaccaccugggaggaccacugccaguucucccggcccagccccaucggcuaccuggggcuccugucccagcgcacgcgggacaucuacaucagccgccggcugcucggcaccuucaccuggacccugagcgacuccgagggcaaggacacgcccgggggcuacugccugacccgcuggaugcucaucgaggccgagcugaagugcuucgggaacaccgccgucgccaagugcaacgagaagcacgacgaggaguucugcgacaugcugcggcuguucgacuucaacaagcaggccauccagcgccugaaggcgccggcccagaugagcauccagcugaucaacaaggccgugaacgcccucaucaacgaccagcugaucaugaagaaccaccuccgggacaucaugugcauccccuacugcaacuacuccaaguacugguaccucaaccacaccacgaccggcaagaccagccugcccaagugcuggcugguguccaacgggagcuaccucaacgagacccacuucuccgacgacaucgagcagcaggccgacaacaugaucacggagaugcugcagaaggaguacauggagcgccagggcaagaccccgcugggccuggucgaccucuucguguucagcaccuccuucuaccugaucagcaucuuccugcaccucgugaagauccccacccaccggcacaucgucgggaagcccugccccaagccgcaccgccugaaccacaugggcaucugcuccugcgggcuguacaagcagcccggcgugcccgugaaguggaagcggugaggacuagucccuguucccagagcccacuuuuuuuucuuuuuuugaaauaaaauagccugucuuucagaucucaaaggcucuuuucagagccaccaaaaaaaaaaaaaaaaaaaaaaaaaaaaaaaaaaaaaaaaaaaaaaaaaaaaaaaaaaaaaaaaagaauu

SEQ ID NO: 28261 - RNA, 1717 nt, Artificial Sequence
  mRNA product Design a-1 (hSL-A64-N5) comprising derived and/or modified sequence from LASV(Josiah;Clade IV)__NP_694870__GPCmut5 (opt4)
aggagagucccgcagucggcguccagcggcucugcuuguucgugugugugucguugcaggccuuauucaagcuuaccaugggccagaucgugaccuucuuccaggaggugccccacgugaucgaggaggugaugaacaucgugcugaucgcccugagcgugcuggccgugcugaagggccuguacaacuucgccaccugcggccuggugggccuggugaccuuccugcugcugugcggcagaagcugcaccaccagccuguacaagggcguguacgagcugcagacccuggagcugaacauggagacccugaacaugaccaugccccugagcugcaccaagaacaacagccaccacuacaucauggugggcaacgagaccggccuggagcugacccugaccaacaccagcaucaucaaccacaaguucugcaaccugagcgacgcccacaagaagaaccuguacgaccacgcccugaugagcaucaucagcaccuuccaccugagcauccccaacuucaaccaguacgaggccaugagcugcgacuucaacggcggcaagaucagcgugcaguacaaccugagccacagcuacgccggcgacgccgccaaccacugcggcaccguggccaacggcgugcugcagaccuucaugagaauggccuggggcggcagcuacaucgcccuggacagcggcugcggcaacugggacugcaucaugaccagcuaccaguaccugaucauccagaacaccaccugggaggaccacugccaguucagcagacccagccccaucggcuaccugggccugcugagccagagaaccagagacaucuacaucagcagaagacugcugggcaccuucaccuggacccugagcgacagcgagggcaaggacacccccggcggcuacugccugaccagauggaugcugaucgaggccgagcugaagugcuucggcaacaccgccguggccaagugcaacgagaagcacgacgaggaguucugcgacaugcugagacuguucgacuucaacaagcaggccauccagagacugaaggcccccgcccagaugagcauccagcugaucaacaaggccgugaacgcccugaucaacgaccagcugaucaugaagaaccaccugagagacaucaugugcauccccuacugcaacuacagcaaguacugguaccugaaccacaccaccaccggcagaaccagccugcccaagugcuggcuggugagcaacggcagcuaccugaacgagacccacuucagcgacgacaucgagcagcaggccgacaacaugaucaccgagaugcugcagaaggaguacauggagagacagggcaagaccccccugggccugguggaccuguucguguucagcaccagcuucuaccugaucagcaucuuccugcaccuggugaagauccccacccacagacacaucgugggcaagagcugccccaagccccacagacugaaccacaugggcaucugcagcugcggccuguacaagcagcccggcgugcccgugaaguggaagagaugaggacuagucccuguucccagagcccacuuuuuuuucuuuuuuugaaauaaaauagccugucuuucagaucucaaaggcucuuuucagagccaccaaaaaaaaaaaaaaaaaaaaaaaaaaaaaaaaaaaaaaaaaaaaaaaaaaaaaaaaaaaaaaaaagaauu

SEQ ID NO: 28262 - RNA, 1714 nt, Artificial Sequence
  mRNA product Design a-1 (hSL-A64-N5) comprising derived and/or modified sequence from LASV(LP;Clade I)__AAF86701__GPCmut5 (opt4)
aggagagucccgcagucggcguccagcggcucugcuuguucgugugugugucguugcaggccuuauucaagcuuaccaugggccagaucaucaccuucuuccaggaggugccccacgugaucgaggaggugaugaacaucgugcugaucgcccugagccugcuggccauccugaagggccuguacaacaucgccaccugcggcaucaucggccugguggccuuccuguuccugugcggcaagagcugcagccugacccugaagggcggcuacgagcugcagacccuggagcugaacauggagacccugaacaugaccaugccccugagcugcaccaagaacagcagccaccacuacaucagagugggcaacgagaccggccuggagcugacccugaccaacaccagcaucaucaaccacaaguucugcaaccugagcgacgcccacaagaagaaccuguacgaccacgcccugaugagcaucaucagcaccuuccaccugagcauccccaacuucaaccaguacgaggccaugagcugcgacuucaacggcggcaagaucagcgugcaguacaaccugagccacagcuacgccggcgacgccgccgagcacugcggcaccguggccaacggcgugcugcagaccuucaugagaauggccuggggcggcagauacaucgcccuggacagcggcugcggcaacugggacugcaucaugaccagcuaccaguaccugaucauccagaacaccaccugggaggaccacugccaguucagcagacccagccccaucggcuaccugggccugcugagccagagaaccagagacaucuacaucagcagaagacugcugggcaccuucaccuggacccugagcgacagcgagggcaacgagacccccggcggcuacugccugaccagauggaugcugaucgaggccgagcugaagugcuucggcaacaccgccguggccaagugcaacgagaagcacgacgaggaguucugcgacaugcugagacuguucgacuucaacaagcaggccaucagaagacugaaggcccccgcccagaugagcauccagcugaucaacaaggccgugaacgcccugaucaacgaccagcugaucaugaagaaccaccugagagacaucaugugcauccccuacugcaacuacagcaaguacugguaccugaaccacaccagcagcggcagaaccagccugcccaagugcuggcugaucagcaacggcagcuaccugaacgagacccaguucagcgacgacaucgagcagcaggccgacaacaugaucaccgagaugcugcagaaggaguacaucgagagacagggcaagaccccccugggccugguggacaucuucaucuucagcaccagcuucuaccugaucagcaucuuccugcaccugaucaagauccccacccacagacacaucgugggcaagcccugccccaagccccacagacugaaccacaugggcgugugcagcugcggccuguacaagcaccccggcgugcccaccaaguggaagagaugaggacuagucccuguucccagagcccacuuuuuuuucuuuuuuugaaauaaaauagccugucuuucagaucucaaaggcucuuuucagagccaccaaaaaaaaaaaaaaaaaaaaaaaaaaaaaaaaaaaaaaaaaaaaaaaaaaaaaaaaaaaaaaaaagaauu

SEQ ID NO: 28263 - RNA, 1714 nt, Artificial Sequence
  mRNA product Design a-1 (hSL-A64-N5) comprising derived and/or modified sequence from LASV(803213;Clade II)__AAF86703__GPCmut5 (opt4)
aggagagucccgcagucggcguccagcggcucugcuuguucgugugugugucguugcaggccuuauucaagcuuaccaugggccagaucaucaccuucuuccaggaggugccccacgugaucgaggaggugaugaacaucgugcugaucgcccugagccugcuggccauccugaagggcaucuacaacguggccaccugcggccuguucggccugaucagcuuccugcugcugugcggcagaagcugcagcgugaccuacaagggcguguacgagcugcagacccuggagcugaacauggccaaccugaacaugaccaugccccugagcugcaccaagaacaacagccaccacuacaucauggugggcaacgagaccggccuggagcugacccugaccaacaccagcaucaucaaccacaaguucugcaaccugagcgacgcccacaagaagaaccuguacgaccacgcccugaugagcaucaucagcaccuuccaccugagcauccccaacuucaaccaguacgaggccaugagcugcgacuucaacggcggcaagaucagcgugcaguacaaccugagccacagcuucgccguggacgccgccaaccacugcggcaccaucgccaacggcgugcugcagaccuucaugagaauggccuggggcggcagcuacaucgcccuggacagcggcugcggcaacugggacugcaucaugaccagcuaccaguaccugaucauccagaacaccaccugggaggaccacugccaguucagcagacccagccccaucggcuaccugggccugcugagccagagaaccagagacaucuacaucagcagaagacugcugggcaccuucaccuggacccugagcgacagcgagggcaacgaggcccccggcggcuacugccugaccagauggaugcugaucgaggccgagcugaagugcuucggcaacaccgccguggccaagugcaacgagaagcacgacgaggaguucugcgacaugcugagacuguucgacuucaacaagcaggccaucaagagacugaagacccccgcccagaugagcauccagcugaucaacaaggccgugaacgcccugaucaacgaccagcugaucaugaagaaccaccugagagacaucaugugcauccccuacugcaacuacagcagauacugguaccugaaccacaccgugaccggcaagaccagccugcccagaugcuggcuggugagcaacggcagcuaccugaacgagacccacuucagcgacgacaucgagcagcaggccgacaacaugaucaccgagaugcugcagaaggaguacauggacagacagggcaagaccccccugggccugguggaccuguucguguucagcaccagcuucuaccugaucagcaucuuccugcaccuggugaagauccccacccacagacacaucgugggcaagcccugccccaagccccacagacugaaccacaugggcaucugcagcugcggccuguacaagcaccccggcgugcccgugaaguggaagagaugaggacuagucccuguucccagagcccacuuuuuuuucuuuuuuugaaauaaaauagccugucuuucagaucucaaaggcucuuuucagagccaccaaaaaaaaaaaaaaaaaaaaaaaaaaaaaaaaaaaaaaaaaaaaaaaaaaaaaaaaaaaaaaaaagaauu

SEQ ID NO: 28264 - RNA, 1714 nt, Artificial Sequence
  mRNA product Design a-1 (hSL-A64-N5) comprising derived and/or modified sequence from LASV(GA391;Clade III)__CAA36645__GPCmut5 (opt4)
aggagagucccgcagucggcguccagcggcucugcuuguucgugugugugucguugcaggccuuauucaagcuuaccaugggccagaucgugaccuucuuccaggaggugccccacgugaucgaggaggugaugaacaucgugcugaucgcccugagcauccuggccauccugaagggccuguacaacguggccaccugcggccugaucggccuggugaccuuccugcugcugagcggcagaagcugcagccugaucuacaagggcaccuacgagcugcagacccuggagcugaacauggagacccugaacaugaccaugccccugagcugcaccaagaacaacagccaccacuacaucagagugggcaacgagaccggccuggagcugacccugaccaacaccagcauccugaaccacaaguucugcaaccugagcgacgcccacaagagaaaccuguacgaccacagccugaugagcaucaucagcaccuuccaccugagcauccccaacuucaaccaguacgaggccaugagcugcgacuucaacggcggcaagaucaccgugcaguacaaccugagccacagcuucgccguggacgccgccggccacugcggcacccuggccaacggcgugcugcagaccuucaugagaauggccuggggcggcagcuacaucgcccuggacagcggcugcggcaacugggacugcaucaugaccagcuaccaguaccugaucauccagaacaccaccugggacgaccacugccaguucagcagacccagccccaucggcuaccugggccugcugagccagagaaccagagacaucuacaucagcagaagacugcugggcaccuucaccuggacccugagcgacagcgagggcaacgagacccccggcggcuacugccugaccagauggaugcugaucgaggccgagcugaagugcuucggcaacaccgccguggccaagugcaacgagaagcacgacgaggaguucugcgacaugcugagacuguucgacuucaacaagcaggccaucagaagacugaagacccccgcccagaugagcauccagcugaucaacaaggccgugaacgcccugaucaacgaccagcugaucaugaagaaccaccugagagacaucaugugcauccccuacugcaacuacagcagauacugguaccugaaccacaccagcaccggcaagaccagccugcccagaugcuggcugaucagcaacggcagcuaccugaacgagaccaaguucagcgacgacaucgagcagcaggccgacaacaugaucaccgagaugcugcagaaggaguacaucgacagacagggcaagaccccccugggccugguggaccuguucguguucagcaccagcuucuaccugaucagcaucuuccugcaccuggugaagauccccacccacagacacaucgugggcaagcccugccccaagccccacagacugaaccacaugggcaucugcagcugcggccuguacaagcagcccggcgugcccgugagauggaagagaugaggacuagucccuguucccagagcccacuuuuuuuucuuuuuuugaaauaaaauagccugucuuucagaucucaaaggcucuuuucagagccaccaaaaaaaaaaaaaaaaaaaaaaaaaaaaaaaaaaaaaaaaaaaaaaaaaaaaaaaaaaaaaaaaagaauu

SEQ ID NO: 28265 - RNA, 1717 nt, Artificial Sequence
  mRNA product Design a-1 (hSL-A64-N5) comprising derived and/or modified sequence from LASV(AV;Clade V)__CCA30314__GPCmut5 (opt4)
aggagagucccgcagucggcguccagcggcucugcuuguucgugugugugucguugcaggccuuauucaagcuuaccaugggccagaucgugaccuucuuccaggaggugccccacgugaucgaggaggugaugaacaucgugcugaucgcccugagcauccuggccgugcugaagggccuguacaacaucgccaccugcggccugaucggccugaucaccuuccugcugcugugcggcagaagcugcagcagcaaccuguacaagggcguguacgagcugcagagccuggaccugaacauggagacccugaacaugaccaugccccugagcugcaccaagaacaacagccaccacuacaucagagugggcaacgacaccggccuggagcugacccugaccaacaccagcauccugaaccacaaguucugcaaccugagcgacgcccacaagaaggaccuguacgaccacgcccugaugagcaucaucagcaccuuccaccugagcauccccaacuucaaccaguacgaggccaugagcugcgacuucaacggcggcaagaucagcgugcaguacaaccugagccacagcuacgccaucgacgccgccaaccacugcggcaccguggccaacggcauccugcagaccuucaugagaauggccuggggcggcagcuacaucgcccuggacagcggcugcggcaacugggacugcaucaugaccagcuaccaguaccugaucauccagaacaccaccugggagaaccacugccaguucagcagacccagccccaucggcuaccugggccugcugagccagagaaccagagacaucuacaucagcagaagacugcugggcaccuucaccuggacccugagcgacagcgagggcaacgccacccccggcggcuacugccugaccagauggaugcugaucgaggccgagcugaagugcuucggcaacaccgccguggccaagugcaacgagaagcacgacgaggaguucugcgacaugcugagacuguucgacuucaacaagcaggccaucagcagacugaagagccccgcccagaugagcauccagcugaucaacaaggccgugaacgcccugaucaacgaccagcugaucaugaagaaccaccugagagacaucaugugcauccccuacugcaacuacagcaaguacugguaccugaaccacaccaucaccggcaagaccagccugcccaagugcuggcuggugagcaacggcagcuaccugaacgagacccacuucagcgacgacaucgagcagcaggccgacaacaugaucaccgagaugcugcagaaggaguacauggagagacagggcaagaccccccugggccugguggaccuguucguguucagcaccagcuucuaccugaucagcaucuuccugagacuggugaagauccccacccacagacacaucgugggcaagcccugccccaagccccacagacugaaccacaugggcaucugcagcugcggccuguacaagcagcccggcgugcccgugagauggaagagaugaggacuagucccuguucccagagcccacuuuuuuuucuuuuuuugaaauaaaauagccugucuuucagaucucaaaggcucuuuucagagccaccaaaaaaaaaaaaaaaaaaaaaaaaaaaaaaaaaaaaaaaaaaaaaaaaaaaaaaaaaaaaaaaaagaauu

SEQ ID NO: 28266 - RNA, 1714 nt, Artificial Sequence
  mRNA product Design a-1 (hSL-A64-N5) comprising derived and/or modified sequence from LASV(Togo/2016/7082;Clade VI)__AMR44577__GPCmut5 (opt4)
aggagagucccgcagucggcguccagcggcucugcuuguucgugugugugucguugcaggccuuauucaagcuuaccaugggccagaucaucaccuucuuccaggaggugccccacgugaucgaggaggugaugaacaucgugcugaucgcccugagccugcuggccauccugaagggcguguacaacguggccaccugcggcaucaucggccuggugaccuuccuguuccugugcggcagaagcugcagccugaucuacaagggcagcuacgagcugcagacccuggagcugaacauggagacccugaacaugaccaugccccugagcugcaccaagaacagcagccaccacuacaucagagugggcaacgagaccggccuggagcugacccugaccaacaccagcaucaucaaccacaaguucugcaaccugagcgacgcccacaagagaaaccuguacgaccacgcccugaugagcauccugagcaccuuccaccugagcauccccaacuucaaccaguacgaggccaugagcugcgacuucaacggcggcaagaucagcgugcaguacaaccugagccacgccuacgccguggacgccgccgagcacugcggcaccguggccaacggcgugcugcagaccuucaugagaauggccuggggcggcagcuacaucgcccuggacagcggcugcggcaacugggacugcaucaugaccagcuaccaguaccugaucauccagaacaccaccugggaggaccacugccaguucagcagacccagccccaucggcuaccugggccugcugagccagagaaccagagacaucuacaucagcagaagacugcugggcaccuucaccuggacccugagcgacagcgagggcaacgagacccccggcggcuacugccugaccagauggaugcugaucgaggccgagcugaagugcuucggcaacaccgccguggccaagugcaacgagaagcacgacgaggaguucugcgacaugcugagacuguucgacuucaacaagcaggccauccagagacugaagagccccgcccagaugagcauccagcugaucaacaaggccgugaacgcccugaucaacgaccagcugaucaugaagaaccaccugagagacaugaugugcauccccuacugcaacuacagcaaguacugguaccugaaccacaccagcagcggcagaaccagccugcccaagugcuggcuggugagcaacggcagcuaccugaacgagacccacuucagcgacgacaucgagcagcaggccgacaacaugaucaccgagaugcugcagaaggaguacaucgacagacagggcaagaccccccugggccugguggaccuguucguguucagcaccagcuucuaccugaucagcaucuuccugcaccugaucaagauccccacccacagacacaucgugggcaagcccugccccaagccccacagacugaaccacaugggcaucugcagcugcggccuguacaagcagcccggcgugcccaccagauggaagagaugaggacuagucccuguucccagagcccacuuuuuuuucuuuuuuugaaauaaaauagccugucuuucagaucucaaaggcucuuuucagagccaccaaaaaaaaaaaaaaaaaaaaaaaaaaaaaaaaaaaaaaaaaaaaaaaaaaaaaaaaaaaaaaaaagaauu

SEQ ID NO: 28267 - RNA, 1714 nt, Artificial Sequence
  mRNA product Design a-1 (hSL-A64-N5) comprising derived and/or modified sequence from LASV(KAK-428;Clade n.d. (VII))__ANH09740__GPCmut5 (opt4)
aggagagucccgcagucggcguccagcggcucugcuuguucgugugugugucguugcaggccuuauucaagcuuaccaugggccagaucgugaccuucuuccaggaggugccccacgugaucgaggaggugaugaacaucgugcugaucgcccugagccugcuggccauccugaagggccuguacaacuucgccaccugcggcgugaucggccugaucaccuuccugcugcugugcggcagaagcugcagcgccaccuacaagggccaguacgagcugcagacccuggagcugaacauggagagccugaacaugaccaugccccugagcugcaccaagaacaacagccaccacuacaucagagccggcaacaacaccggccuggagcugacccugaccaacaccagcaucaucagccacaaguucugcaaccugagcgacgcccacaagaagaaccuguacgaccacacccugaugagcaucaucaccaccuuccaccugagcauccccaacuucaaccaguacgaggccaugagcugcgacuucaacggcggcaagaucagcauccaguacaaccugagccacagcuacgccggcgacgccgcccagcacugcggcaccguggccaacggcgugcugcagaccuucaugagaauggccuggggcggcagcuaccuggcccuggacagcggcugcagaggcugggacugcaucaucagcagcuaccaguaccugaucauccagaacaccaccugggacgaccacugccaguucagcagacccagccccaucggcuaccugggcuucgugagccagaagaccagagacaucuacaucagcagaagacugcugggcaccuucaccuggacccugagcgacagcgagggccacgacaugcccggcggcuacugccugaccagauggaugcugaucgaggccgaccugaagugcuucggcaacaccgccguggccaagugcaacgagaagcacgacgaggaguucugcgacauguggagacuguucgacuucaacaagcaggccauccagagacugaaggcccccgcccagaugaacauccagcugaucaacaaggccgugaacgcccugaucaacgaccagcugaugaugaagaaccaccugagagacaucaugugcauccccuacugcaacuacagcaaguucugguaccugaacaacaccaccaccggcagaaccagccugcccagaugcuggcugaucagcaacggcagcuaccugaacgagacccacuucagcgacgacaucgagcagcaggccgacaacaugaucaccgagaugcugcagaaggaguacauggacagacagggcaagaccccccugggccugguggaccuguucguguucagcaccagcuucuaccugaucaccaucuuccugcaccuggugaagauccccacccacagacacaucgugggcaagcccugccccaagccccacagacugaaccacaugggcaucugcagcugcggccuguacaagcagcccggcgugcccgugagauggaagagaugaggacuagucccuguucccagagcccacuuuuuuuucuuuuuuugaaauaaaauagccugucuuucagaucucaaaggcucuuuucagagccaccaaaaaaaaaaaaaaaaaaaaaaaaaaaaaaaaaaaaaaaaaaaaaaaaaaaaaaaaaaaaaaaaagaauu

SEQ ID NO: 28268 - RNA, 1714 nt, Artificial Sequence; identical to SEQ ID NO: 28262
  mRNA product Design a-1 (hSL-A64-N5) comprising derived and/or modified sequence from LASV(Pinneo-NIG-1969;Clade I)__AIT17836__GPCmut5 (opt4)

SEQ ID NO: 28269 - RNA, 1714 nt, Artificial Sequence
  mRNA product Design a-1 (hSL-A64-N5) comprising derived and/or modified sequence from LASV(ISTH0009-NIG-2011;Clade II)__AIT17404__GPCmut5 (opt4)
aggagagucccgcagucggcguccagcggcucugcuuguucgugugugugucguugcaggccuuauucaagcuuaccaugggccagaucaucaccuucuuccaggaggugccccacgugaucgaggaggugaugaacaucgugcugaucgcccugagccugcuggccauccugaagggcaucuacaacguggccaccugcggccuguucggccuggugagcuuccugcugcugugcggcagaagcugcagcaccaccuacaagggcguguacgagcugcagacccuggagcuggacauggccagccugaacaugaccaugccccugagcugcaccaagaacaacagccaccacuacaucauggugggcaacgagaccggccuggagcugacccugaccaacaccagcaucaucaaccacaaguucugcaaccugagcgacgcccacaagaagaaccuguacgaccacgcccugaugagcaucaucagcaccuuccaccugagcauccccaacuucaaccaguacgaggccaugagcugcgacuucaacggcggcaagaucagcgugcaguacaaccugagccacgccuacgccguggacgccgccaaccacugcggcaccaucgccaacggcgugcugcagaccuucaugagaauggccuggggcggcagcuacaucgcccuggacagcggcugcggcagcugggacugcaucaugaccagcuaccaguaccugaucauccagaacaccaccugggaggaccacugccaguucagcagacccagccccaucggcuaccugggccugcugagccagagaaccagagacaucuacaucagcagaagacugcugggcaccuucaccuggacccugagcgacagcgagggcaacgagacccccggcggcuacugccugaccagauggaugcugaucgaggccgagcugaagugcuucggcaacaccgccguggccaagugcaacgagaagcacgacgaggaguucugcgacaugcugagacuguucgacuucaacaagcaggccaucagaagacugaagacccccgcccagaugagcauccagcugaucaacaaggccgugaacgcccugaucaacgaccagcugaucaugaagaaccaccugagagacaucaugugcauccccuacugcaacuacagcaaguacugguaccugaaccacaccgugaccggcaagaccagccugcccagaugcuggcuggugagcaacggcagcuaccugaacgagacccacuucagcgacgacaucgagcagcaggccgacaacaugaucaccgagcugcugcagaaggaguacauggacagacagggcaagaccccccugggccugguggaccuguucguguucagcaccagcuucuaccugaucagcaucuuccugcaccugaucaagauccccacccacagacacaucaccggcaagcccugccccaagccccacagacugaaccacaugggcaucugcagcugcggccuguacaagcaccccggcgugcccgugaaguggaagagaugaggacuagucccuguucccagagcccacuuuuuuuucuuuuuuugaaauaaaauagccugucuuucagaucucaaaggcucuuuucagagccaccaaaaaaaaaaaaaaaaaaaaaaaaaaaaaaaaaaaaaaaaaaaaaaaaaaaaaaaaaaaaaaaaagaauu

SEQ ID NO: 28270 - RNA, 1714 nt, Artificial Sequence
  mRNA product Design a-1 (hSL-A64-N5) comprising derived and/or modified sequence from LASV(ISTH2010-NIG-2012;Clade II)__AIT17482__GPCmut5 (opt4)
aggagagucccgcagucggcguccagcggcucugcuuguucgugugugugucguugcaggccuuauucaagcuuaccaugggccagaucaucaccuucuuccaggaggugccccacgugaucgaggaggugaugaacaucgugcugaucgcccugagccugcuggccauccugaagggcaucuacaacguggccaccugcggccuguucggccuggugagcuuccugcugcugugcggcagaagcugcagcaccaccuacaagggcguguacgagcugcagacccuggagcuggacauggccagccugaacaugaccaugccccugagcugcaccaagaacaacagccaccacuacaucauggugggcaacgagaccggccuggagcugacccugaccaacaccagcaucaucaaccacaaguucugcaaccugagcgacgcccacaagaagaaccuguacgaccacgcccugaugagcaucaucagcaccuuccaccugagcauccccaacuucaaccaguacgaggccaugagcugcgacuucaacggcggcaagaucagcgugcaguacaaccugagccacgccuacgccguggacgccgccaaccacugcggcaccaucgccaacggcgugcugcagaccuucaugagaauggccuggggcggcagcuacaucgcccuggacagcggcugcggcagcugggacugcaucaugaccagcuaccaguaccugaucauccagaacaucaccugggaggaccacugccaguucagcagacccagccccaucggcuaccugggccugcugagccagagaaccagagacaucuacaucagcagaagacugcugggcaccuucaccuggacccugagcgacagcgagggcaacgagacccccggcggcuacugccugaccagauggaugcugaucgaggccgagcugaagugcuucggcaacaccgccguggccaagugcaacgagaagcacgacgaggaguucugcgacaugcugagacuguucgacuucaacaagcaggccaucagaagacugaagacccccgcccagaugagcauccagcugaucaacaaggccgugaacgcccugaucaacgaccagcugaucaugaagaaccaccugagagacaucaugugcauccccuacugcaacuacagcaaguacugguaccugaaccacaccgugaccggcaagaccagccugcccagaugcuggcuggugagcaacggcagcuaccugaacgagacccacuucagcgacgacaucgagcagcaggccgacaacaugaucaccgagcugcugcagaaggaguacaucgacagacagggcaagaccccccugggccugguggaccuguucguguucagcaccagcuucuaccugaucagcaucuuccugcaccuggugaagauccccacccacagacacguggugggcaagcccugccccaagccccacagacugaaccacaugggcaucugcagcugcggccuguacaagcaccccggcgugcccgugaaguggaagagaugaggacuagucccuguucccagagcccacuuuuuuuucuuuuuuugaaauaaaauagccugucuuucagaucucaaaggcucuuuucagagccaccaaaaaaaaaaaaaaaaaaaaaaaaaaaaaaaaaaaaaaaaaaaaaaaaaaaaaaaaaaaaaaaaagaauu

SEQ ID NO: 28271 - RNA, 1714 nt, Artificial Sequence
  mRNA product Design a-1 (hSL-A64-N5) comprising derived and/or modified sequence from LASV(Lassa virus/H.sapiens-wt/NGA/2015/ISTH_0543;Clade II)__AVO03639__GPCmut5 (opt4)
aggagagucccgcagucggcguccagcggcucugcuuguucgugugugugucguugcaggccuuauucaagcuuaccaugggccagaucaucaccuucuuccaggaggugccccacgugaucgaggaggugaugaacaucgugcugaucgcccugagccugcuggccauccugaagggcaucuacaacguggccaccugcggccuguucggccuggugagcuuccugcugcugugcggcagaagcugcagcaccaccuacaagggcguguacgagcugcagacccuggagcuggacauggccaaccugaacaugaccaugccccugagcugcaccaagaacaacagccaccacuacaucauggugggcaacgagaccggccuggagcugacccugaccaacaccagcaucaucaaccacaaguucugcaaccugagcgacgcccacaagaagaaccuguacgaccacgcccugaugagcaucaucagcaccuuccaccugagcauccccaacuucaaccaguacgaggccaugagcugcgacuucaacggcggcaagaucagcgugcaguacaaccugagccacaccuacgccguggacgccgccaaccacugcggcaccaucgccaacggcgugcugcagaccuucaugagaauggccuggggcggcagcuacaucgcccuggacagcggcugcggcagcugggacugcaucaugaccagcuaccaguaccuggugauccagaacaccaccugggaggaccacugccaguucagcagacccagccccaucggcuaccugggccugcugagccagagaaccagagacaucuacaucagcagaagacugcugggcaccuucaccuggacccugagcgacagcgagggcaacgagacccccggcggcuacugccugaccagauggaugcugaucgaggccgagcugaagugcuucggcaacaccgccguggccaagugcaacgagaagcacgacgaggaguucugcgacaugcugagacuguucgacuucaacaagcaggccaucagaagacugaagacccccgcccagaugagcauccagcugaucaacaaggccgugaacgcccugaucaacgaccagcugaucaugaagaaccaccugagagacaucaugugcauccccuacugcaacuacagcaaguacugguaccugaaccacaccgugaccggcaagaccagccugcccagaugcuggcuggugagcaacggcagcuaccugaacgagacccacuucagcgacgacaucgagcagcaggccgacaacaugaucaccgagcugcugcagaaggaguacaucgacagacagggcaagaccccccugggccugguggaccuguucguguucagcaccagcuucuaccugaucagcaucuuccugcaccuggugaagauccccacccacagacacaucaccggcaagcccugccccaagccccacagacugaaccacaugggcaucugcagcugcggccuguacaagcaccccggcgugcccgugaaguggaagagaugaggacuagucccuguucccagagcccacuuuuuuuucuuuuuuugaaauaaaauagccugucuuucagaucucaaaggcucuuuucagagccaccaaaaaaaaaaaaaaaaaaaaaaaaaaaaaaaaaaaaaaaaaaaaaaaaaaaaaaaaaaaaaaaaagaauu

SEQ ID NO: 28272 - RNA, 1714 nt, Artificial Sequence
  mRNA product Design a-1 (hSL-A64-N5) comprising derived and/or modified sequence from LASV(Lassa virus/H.sapiens-wt/NGA/2016/ISTH_0009;Clade II)__AVO03571__GPCmut5 (opt4)
aggagagucccgcagucggcguccagcggcucugcuuguucgugugugugucguugcaggccuuauucaagcuuaccaugggccagaucaucaccuucuuccaggaggugccccacgugaucgaggaggugaugaacaucgugcugaucgcccugagccugcuggccauccugaagggcaucuacaacguggccaccugcggccugcugggccuggugagcuuccugcugcugugcggcagaagcugcagcaccaccuacaagggcguguacgagcugcagacccuggagcuggacauggccagccugaacaugaccaugccccugagcugcaccaagaacaacagccaccacuacaucauggugggcaacgagaccggccuggagcugacccugaccaacaccagcaucaucaaccacaaguucugcaaccugagcgacgcccacaagaagaaccuguacgaccacgcccugaugagcaucaucagcaccuuccaccugagcauccccaacuucaaccaguacgaggccaugagcugcgacuucaacggcggcagaaucagcgugcaguacaaccugagccacagcuacgccguggacgccgccaaccacugcggcaccaucgccaacggcgugcugcagaccuucaugagaauggccuggggcggcagcuacaucgcccuggacagcggcugcggcagcugggacugcaucaugaccagcuaccaguaccugaucauccagaacaccaccugggaggaccacugccaguucagcagacccagccccaucggcuaccugggccugcugagccagagaaccagagacaucuacaucagcagaagacugcugggcaccuucaccuggacccugagcgacagcgagggcaacgagacccccggcggcuacugccugaccagauggaugcugaucgaggccgagcugaagugcuucggcaacaccgccguggccaagugcaacgagaagcacgacgaggaguucugcgacaugcugagacuguucgacuucaacaagcaggccaucagaagacugaagacccccgcccagaugagcauccagcugaucaacaaggccgugaacgcccugaucaacgaccagcugaucaugaagaaccaccugagagacaucaugugcauccccuacugcaacuacagcaaguacugguaccugaaccacaccgugaccggcaagaccagccugcccagaugcuggcuggugagcaacggcagcuaccugaacgagacccacuucagcgacgacaucgagcagcaggccgacaacaugaucaccgagcugcugcagaaggaguacaucgacagacagggcaagaccccccugggccugguggaccuguucguguucagcaccagcuucuaccugaucagcaucuuccugcaccuggugaagauccccacccacagacacaucaccggcaagcccugccccaagccccacagacugaaccacaugggcaucugcagcugcggccuguacaaccaccccggcgugcccgugaaguggaagagaugaggacuagucccuguucccagagcccacuuuuuuuucuuuuuuugaaauaaaauagccugucuuucagaucucaaaggcucuuuucagagccaccaaaaaaaaaaaaaaaaaaaaaaaaaaaaaaaaaaaaaaaaaaaaaaaaaaaaaaaaaaaaaaaaagaauu

SEQ ID NO: 28273 - RNA, 1714 nt, Artificial Sequence
  mRNA product Design a-1 (hSL-A64-N5) comprising derived and/or modified sequence from LASV(Lassa virus/H.sapiens-wt/NGA/2016/ISTH_0017;Clade II)__AVO03567__GPCmut5 (opt4)
aggagagucccgcagucggcguccagcggcucugcuuguucgugugugugucguugcaggccuuauucaagcuuaccaugggccagaucaucaccuucuuccaggaggugccccacgugaucgaggaggugaugaacaucgugcugaucgcccugagccugcuggccauccugaagggcaucuacaacguggccaccugcggccuguucggccuggugagcuuccugcugcugugcggcagaagcugcagcaccaccuacaagggcguguacgagcugcagacccuggagcuggacauggccagccugaacaugaccaugccccugagcugcaccaagaacaacagccaccacuacaucauggugggcaacgagaccggccuggagcugacccugaccaacaccagcaucaucaaccacaaguucugcaaccugagcgacgcccacaagaagaaccuguacgaccacgcccugaugagcaucaucagcaccuuccaccugagcauccccaacuucaaccaguacgaggccaugagcugcgacuucaacggcggcaagaucagcgugcaguacaaccugagccacaccuacgccaucgacgccgccaaccacugcggcaccaucgccaacggcgugcugcagaccuucaugagaauggccuggggcggcagcuacaucgcccuggacagcggcugcggcagcugggacugcaucaugaccagcuaccaguaccugaucauccagaacaccaccugggaggaccacugccaguucagcagacccagccccaucggcuaccugggccugcugagccagagaaccagagacaucuacaucagcagaagacugcugggcaccuucaccuggacccugagcgacagcgagggcaacgagacccccggcggcuacugccugaccagauggaugcugaucgaggccgagcugaagugcuucggcaacaccgccguggccaagugcaacgagaagcacgacgaggaguucugcgacaugcugagacuguucgacuucaacaagcaggccaucagaagacugaagacccccgcccagaugagcauccagcugaucaacaaggccgugaacgcccugaucaacgaccagcugaucaugaagaaccaccugagagacaucaugugcauccccuacugcaacuacagcaaguacugguaccugaaccacaccgugaccggcaagaccagccugcccagaugcuggcuggugagcaacggcagcuaccugaacgagacccacuucagcgacgacaucgagcagcaggccgacaacaugaucaccgagcugcugcagaaggaguacauggacagacagggcaagaccccccugggccugguggaccuguucguguucagcaccagcuucuaccugaucagcaucuuccugcaccuggugagaauccccacccacagacacgugaucggcaagcccugccccaagccccacagacugaaccacaugggcaucugcagcugcggccuguacaagcaccccggcgugcccgugaaguggaagagaugaggacuagucccuguucccagagcccacuuuuuuuucuuuuuuugaaauaaaauagccugucuuucagaucucaaaggcucuuuucagagccaccaaaaaaaaaaaaaaaaaaaaaaaaaaaaaaaaaaaaaaaaaaaaaaaaaaaaaaaaaaaaaaaaagaauu

SEQ ID NO: 28274 - RNA, 1714 nt, Artificial Sequence
  mRNA product Design a-1 (hSL-A64-N5) comprising derived and/or modified sequence from LASV(Lassa virus/H.sapiens-wt/NGA/2018/ISTH_0959;Clade II)__AVV65099__GPCmut5 (opt4)
aggagagucccgcagucggcguccagcggcucugcuuguucgugugugugucguugcaggccuuauucaagcuuaccaugggccagaucaucaccuucuuccaggaggugccccacgugaucgaggaggugaugaacaucgugcugaucgcccugagccugcuggccauccugaagggcaucuacaacguggugaccugcggccuguucggccuggugagcuuccugcugcugugcggcagaagcugcagcaccaccuacaagggcguguacgagcugcagacccuggagcuggacauggccagccugaacaugaccaugccccugagcugcaccaagaacaacagccaccacuacaucauggugggcaacgagaccggccuggagcugacccugaccaacaccagcaucaucaaccacaaguucugcaaccugagcgacgcccacaagaagaaccuguacgaccacgcccugaugagcaucaucagcaccuuccaccugagcauccccaacuucaaccaguacgaggccaugagcugcgacuucaacggcggcaagaucagcgugcaguacaaccugagccacgccuacgccaucgacgccgccaaccacugcggcaccaucgccaacggcgugcugcagaccuucaugagaauggccuggggcggcagcuacaucgcccuggacagcggcugcggcagcugggacugcaucaugaccagcuaccaguaccugaucauccagaacaccaccugggaggaccacugccaguucagcagacccagccccaucggcuaccugggccugcugagccagagaaccagagacaucuacaucagcagaagacugcugggcaccuucaccuggacccugagcgacagcgagggcaacgagacccccggcggcuacugccugaccagauggaugcugaucgaggccgagcugaagugcuucggcaacaccgccguggccaagugcaacgagaagcacgacgaggaguucugcgacaugcugagacuguucgacuucaacaagcaggccaucagaagacugaagacccccgcccagaugagcauccagcugaucaacaaggccgugaacgcccugaucaacgaccagcugaucaugaagaaccaccugagagacaucaugugcauccccuacugcaacuacagcaaguacugguaccugaaccacaccgugaccggcaagaccagccugcccagaugcuggcuggugagcaacggcagcuaccugaacgagacccacuucagcgacgacaucgagcagcaggccgacaacaugaucaccgagcugcugcagaaggaguacaucgacagacagggcaagaccccccugggccugguggaccuguucguguucagcaccagcuucuaccugaucagcaucuuccugcaccuggugaagauccccacccacagacacgugaucggcaagcccugccccaagccccacagacugaaccacaugggcaucugcagcugcggccuguacaagcaccccggcgugcccgugaaguggaagagaugaggacuagucccuguucccagagcccacuuuuuuuucuuuuuuugaaauaaaauagccugucuuucagaucucaaaggcucuuuucagagccaccaaaaaaaaaaaaaaaaaaaaaaaaaaaaaaaaaaaaaaaaaaaaaaaaaaaaaaaaaaaaaaaaagaauu

SEQ ID NO: 28275 - RNA, 1714 nt, Artificial Sequence
  mRNA product Design a-1 (hSL-A64-N5) comprising derived and/or modified sequence from LASV(LASV003-NIG-2008;Clade II)__AIT17580__GPCmut5 (opt4)
aggagagucccgcagucggcguccagcggcucugcuuguucgugugugugucguugcaggccuuauucaagcuuaccaugggccagaucaucaccuucuuccaggaggugccccacgugaucgaggaggugaugaacaucgugcugaucgcccugagccugcuggccauccugaagggcaucuacaacguggccaccugcggccuguucggccuggugagcuuccugcugcugugcggcagaagcugcagcaccaccuacaagggcguguacgagcugcagacccuggagcuggacauggccagccugaacaugaccaugccccugagcugcaccaagaacaacagccaccacuacaucauggugggcaacgagaccggccuggagcugacccugaccaacaccagcaucaucaaccacaaguucugcaaccugagcgacgcccacaagaagaaccuguacgaccacgcccugaugagcaucaucagcaccuuccaccugagcauccccaacuucaaccaguacgaggccaugagcugcgacuucaacggcggcaagaucagcgugcaguacaaccugagccacaccuacgccguggacgccgccaaccacugcggcaccaucgccaacggcgugcugcagaccuucaugagaauggccuggggcggcagcuacaucgcccuggacagcggcugcggcagcugggacugcaucaugaccagcuaccaguaccugaucauccagaacaccaccugggaggaccacugccaguucagcagacccagccccaucggcuaccugggccugcugagccagagaaccagagacaucuacaucagcagaagacugcugggcaccuucaccuggacccugagcgacagcgagagcaacgagacccccggcggcuacugccugaccagauggaugcugaucgaggccgagcugaagugcuucggcaacaccgccguggccaagugcaacgagaagcacgacgaggaguucugcgacaugcugagacuguucgacuucaacaagcaggccaucagaagacugaaggcccccgcccagaugagcauccagcugaucaacaaggccgugaacgcccugaucaacgaccagcugaucaugaagaaccaccugagagacaucaugugcauccccuacugcaacuacagcaaguacugguaccugaaccacaccgugaccggcagaaccagccugcccagaugcuggcuggugagcaacggcagcuaccugaacgagacccacuucagcgacgacaucgagcagcaggccgacaacaugaucaccgagcugcugcagaaggaguacauggacagacagggcaagaccccccugggccugguggaccuguucguguucagcaccagcuucuaccugaucagcaucuuccugcaccuggugaagauccccacccacagacacgugaucggcaagcccugccccaagccccacagacugaaccacaugggcaucugcagcugcggccuguacaagcaccccggcgugcccgugaaguggaagagaugaggacuagucccuguucccagagcccacuuuuuuuucuuuuuuugaaauaaaauagccugucuuucagaucucaaaggcucuuuucagagccaccaaaaaaaaaaaaaaaaaaaaaaaaaaaaaaaaaaaaaaaaaaaaaaaaaaaaaaaaaaaaaaaaagaauu

SEQ ID NO: 28276 - RNA, 1714 nt, Artificial Sequence
  mRNA product Design a-1 (hSL-A64-N5) comprising derived and/or modified sequence from LASV(LASV035-NIG-2009;Clade II)__AIT17588__GPCmut5 (opt4)
aggagagucccgcagucggcguccagcggcucugcuuguucgugugugugucguugcaggccuuauucaagcuuaccaugggccagaucaucaccuucuuccaggaggugccccacgugaucgaggaggugaugaacaucgugcugaucgcccugagccugcuggccauccugaagggcaucuacaacguggccaccugcggccuguucggccuggugagcuuccugcugcugugcggcagaagcugcagcaccaccuacaagggcguguacgagcugcagacccuggagcuggacauggccagccugaacaugaccaugccccugagcugcaccaagaacaacagccaccacuacaucauggugggcaacgagaccggccuggagcugacccugaccaacaccagcaucaucaaccacaaguucugcaaccugagcgacgcccacaagaagaaccuguacgaccacgcccugaugagcaucaucagcaccuuccaccugagcauccccaacuucaaccaguacgaggccaugagcugcgacuucaacggcggcaagaucagcgugcaguacaaccugagccacgccuacgccguggacgccgccaaccacugcggcaccaucgccaacggcgugcugcagaccuucaugagaauggccuggggcggcagcuacaucgcccuggacagcggcugcggcagcugggacugcaucaugaccagcuaccaguaccugaucauccagaacaccaccugggaggaccacugccaguucagcagacccagccccaucggcuaccugggccugcugagccagagaaccagagacaucuacaucagcagaagacugcugggcaccuucaccuggacccugagcgacagcgagggcaacgagacccccggcggcuacugccugaccagauggaugcugaucgaggccgagcugaagugcuucggcaacaccgccguggccaagugcaacgagaagcacgacgaggaguucugcgacaugcugagacuguucgacuucaacaagcaggccaucagaagacugaaggcccccgcccagaugagcauccagcugaucaacaaggccgugaacgcccugaucaacgaccagcugaucaugaagaaccaccugagagacaucaugugcauccccuacugcaacuacagcaaguacugguaccugaaccacaccgugaccggcaagaccagccugcccagaugcuggcuggugagcaacggcagcuaccugaacgagacccacuucagcgacgacaucgagcagcaggccgacaacaugaucaccgagcugcugcagaaggaguacaucgacagacagggcaagaccccccugggccugguggaccuguucguguucagcaccagcuucuaccugaucagcaucuuccugcaccuggugaagauccccacccacagacacgugaucggcaagcccugccccaagccccacagacugaaccacaugggcaucugcagcugcggccuguacaagcaccccggcgugcccgugaaguggaagagaugaggacuagucccuguucccagagcccacuuuuuuuucuuuuuuugaaauaaaauagccugucuuucagaucucaaaggcucuuuucagagccaccaaaaaaaaaaaaaaaaaaaaaaaaaaaaaaaaaaaaaaaaaaaaaaaaaaaaaaaaaaaaaaaaagaauu

SEQ ID NO: 28277 - RNA, 1714 nt, Artificial Sequence
  mRNA product Design a-1 (hSL-A64-N5) comprising derived and/or modified sequence from LASV(LASV1000-NIG-2009;Clade II)__AIT17782__GPCmut5 (opt4)
aggagagucccgcagucggcguccagcggcucugcuuguucgugugugugucguugcaggccuuauucaagcuuaccaugggccagaucaucaccuucuuccaggaggugccccacgugaucgaggaggugaugaacaucgugcugaucgcccugagccugcuggccauccugaagggcaucuacaacguggccaccugcggccuguucggccuggugagcuuccugcugcugugcggcagaagcugcagcaccaccuacaagggcguguacgagcugcagacccuggagcuggacauggccagccugaacaugaccaugccccugagcugcaccaagaacaacagccaccacuacaucauggugggcaacgagaccggccuggagcugacccugaccaacaccagcaucaucaaccacaaguucugcaaccugagcgacgcccacaagaagaaccuguacgaccacgcccugaugagcaucaucagcaccuuccaccugagcauccccaacuucaaccaguacgaggccaugagcugcgacuucaacggcggcaagaucagcgugcaguacaaccugagccacaccuacgccguggacgccgccaaccacugcggcaccaucgccaacggcgugcugcagaccuucaugagaauggccuggggcggcagcuacaucgcccuggacagcggcugcggcagcugggacugcaucaugaccagcuaccaguaccugaucauccagaacaccaccugggaggaccacugccaguucagcagacccagccccaucggcuaccugggccugcugagccagagaaccagagacaucuacaucagcagaagacugcugggcaccuucaccuggacccugagcgacagcgagggcaacgagacccccggcggcuacugccugaccagauggaugcugaucgaggccgagcugaagugcuucggcaacaccgccguggccaagugcaacgagaagcacgacgaggaguucugcgacaugcugagacuguucgacuucaacaagcaggccaucaagagacugaagacccccgcccagaugagcauccagcugaucaacaaggccgugaacgcccugaucaacgaccagcugaucaugaagaaccaccugagagacaucaugugcauccccuacugcaacuacagcaaguacugguaccugaaccacaccgugaccggcaagaccagccugcccagaugcuggcuggugagcaacggcagcuaccugaacgagacccacuucagcgacgacaucgagcagcaggccgacaacaugaucaccgagcugcugcagaaggaguacaucgacagacagggcaagaccccccugggccugguggaccuguucguguucagcaccagcuucuaccugaucagcaucuuccugcaccuggugaagauccccacccacagacacguggugggcaagcccugccccaagccccacagacugaaccacaugggcaucugcagcugcggccuguacaagcaccccggcgugcccgugaaguggaagagaugaggacuagucccuguucccagagcccacuuuuuuuucuuuuuuugaaauaaaauagccugucuuucagaucucaaaggcucuuuucagagccaccaaaaaaaaaaaaaaaaaaaaaaaaaaaaaaaaaaaaaaaaaaaaaaaaaaaaaaaaaaaaaaaaagaauu

SEQ ID NO: 28278 - RNA, 1714 nt, Artificial Sequence
  mRNA product Design a-1 (hSL-A64-N5) comprising derived and/or modified sequence from LASV(LASV221-NIG-2010;Clade II)__AIT17624__GPCmut5 (opt4)
aggagagucccgcagucggcguccagcggcucugcuuguucgugugugugucguugcaggccuuauucaagcuuaccaugggccagaucaucaccuucuuccaggaggugccccacgugaucgaggaggugaugaacaucgugcugaucgcccugagccugcuggccauccugaagggcaucuacaacguggccaccugcggccuguucggccuggugagcuuccugcugcugugcggcagaagcugcagcaccaccuacaagggcguguacgagcugcagacccuggagcuggacauggccagccugaacaugaccaugccccugagcugcaccaagaacaacagccaccacuacaucauggugggcaacgagaccggccuggagcugacccugaccaacaccagcaucaucaaccacaaguucugcaaccugagcgacgcccacaagaagaaccuguacgaccacgcccugaugagcaucaucagcaccuuccaccugagcauccccaacuucaaccaguacgaggccaugagcugcgacuucaacggcggcaagaucagcgugcaguacaaccugagccacaccuacgccaucgacgccgccaaccacugcggcaccaucgccaacggcgugcugcagaccuucaugagaauggccuggggcggcagcuacaucgcccuggacagcggcugcggcagcugggacugcaucaugaccagcuaccaguaccugaucauccagaacaccaccugggaggaccacugccaguucagcagacccagccccaucggcuaccugggccugcugagccagagaaccagagacaucuacaucagcagaagacugcugggcaccuucaccuggacccugagcgacagcgagggcaacgagacccccggcggcuacugccugaccagauggaugcugaucgaggccgagcugaagugcuucggcaacaccgccguggccaagugcaacgagaagcacgacgaggaguucugcgacaugcugagacuguucgacuucaacaagcaggccaucagaagacugaagacccccgcccagaugagcauccagcugaucaacaaggccgugaacgcccugaucaacgaccagcugaucaugaagaaccaccugagagacaucaugugcauccccuacugcaacuacagcaaguacugguaccugaaccacaccgugaccggcaagaccagccugcccagaugcuggcuggugagcaacggcagcuaccugaacgagacccacuucagcgacgacaucgagcagcaggccgacaacaugaucaccgagaugcugcagaaggaguacauggacagacagggcaagaccccccugggccugguggaccuguucguguucagcaccagcuucuaccugaucagcaucuuccugcaccuggugaagauccccacccacagacacgugaucggcaagcccugccccaagccccacagacugaaccacaugggcaucugcagcugcggccuguacaagcaccccggcgugcccgugaaguggaagagaugaggacuagucccuguucccagagcccacuuuuuuuucuuuuuuugaaauaaaauagccugucuuucagaucucaaaggcucuuuucagagccaccaaaaaaaaaaaaaaaaaaaaaaaaaaaaaaaaaaaaaaaaaaaaaaaaaaaaaaaaaaaaaaaaagaauu

SEQ ID NO: 28279 - RNA, 1714 nt, Artificial Sequence
  mRNA product Design a-1 (hSL-A64-N5) comprising derived and/or modified sequence from LASV(LASV237-NIG-2010;Clade II)__AIT17638__GPCmut5 (opt4)
aggagagucccgcagucggcguccagcggcucugcuuguucgugugugugucguugcaggccuuauucaagcuuaccaugggccagaucaucaccuucuuccaggaggugccccacgugaucgaggaggugaugaacaucgugcugaucgcccugagccugcuggccauccugaagggcaucuacaacguggccaccugcggccuguucggccuggugagcuuccugcugcugugcggcagaagcugcagcaccaccuacaagggcguguacgagcugcagacccuggagcuggacauggccagccugaacaugaccaugccccugagcugcaccaagaacaacagccaccacuacaucauggugggcaacgagaccggccuggagcugacccugaccaacaccagcaucaucaaccacaaguucugcaaccugagcgacgcccacaagaaggaccuguacgaccacgcccugaugagcaucaucagcaccuuccaccugagcauccccaacuucaaccaguacgaggccaugagcugcgacuucaacggcggcaagaucagcgugcaguacaaccugagccacaccuacgccguggacgccgccaaccacugcggcaccaucgccaacggcgugcugcagaccuucaugagaauggccuggggcggcagcuacaucgcccuggacagcggcugcggcagcugggacugcaucaugaccagcuaccaguaccugaucauccagaacaccaccugggaggaccacugccaguucagcagacccagccccaucggcuaccugggccugcugagccagagaaccagagacaucuacaucagcagaagacugcugggcaccuucaccuggacccugagcgacagcgagggcaacgagacccccggcggcuacugccugaccagauggaugcugaucgaggccgagcugaagugcuucggcaacaccgccguggccaagugcaacgagaagcacgacgaggaguucugcgacaugcugagacuguucgacuucaacaagcaggccaucagaagacugaagacccccgcccagaugagcauccagcugaucaacaaggccgugaacgcccugaucaacgaccagcugaucaugaagaaccaccugagagacaucaugugcauccccuacugcaacuacagcaaguacugguaccugaaccacaccgugaccggcaagaccagccugcccagaugcuggcuggugagcaacggcagcuaccugaacgagacccacuucagcgacgacaucgagcagcaggccgacaacaugaucaccgagcugcugcagaaggaguacauggacagacagggcaagaccccccugggccugguggaccuguucguguucagcaccagcuucuaccugaucagcaucuuccugcaccugaucaagauccccacccacagacacaucaccggcaagcccugccccaagccccacagacugaaccacaugggcaucugcagcugcggccuguacaagcaccccggcgugcccgugaaguggaagagaugaggacuagucccuguucccagagcccacuuuuuuuucuuuuuuugaaauaaaauagccugucuuucagaucucaaaggcucuuuucagagccaccaaaaaaaaaaaaaaaaaaaaaaaaaaaaaaaaaaaaaaaaaaaaaaaaaaaaaaaaaaaaaaaaagaauu

SEQ ID NO: 28280 - RNA, 1714 nt, Artificial Sequence
  mRNA product Design a-1 (hSL-A64-N5) comprising derived and/or modified sequence from LASV(LASV253-NIG-2011;Clade II)__AIT17670__GPCmut5 (opt4)
aggagagucccgcagucggcguccagcggcucugcuuguucgugugugugucguugcaggccuuauucaagcuuaccaugggccagaucaucaccuucuuccaggaggugccccacgugaucgaggaggugaugaacaucgugcugaucgcccugagccugcuggccauccugaagggcaucuacaacguggccaccugcggccuguucggccuggugagcuuccugcugcugugcggcagaagcugcagcaccaccuacaagggcguguacgagcugcagacccuggagcuggacauggccagccugaacaugaccaugccccugagcugcaccaagaacaacagccaccacuacaucauggugggcaacgagaccggccuggagcugacccugaccaacaccagcaucaucaaccacaaguucugcaaccugagcgacgcccacaagaagaaccuguacgaccacgcccugaugagcaucaucagcaccuuccaccugagcauccccaacuucaaccaguacgaggccaugagcugcgacuucaacggcggcaagaucagcgugcaguacaaccugagccacaccuacgccguggacgccgccaaccacugcggcaccaucgccaacggcgugcugcagaccuucaugagaauggccuggggcggcagcuacaucgcccuggacagcggcugcggcagcugggacugcaucaugaccagcuaccaguaccugaucauccagaacaccaccugggaggaccacugccaguucagcagacccagccccaucggcuaccugggccugcugagccagagaaccagagacaucuacaucagcagaagacugcugggcaccuucaccuggacccugagcgacagcgagggcaacgagacccccggcggcuacugccugaccagauggaugcugaucgaggccgagcugaagugcuucggcaacaccgccguggccaagugcaacgagaagcacgacgaggaguucugcgacaugcugagacuguucgacuucaacaagcaggccaucagaagacugaaggcccccgcccagaugagcauccagcugaucaacaaggccgugaacgcccugaucaacgaccagcugaucaugaagaaccaccugagagacaucaugugcauccccuacugcaacuacagcaaguacugguaccugaaccacaccgugaccggcagaaccagccugcccagaugcuggcuggugagcaacggcagcuaccugaacgagacccacuucagcgacgacaucgagcagcaggccgacaacaugaucaccgagcugcugcagaaggaguacaucgacagacagggcaagaccccccugggccugguggaccuguucguguucagcaccagcuucuaccugaucagcaucuuccugcaccuggugaagauccccacccacagacacaucaucggcaagcccugccccaagccccacagacugaaccacaugggcaucugcagcugcggccuguacaagcaccccggcgugcccgugaaguggaagagaugaggacuagucccuguucccagagcccacuuuuuuuucuuuuuuugaaauaaaauagccugucuuucagaucucaaaggcucuuuucagagccaccaaaaaaaaaaaaaaaaaaaaaaaaaaaaaaaaaaaaaaaaaaaaaaaaaaaaaaaaaaaaaaaaagaauu

SEQ ID NO: 28281 - RNA, 1714 nt, Artificial Sequence
  mRNA product Design a-1 (hSL-A64-N5) comprising derived and/or modified sequence from LASV(LASV254-NIG-2011;Clade II)__AIT17674__GPCmut5 (opt4)
aggagagucccgcagucggcguccagcggcucugcuuguucgugugugugucguugcaggccuuauucaagcuuaccaugggccagaucaucaccuucuuccaggaggugccccacgugaucgaggaggugaugaacaucgugcugaucgcccugagccugcuggccauccugaagggcaucuacaacguggccaccugcggccuguucggccuggugagcuuccugcugcugugcggcagaagcugcagcaccaccuacaagggcguguacgagcugcagacccuggagcuggacaugaccaaccugaacaugaccaugccccugagcugcaccaagaacaacagccaccacuacaucauggugggcaacgagaccggccuggagcugacccugaccaacaccagcaucaucaaccacaaguucugcaaccugagcgacgcccacaagaagaaccuguacaaccacgcccugaugagcaucaucagcaccuuccaccugagcauccccaacuucaaccaguacgaggccaugagcugcgacuucaacggcggcaagaucagcgugcaguacaaccugagccacagcuacgccguggacgccgccaaccacugcggcaccaucgccaacggcgugcugcagaccuucaugagaauggccuggggcggcagcuacaucgcccuggacagcggcugcggcaacugggacugcaucaugaccagcuaccaguaccugaucauccagaacaccaccugggaggaccacugccaguucagcagacccagccccaucggcuaccugggccugcugagccagagaaccagagacaucuacaucagcagaagacugcugggcaccuucaccuggacccugagcgacagcgagggcaacgagacccccggcggcuacugccugaccagauggaugcugaucgaggccgagcugaagugcuucggcaacaccgccguggccaagugcaacgagaagcacgacgaggaguucugcgacaugcugagacuguucgacuucaacaagcaggccaucagaagacugaagacccccgcccaggccaacauccagcugaucaacaaggccgugaacgcccugaucaacgaccagcugaucaugaagaaccaccugagagacaucaugugcauccccuacugcaacuacagcaaguacugguaccugaaccacaccgugaccggcaagaccagccugcccagaugcuggcuggugagcaacggcagcuaccugaacgagacccacuucagcgacgacaucgagcagcaggccgacaacaugaucaccgagcugcugcagaaggaguacauggacagacagggcaagaccccccugggccugguggaccuguucguguucagcaccagcuucuaccugaucagcaucuuccugcaccuggugaagauccccacccacagacacgugaucggcaagcccugccccaagccccacagacugaaccacaugggcaucugcagcugcggccuguacaagcaccccggcgugcccgugaaguggaagagaugaggacuagucccuguucccagagcccacuuuuuuuucuuuuuuugaaauaaaauagccugucuuucagaucucaaaggcucuuuucagagccaccaaaaaaaaaaaaaaaaaaaaaaaaaaaaaaaaaaaaaaaaaaaaaaaaaaaaaaaaaaaaaaaaagaauu

SEQ ID NO: 28282 - RNA, 1714 nt, Artificial Sequence
  mRNA product Design a-1 (hSL-A64-N5) comprising derived and/or modified sequence from LASV(Nig08-A19;Clade III)__ADU56618__GPCmut5 (opt4)
aggagagucccgcagucggcguccagcggcucugcuuguucgugugugugucguugcaggccuuauucaagcuuaccaugggccagaucgugaccuucuuccaggaggugccccacgugaucgaggaggugaugaacaucgugcugaucgcccugagcauccuggccauccugaagggccuguacaacaucgccaccugcggccugaucggccuggugaccuuccugcugcugagcggcagaagcugcagcaugaccuacaagggcguguacgagcugcagacccuggagcugaacaugaacacccugaacaugaccaugccccugagcugcaccaagaacaacagccaccacuacaucauggugggcaacgagaccggccuggagcugacccugaccaacaccagccugcugcaccacaaguucugcaaccugagcgacgcccacaagaagaaccuguacgaccacacccugaugagcaucaucagcaccuuccaccugagcauccccaacuucaaccaguacgaggccaugagcugcgacuucaacggcggcaagaucaccgugcaguacaaccugagccacagcuacgccaucgacgccgccaaccacugcggcaccguggccaacggcgugcugcagaccuucaugagaauggccuggggcggcagcuacaucgcccuggacagcggcugcggcaagugggacugcaucaugaccagcuaccaguaccugaucauccagaacaccaccugggaggaccacugccaguucagcagacccagccccaucggcuaccugggccugcugagccagagaaccagagacaucuacaucagcagaagacugcugggcaccuucaccuggacccugagcgacagcgagggcaacgagacccccggcggcuacugccugaccagauggaugcugaucgaggccgagcugaagugcuucggcaacaccgccguggccaagugcaacgagaagcacgacgaggaguucugcgacaugcugagacuguucgacuucaacaagcaggccaucagaagacugaaggcccccgcccagaugagcauccagcugaucaacaaggccgugaacgcccugaucaacgaccagcugaucaugaagaaccaccugagagacaucaugugcauccccuacugcaacuacagcaaguacugguaccugaaccacaccagcaccggcagaaccagccugcccagaugcuggcuggugagcaacggcagcuaccugaacgagacccacuucagcgacgacaucgagcagcaggccgacaacaugaucaccgagaugcugcagaaggaguaccuggacagacagggcaagaccccccugggccugguggaccuguucguguucagcaccagcuucuaccugaucagcaucuuccugcaccuggugaagauccccacccacagacacaucgugggcaagcccugccccaagccccacagacugaaccacaugggcaucugcagcugcggccuguacaagcagcccggcgugcccgugagauggaagagaugaggacuagucccuguucccagagcccacuuuuuuuucuuuuuuugaaauaaaauagccugucuuucagaucucaaaggcucuuuucagagccaccaaaaaaaaaaaaaaaaaaaaaaaaaaaaaaaaaaaaaaaaaaaaaaaaaaaaaaaaaaaaaaaaagaauu

SEQ ID NO: 28283 - RNA, 1717 nt, Artificial Sequence
  mRNA product Design a-1 (hSL-A64-N5) comprising derived and/or modified sequence from LASV(G1180-SLE-2010;Clade IV)__AIT17168__GPCmut5 (opt4)
aggagagucccgcagucggcguccagcggcucugcuuguucgugugugugucguugcaggccuuauucaagcuuaccaugggccagaucgugaccuucuuccaggaggugccccacgugaucgaggaggugaugaacaucgugcugaucgcccugagcauccuggccgugcugaagggccuguacaacuucgccaccugcggccuggugggccugcugaccuuccugcugcugugcggcagaagcugcaccgccagcagauacaagggcguguacgagcugcagacccuggagcugaacauggagacccugaacaugaccaugccccugagcugcaccaagaacaacagccaccacuacaucauggugggcaacgagaccggccuggagcugacccugaccaacaccagcaucaucaaccacaaguucugcaaccugagcgacgcccacaagaagaaccuguacgaccacgcccugaugagcaucaucagcaccuuccaccugagcauccccaacuucaaccaguacgaggccaugagcugcgacuucaacggcggcaagaucagcgugcaguacaaccugagccacagcuacgccggcgacgccgccaaccacugcggcaccguggccaacggcgugcugcagaccuucaugagaauggccuggggcggcagcuacaucgcccuggacagcggcugcggcagcugggacugcaucaugaccagcuaccaguaccugaucauccagaacaccaccugggaggaccacugccaguucagcagacccagccccaucggcuaccugggccugcugagccagagaaccagagacaucuacaucagcagaagacugcugggcaccuucaccuggacccugagcgacagcgagggcaaggacacccccggcggcuacugccugaccagauggaugcugaucgaggccgagcugaagugcuucggcaacaccgccguggccaagugcaacgagaagcacgacgaggaguucugcgacaugcugagacuguucgacuucaacaagcaggccauccagagacugaaggcccccgcccagaugagcauccagcugaucaacaaggccgugaacgcccugaucaacgaccagcugaucaugaagaaccaccugagagacaucaugugcauccccuacugcaacuacagcaaguacugguaccugaaccacaccaccaccggcaagaccagccugcccaagugcuggcuggugagcaacggcagcuaccugaacgagacccacuucagcgacgacaucgagcagcaggccgacaacaugaucaccgagaugcugcagaaggaguacauggagagacagggcaagaccccccugggccugguggaccuguucguguucagcaccagcuucuaccugaucagcaucuuccugcaccuggugaagauccccacccacagacacaucgugggcaagagcugccccaagccccacagacugaaccacaugggcaucugcagcugcggccuguacaagcagcccggcgugcccgugaaguggaagagaugaggacuagucccuguucccagagcccacuuuuuuuucuuuuuuugaaauaaaauagccugucuuucagaucucaaaggcucuuuucagagccaccaaaaaaaaaaaaaaaaaaaaaaaaaaaaaaaaaaaaaaaaaaaaaaaaaaaaaaaaaaaaaaaaagaauu

SEQ ID NO: 28284 - RNA, 1717 nt, Artificial Sequence
  mRNA product Design a-1 (hSL-A64-N5) comprising derived and/or modified sequence from LASV(G1442-SLE-2011;Clade IV)__AIT17180__GPCmut5 (opt4)
aggagagucccgcagucggcguccagcggcucugcuuguucgugugugugucguugcaggccuuauucaagcuuaccaugggccagaucgugaccuucuuccaggaggugccccacgugaucgaggaggugaugaacaucgugcugaucgcccugagcauccuggccgugcugaagggccuguacaacguggccaccugcggccugaucggccuggugaccuuccugcugcugugcggcagaagcugcaccaccacccuguacaagggcguguacgagcugcagacccuggagcugaacauggagacccugaacaugaccaugccccugagcugcaccaagaacaacagccaccacuacaucagagugggcaacgagaccggccuggagcugacccugaccaacaccagcaucaucaaccacaaguucugcaaccugagcgacgcccacaagaagaaccuguacgaccacgcccugaugagcaucaucagcaccuuccaccugagcauccccaacuucaaccaguacgaggccaugagcugcgacuucaacggcggcaagaucagcgugcaguacaaccugagccacagcuacgccggcgacgccgccaaccacugcggcaccguggccaacggcgugcugcagaccuucaugagaauggccuggggcggcagcuacaucgcccuggacagcggcugcggcaacugggacugcaucaugaccagcuaccaguaccugaucauccagaacaccaccugggacgaccacugccaguucagcagacccagccccaucggcuaccugggccugcugagccagagaaccagagacguguacaucagcagaagacugcugggcaccuucaccuggacccugagcgacagcgagggcaaggacacccccggcggcuacugccugaccagauggaugcugaucgaggccgagcugaagugcuucggcaacaccgccguggccaagugcaacgagaagcacgacgaggaguucugcgacaugcugagacuguucgacuucaacaagcaggccauccagagacugaaggcccccgcccagaugagcauccagcugaucaacaaggccgugaacgcccugaucaacgaccagcugaucaugaagaaccaccugagagacaucaugugcauccccuacugcaacuacagcaaguacugguaccugaacaacaccgccaccggcaagaccagccugcccaagugcuggcugaucagcaacggcagcuaccugaacgagacccacuucagcgacgacaucgagcaggaggccgacaacaugaucaccgagaugcugcagaaggaguacauggagagacagggcaagaccccccugggccugguggaccuguucguguucagcaccagcuucuaccugaucagcaucuuccugcaccuggugaagauccccacccacagacacaucgugggcaagagcugccccaagccccacagacugaaccacaugggcaucugcagcugcggccuguacaagcagcccggcgugcccgugagauggaagagaugaggacuagucccuguucccagagcccacuuuuuuuucuuuuuuugaaauaaaauagccugucuuucagaucucaaaggcucuuuucagagccaccaaaaaaaaaaaaaaaaaaaaaaaaaaaaaaaaaaaaaaaaaaaaaaaaaaaaaaaaaaaaaaaaagaauu

SEQ ID NO: 28285 - RNA, 1717 nt, Artificial Sequence
  mRNA product Design a-1 (hSL-A64-N5) comprising derived and/or modified sequence from LASV(G3010-SLE-2013;Clade IV)__AIT17344__GPCmut5 (opt4)
aggagagucccgcagucggcguccagcggcucugcuuguucgugugugugucguugcaggccuuauucaagcuuaccaugggccagaucgugaccuucuuccaggaggugccccacgugaucgaggaggugaugaacaucgugcugaucgcccugagcauccuggccgugcugaagggccuguacaacuucgccaccugcggccuggugggccuggugaccuuccugcugcugugcggcagaagcugcaccaccagccuguacaagggcguguacgagcugcagacccuggagcugaacauggagacccugaacaugaccaugccccugagcugcaccaagaacaacagccaccacuacaucauggugggcaacgagaccggccuggagcugacccugaccaacaccagcaucaucaaccacaaguucugcaaccugagcgacgcccacaagaagaaccuguacaaccacgcccugaugagcaucaucagcaccuuccaccugagcauccccaacuucaaccaguacgaggccaugagcugcgacuucaacggcggcaagaucagcgugcaguacaaccugagccacagcuacgccggcgacgccgccagccacugcggcaccguggccaacggcgugcugcagaccuucaugagaauggccuggggcggcagcuacaucgcccuggacagcggcugcggcaagugggacugcaucaugaccagcuaccaguaccugaucauccagaacaccaccugggaggaccacugccaguucagcagacccagccccaucggcuaccugggccugcugagccagagaaccagagacaucuacaucagcagaagacugcugggcaccuucaccuggacccugagcgacagcgagggcaaggacacccccggcggcuacugccugaccagauggaugcugaucgaggccgagcugaagugcuucggcaacaccgccguggccaagugcaacgagaagcacgacgaggaguucugcgacaugcugagacuguucgacuucaacaagcaggccauccagagacugaagacccccgcccagaugagcauccagcugaucaacaaggccgugaacgcccugaucaacgaccagcugaucaugaagaaccaccugagagacaucaugugcauccccuacugcaacuacagcaaguacugguaccugaaccacaccaccaccggcaagaccagccugcccaagugcuggcuggugagcaacggcagcuaccugaacgagacccacuucagcgacgacaucgagcagcaggccgacaacaugaucaccgagaugcugcagaaggaguacauggagagacagggcaagaccccccugggccugguggaccuguucguguucagcaccagcuucuaccugaucagcaucuuccugcaccuggugaagauccccacccacagacacaucgugggcaagagcugccccaagccccacagacugaaccacaugggcaucugcagcugcggccuguacaagcagcccggcgugcccgugagauggaagagaugaggacuagucccuguucccagagcccacuuuuuuuucuuuuuuugaaauaaaauagccugucuuucagaucucaaaggcucuuuucagagccaccaaaaaaaaaaaaaaaaaaaaaaaaaaaaaaaaaaaaaaaaaaaaaaaaaaaaaaaaaaaaaaaaagaauu

SEQ ID NO: 28286 - RNA, 1717 nt, Artificial Sequence
  mRNA product Design a-1 (hSL-A64-N5) comprising derived and/or modified sequence from LASV(G502-SLE-2009;Clade IV)__AIT17126__GPCmut5 (opt4)
aggagagucccgcagucggcguccagcggcucugcuuguucgugugugugucguugcaggccuuauucaagcuuaccaugggccagaucgugaccuucuuccaggaggugccccacgugaucgaggaggugaugaacaucgugcugaucgcccugagcauccuggccgugcugaagggccuguacaacuucgccaccugcggccuggugggccugcugaccuuccugcugcugugcggcagaagcugcaccaccggccuguacaagggcguguacgagcugcagacccuggagcugaacauggagacccugaacaugaccaugccccugagcugcaccaagaacaacagccaccacuacaucauggugggcaacgagaccggccuggagcugacccugaccaacaccagcaucaucaaccacaaguucugcaaccugagcgacgcccacaagaagaaccuguacgaccacgcccugaugagcaucaucagcaccuuccaccugagcauccccaacuucaaccaguacgaggccaugagcugcgacuucaacggcggcaagaucagcgugcaguacaaccugagccacagcuacgccggcgacgccgccgaccacugcggcaccguggccaacggcgugcugcagaccuucaugagaauggccuggggcggcagcuacaucgcccuggacagcggcugcggcagaugggacugcaucaugaccagcuaccaguaccugaucauccagaacaccaccugggaggaccacugccaguucagcagacccagccccaucggcuaccugggccugcugagccagagaaccagagacaucuacaucagcagaagacugcugggcaccuucaccuggacccugagcgacagcgagggcaaggacacccccggcggcuacugccugaccagauggaugcugaucgaggccgagcugaagugcuucggcaacaccgccguggccaagugcaacgagaagcacgacgaggaguucugcgacaugcugagacuguucgacuucaacaagcaggccauccagagacugaaggcccccgcccagaugagcauccagcugaucaacaaggccgugaacgcccugaucaacgaccagcuggugaugaagaaccaccugagagacaucaugugcauccccuacugcaacuacagcagauacugguaccugaaccacaccaccaccggcagaaccagccugcccaagugcuggcuggugagcaacggcagcuaccugaacgagacccacuucagcgacgacaucgagcagcaggccgacaacaugaucaccgagaugcugcagaaggaguacauggagagacagggcaagaccccccugggccugguggaccuguucguguucagcaccagcuucuaccugaucagcaucuuccugcaccuggugaagauccccacccacagacacaucgugggcaagagcugccccaagccccacagacugaaccacaugggcaucugcagcugcggccuguacaagcagcccggcgugcccgugaaguggaagagaugaggacuagucccuguucccagagcccacuuuuuuuucuuuuuuugaaauaaaauagccugucuuucagaucucaaaggcucuuuucagagccaccaaaaaaaaaaaaaaaaaaaaaaaaaaaaaaaaaaaaaaaaaaaaaaaaaaaaaaaaaaaaaaaaagaauu

SEQ ID NO: 28287 - RNA, 1717 nt, Artificial Sequence
  mRNA product Design a-1 (hSL-A64-N5) comprising derived and/or modified sequence from LASV(G733-SLE-2010;Clade IV)__AIT17154__GPCmut5 (opt4)
aggagagucccgcagucggcguccagcggcucugcuuguucgugugugugucguugcaggccuuauucaagcuuaccaugggccagaucgugaccuucuuccaggaggugccccacgugaucgaggaggugaugaacaucgugcugaucgcccugagcauccuggccgugcugaagggccuguacaacuucgccaccugcggcaucgugggccuggugagcuuccugcugcugugcggcagaagcugcaccaccagccuguacaagggcguguacgagcugcagacccuggagcugaacauggagacccugaacaugaccaugccccugagcugcaccaagaacaacagccaccacuacaucauggugggcaacgagaccggccuggagcugacccugaccaacaccagcaucaucaaccacaaguucugcaaccugagcgacgcccacaagaagaaccuguacgaccacgcccugaugagcaucaucagcaccuuccaccugagcauccccaacuucaaccaguacgaggccaugagcugcgacuucaacggcggcaagaucagcgugcaguacaaccugagccacagcuacgccggcgacgccgccaaccacugcggcaccaucgccaacggcgugcugcagaccuucaugagaauggccuggggcggcagcuacaucgcccuggacagcggcugcgacagaugggacugcaucaugaccagcuaccaguaccugaucauccagaacaccaccugggaggaccacugccaguucagcagacccagccccaucggcuaccugggccugcugagccagagaaccagagacaucuacaucagcagaagacugcugggcaccuucaccuggacccugagcgacagcgagggcaaggacacccccggcggcuacugccugaccagauggaugcugaucgaggccgagcugaagugcuucggcaacaccgccguggccaagugcaacgagaagcacgacgaggaguucugcgacaugcugagacuguucgacuucaacaagcaggccauccagagacugaaggcccccgcccagaugagcauccagcugaucaacaaggccgugaacgcccugaucaacgaccagcugaucaugaagaaccaccugagagacaucaugugcauccccuacugcaacuacagcaaguacugguaccugaaccacaccaccaccggcaagaccagccugcccaagugcuggcuggugagcaacggcagcuaccugaacgagacccacuucagcgacgacaucgagcagcaggccgacaacaugaucaccgagaugcugcagaaggaguacauggagagacagggcaagaccccccugggccugguggaccuguucguguucagcaccagcuucuaccugaucagcaucuuccugcaccuggugaagauccccacccacagacacguggugggcaagagcugccccaagccccacagacugaaccacaugggcaucugcagcugcggccuguacggccagcccggcgugcccgugaaguggaagagaugaggacuagucccuguucccagagcccacuuuuuuuucuuuuuuugaaauaaaauagccugucuuucagaucucaaaggcucuuuucagagccaccaaaaaaaaaaaaaaaaaaaaaaaaaaaaaaaaaaaaaaaaaaaaaaaaaaaaaaaaaaaaaaaaagaauu

SEQ ID NO: 28288 - RNA, 1717 nt, Artificial Sequence
  mRNA product Design a-1 (hSL-A64-N5) comprising derived and/or modified sequence from MOPV/LASV reassortant(IGS-1;Clade IV)__AFY05576__GPCmut5 (opt4)
aggagagucccgcagucggcguccagcggcucugcuuguucgugugugugucguugcaggccuuauucaagcuuaccaugggccagaucgugaccuucuuccaggaggugccccacgugaucgaggaggugaugaacaucgugcugaucgcccugagcgugcuggccgugcugaagggccuguacaacuucgccaccugcggccuggugggccuggugaccuuccugcugcugugcggcagaagcugcaccaccagccuguacaagggcguguacgagcugcagacccuggagcugaacauggagacccugaacaugaccaugccccugagcugcaccaagaacaacagccaccacuacaucauggugggcaacgagaccggccuggagcugacccugaccaacaccagcaucaucaaccacaaguucugcaaccugagcgacgcccacaagaagaaccuguacgaccacgcccugaugagcaucaucagcaccuuccaccugagcauccccaacuucaaccaguacgaggccaugagcugcgacuucaacggcggcaagaucagcgugcaguacaaccugagccacagcuacgccggcgacgccgccaaccacugcggcaccguggccaacggcgugcugcagaccuucaugagaauggccuggggcggcagcuacaucgcccuggacagcggcugcggcaacugggacugcaucaugaccagcuaccaguaccugaucauccagaacaccaccugggaggaccacugccaguucagcagacccagccccaucggcuaccugggccugcugagccagagaaccagagacaucuacaucagcagaagacugcugggcaccuucaccuggacccugagcgacagcgagggcgaggacacccccggcggcuacugccugaccagauggaugcugaucgaggccgagcugaagugcuucggcaacaccgccguggccaagugcaacgagaagcacgacgaggaguucugcgacaugcugagacuguucgacuucaacaagcaggccauccagagacugaaggcccccgcccagaugagcauccagcugaucaacaaggccgugaacgcccugaucaacgaccagcugaucaugaagaaccaccugagagacaucaugugcauccccuacugcaacuacagcaaguacugguaccugaaccacaccaccaccggcagaaccagccugcccaagugcuggcuggugagcaacggcagcuaccugaacgagacccacuucagcgacgacaucgagcagcaggccgacaacaugaucaccgagaugcugcagaaggaguacauggagagacagggcaagaccccccugggccugguggaccuguucguguucagcaccagcuucuaccugaucagcaucuuccugcaccuggugaagauccccacccacagacacaucgugggcaagagcugccccaagccccacagacugaaccacaugggcaucugcagcugcggccuguacaagcagcccggcgugcccgugaaguggaagagaugaggacuagucccuguucccagagcccacuuuuuuuucuuuuuuugaaauaaaauagccugucuuucagaucucaaaggcucuuuucagagccaccaaaaaaaaaaaaaaaaaaaaaaaaaaaaaaaaaaaaaaaaaaaaaaaaaaaaaaaaaaaaaaaaagaauu

SEQ ID NO: 28289 - RNA, 1717 nt, Artificial Sequence
  mRNA product Design a-1 (hSL-A64-N5) comprising derived and/or modified sequence from LASV(LM765-SLE-2012;Clade IV)__AIT17814__GPCmut5 (opt4)
aggagagucccgcagucggcguccagcggcucugcuuguucgugugugugucguugcaggccuuauucaagcuuaccaugggccagaucgugaccuucuuccaggaggugccccacgugaucgaggaggugaugaacaucgugcugaucgcccugagcauccuggccgugcugaagggccuguacaacuucgccaccugcggccuggugggccuggugaccuuccugcugcugugcggcagaagcugcaccaccagccuguacaagggcguguacgagcugcagacccuggagcugaacauggagacccugaacaugaccaugccccugagcugcaccaagaacaacagccaccacuacaucauggugggcaacgagaccggccuggagcugacccugaccaacaccagcaucaucgaccacaaguucugcaaccugagcgacgcccacagaaagaaccuguacgaccacgcccugaugagcaucaucagcaccuuccaccugagcauccccaacuucaaccaguacgaggccaugagcugcgacuucaacggcggcaagaucagcgugcaguacaaccugagccacagcuacgccaaggacgccgccgaccacugcggcaccguggccaacggcgugcugcagaccuucaugagaauggccuggggcggcagcuacaucgcccuggacagcggcugcggcagaugggacugcaucaugaccagcuaccaguaccugaucauccagaacaccaccugggaggaccacugccaguucagcagacccagccccaucggcuaccugggccugcugagccagagaaccagagacaucuacaucagcagaagacugcugggcaccuucaccuggacccugagcgacagcgagggcaaggacacccccggcggcuacugccugaccagauggaugcugaucgaggccgagcugaagugcuucggcaacaccgccguggccaagugcaacgagaagcacgacgaggaguucugcgacaugcugagacuguucgacuucaacaagcaggccauccagagacugaaggcccccgcccagaugagcauccagcugaucaacaaggccgugaacgcccugaucaacgaccagcugaucaugaagaaccaccugagagacaucaugugcauccccuacugcaacuacagcaaguacugguaccugaaccacaccaccaccggcaagaccagccugcccaagugcuggcuggugagcaacggcagcuaccugaacgagacccacuucagcgacgacaucgagcagcaggccgacaacaugaucaccgagaugcugcagaaggaguacauggagagacagggcaagaccccccugggccugguggaccuguucguguucagcaccagcuucuaccugaucagcaucuuccugcaccuggugaagauccccacccacagacacaucgugggcaagcccugccccaagccccacagacugaaccacaugggcaucugcagcugcggccuguacaagcagcccggcgugcccgugaaguggaagagaugaggacuagucccuguucccagagcccacuuuuuuuucuuuuuuugaaauaaaauagccugucuuucagaucucaaaggcucuuuucagagccaccaaaaaaaaaaaaaaaaaaaaaaaaaaaaaaaaaaaaaaaaaaaaaaaaaaaaaaaaaaaaaaaaagaauu

SEQ ID NO: 28290 - RNA, 1717 nt, Artificial Sequence
  mRNA product Design a-1 (hSL-A64-N5) comprising derived and/or modified sequence from LASV(LM776-SLE-2012;Clade IV)__AIT17824__GPCmut5 (opt4)
aggagagucccgcagucggcguccagcggcucugcuuguucgugugugugucguugcaggccuuauucaagcuuaccaugggccagaucgugaccuucuuccaggaggugccccacgugaucgaggaggugaugaacaucgugcugaucgcccugagcauccuggccgugcugaagggccuguacaacuucgccaccugcggccuggugggccuggugaccuuccugcugcugugcggcagaagcugcaccaccagcguguacaagggcguguacgagcugcagacccuggagcugaacauggagacccugaacaugaccaugccccugagcugcaccaagaacaacagccaccacuacaucauggugggcaacgagaccggccuggagcugacccugaccaacaccagcaucaucaaccacaaguucugcaaccugagcgacgcccacaagaagaaccuguacgaccacgcccugaugagcaucaucagcaccuuccaccugagcauccccaacuucaaccaguacgaggccaugagcugcgacuucaacggcggcaagaucagcgugcaguacaaccugagccacagcuacgccggcgacgccgccaaccacugcggcaccguggccaacggcgugcugcagaccuucaugagaauggccuggggcggcagcuacaucgcccuggacagcggcugcggcaagugggacugcaucaugaccagcuaccaguaccugaucauccagaacaccaccugggaggaccacugccaguucagcagacccagccccaucggcuaccugggccugcugagccagagaaccagagacaucuacaucagcagaagacugcugggcaccuucaccuggacccugagcgacagcgagggcaaggacacccccggcggcuacugccugaccagauggaugcugaucgaggccgagcugaagugcuucggcaacaccgccguggccaagugcaacgagaagcacgacgaggaguucugcgacaugcugagacuguucgacuucaacaagcaggccauccagagacugaaggcccccgcccagaugagcauccagcugaucaacaaggccgugaacgcccugaucaacgaccagcugaucaugaagaaccaccugagagacaucaugugcauccccuacugcaacuacagcaaguacugguaccugaaccacaccaccaccggcaagaccagccugcccaagugcuggcuggugagcaacggcagcuaccugaacgagacccacuucagcgacgacaucgagcagcaggccgacaacaugaucaccgagaugcugcagaaggaguacauggagagacagggcaagaccccccugggccugguggaccuguucguguucagcaccagcuucuaccugaucagcaucuuccugcaccuggugaagauccccacccacagacacaucgugggcaagagcugccccaagccccacagacugaaccacaugggcaucugcagcugcggccuguacaagcagcccggcgugcccgugagauggaagagaugaggacuagucccuguucccagagcccacuuuuuuuucuuuuuuugaaauaaaauagccugucuuucagaucucaaaggcucuuuucagagccaccaaaaaaaaaaaaaaaaaaaaaaaaaaaaaaaaaaaaaaaaaaaaaaaaaaaaaaaaaaaaaaaaagaauu

SEQ ID NO: 28291 - RNA, 1717 nt, Artificial Sequence
  mRNA product Design a-1 (hSL-A64-N5) comprising derived and/or modified sequence from LASV(Mad39;Clade IV)__ANH09722__GPCmut5 (opt4)
aggagagucccgcagucggcguccagcggcucugcuuguucgugugugugucguugcaggccuuauucaagcuuaccaugggccagaucgugaccuucuuccaggaggugccccacgugaucgaggaggugaugaacaucgugcugaucgcccugagcauccuggccgugcugaagggccuguacaacguggccaccugcggccugaucggccuggugaccuuccugcugcugugcggcagaagcugcaccaccacccuguacaagggcguguacgagcugcaggcccuggagcugaacauggagacccugaacaugaccaugccccugagcugcaccaagaacaacagccaccacuacaucagagugggcaacgagaccggccuggagcugacccugaccaacaccagccugaucaaccacaaguucugcaaccugagcgacgcccacaagaagaaccuguacgaccacgcccugaugagcaucaucagcaccuuccaccugagcauccccaacuucaaccaguacgaggccaugagcugcgacuucaacgacggcaagaucagcgugcaguacaaccugagccacaccuacgccggcgacaccgccaaccacugcggcaccguggccaacggcgugcugcagaccuucaugagaauggccuggggcggcagcuacaucgcccuggacagcggcugcggcggcugggacugcaucaugaccagcuaccaguaccugaucauccagaacaccaccugggaggaccacugccaguucagcagacccagccccaucggcuaccugggccugcugagccagagaaccagagacaucuacaucagcagaagacugcugggcaccuucaccuggacccugagcgacagcgagggcaaggacacccccggcggcuacugccugaccagauggaugcugaucgaggccgagcugaagugcuucggcaacaccgccguggccaagugcaacgagaagcacgacgaggaguucugcgacaugcugagacuguucgacuucaacaagcaggccauccagagacugaaggcccccgcccagaugagcauccagcugaucaacaaggccgugaacgcccugaucaacgaccagcugaucaugaagaaccaccugagagacaucaugugcauccccuacugcaacuacagcaaguacugguaccugaaccacaccgugaccggcaagaccagccugcccaagugcuggcuggugagcaacggcagcuaccugaacgagacccacuucagcgacgacaucgagcagcaggccgacaacaugaucaccgagaugcugcagaaggaguacauggagagacagggcaagaccccccugggccugguggaccuguucguguucagcaccagcuucuaccugaucagcaucuuccugcaccuggugaagauccccacccacagacacguggugggcaagcccugccccaagccccacagacugaaccacaugggcaucugcagcugcggcuucuacaagcagcccggcgugcccgugagauggaagagaugaggacuagucccuguucccagagcccacuuuuuuuucuuuuuuugaaauaaaauagccugucuuucagaucucaaaggcucuuuucagagccaccaaaaaaaaaaaaaaaaaaaaaaaaaaaaaaaaaaaaaaaaaaaaaaaaaaaaaaaaaaaaaaaaagaauu

SEQ ID NO: 28292 - RNA, 1717 nt, Artificial Sequence
  mRNA product Design a-1 (hSL-A64-N5) comprising derived and/or modified sequence from LASV(Z0947-SLE-2011;Clade IV)__AIT17840__GPCmut5 (opt4)
aggagagucccgcagucggcguccagcggcucugcuuguucgugugugugucguugcaggccuuauucaagcuuaccaugggccagaucgugaccuucuuccaggaggugccccacgugaucgaggaggugaugaacaucgugcugaucgcccugagcauccuggccgugcugaagggccuguacaacuucgccaccugcggccuggugggccuggugaccuuccugcugcugugcggcagaagcugcaccaucagccuguacaagggcguguacgagcugcagacccuggagcugaacauggagacccugaacaugaccaugccccugagcugcaccaagaacaacagccaccacuacaucauggugggcaacgagaccggccuggagcugacccugaccaacaccagcaucaucaaccacaaguucugcaaccugagcgacgcccacaagaagaaccuguacgaccacgcccugaugagcaucaucagcaccuuccaccugagcauccccaacuucaaccaguacgaggccaugagcugcgacuucaacggcggcaagaucagcgugcaguacaaccugagccacagcuacgccggcgacgccgccaaccacugcggcaccguggccaacggcgugcugcagaccuucaugagaauggccuggggcggcagcuacaucgcccuggacagcggcugcgacagaugggacugcaucaugaccagcuaccaguaccugaucauccagaacaccaccugggaggaccacugccaguucagcagacccagccccaucggcuaccugggccugcugagccagagaaccagagacaucuacaucagcagaagacugcugggcaccuucaccuggacccugagcgacagcgagggcaaggacacccccggcggcuacugccugaccagauggaugcugaucgaggccgagcugaagugcuucggcaacaccgccguggccaagugcaacgagaagcacgacgaggaguucugcgacaugcugagacuguucgacuucaacaagcaggccauccagagacugaaggcccccgcccagaugagcauccagcugaucaacaaggccgugaacgcccugaucaacgaccagcugaucaugaagaaccaccugagagacaucaugugcauccccuacugcaacuacagcaaguacugguaccugaaccacaccaccaccggcaagaccagccugcccaagugcuggcuggugagcaacggcagcuaccugaacgagacccacuucagcgacgacaucgagcagcaggccgacaacaugaucaccgagaugcugcagaaggaguacauggagagacagggcaagaccccccugggccugguggaccuguucguguucagcaccagcuucuaccugaucagcaucuuccugcaccuggugaagauccccacccacagacacaucgugggcaagcccugccccaagccccacagacugaaccacaugggcaucugcagcugcggccuguacaagcagcccggcgugcccgugaaguggaagagaugaggacuagucccuguucccagagcccacuuuuuuuucuuuuuuugaaauaaaauagccugucuuucagaucucaaaggcucuuuucagagccaccaaaaaaaaaaaaaaaaaaaaaaaaaaaaaaaaaaaaaaaaaaaaaaaaaaaaaaaaaaaaaaaaagaauu

SEQ ID NO: 28293 - RNA, 1717 nt, Artificial Sequence
  mRNA product Design a-1 (hSL-A64-N5) comprising derived and/or modified sequence from LASV(Josiah;Clade IV)__NP_694870__GPCmut5 (opt5)
aggagagucccgcagucggcguccagcggcucugcuuguucgugugugugucguugcaggccuuauucaagcuuaccaugggccagaucgugaccuucuuucaagaggucccccacguuauugaagaggugaugaacaucgugcugauugcccucagcguccuggcugugcuuaaggggcuguacaauuucgccacaugcggacucguuggccuggugacguuucuucugcucugugggagauccugcaccacaucucuguauaaaggagucuacgaacugcagacccucgagcugaacauggaaacacuuaauaugaccaugccucugagcuguacaaagaacaauucccaucacuauaucauggugggcaacgagaccgggcucgagcugacgcuuaccaauacaucuauuaucaaccauaaauucugcaaucugagcgacgcgcacaagaaaaaccucuacgaucaugcucugauguccaucauuucuaccuuucaccugagcaucccgaauuucaaccaguaugaagccauguccugugacuuuaauggaggcaagauuagcguucaguacaaccucucucacuccuaugccggcgaugcugccaaucauugcgggacaguggcuaacggaguccugcaaaccuucaugcggauggccuggggcgggagcuacaucgcgcuugacucuggauguggcaacugggauugcauuaugacguccuaccaguaucugaucauucagaauacaaccugggaggaccacugucaguuuagccgccccucuccuaucggguaccucggacugcuuucccaaagaacacgggauaucuauauuagccgcagacugcucggcaccuucaccuggacacuguccgacucugaaggcaaggauacgcccgggggauacugccugacccgguggaugcucaucgaggccgagcugaaauguuuuggcaacacagcuguggccaagugcaaugaaaaacaugacgaggaguucugcgauaugcuucgccuguuugacuucaacaagcaggcuauucagagacucaaagccccugcgcagaugagcauccaacugauuaauaaggccgugaacgcucuuaucaaugaucagcugaucaugaagaaccaccuccgggacauuauguguauccccuauugcaauuacuccaaauauugguaccugaaccacaccacaaccgggcgcacgagccugccuaaguguuggcucgucucuaauggauccuaccugaacgaaacacauuucagcgacgauauugaacagcaagccgacaauaugaucaccgagaugcuucagaaagaguauauggaaagacagggcaagaccccgcuggggcucguugaucuguuuguguucucuaccagcuuuuaccugauuuccaucuuccuucaccucgugaaaauccccacacaucggcacauugucggaaagucuugcccuaaaccccaucgccugaaccacaugggcaucuguagcugcggccuguauaagcagccuggggugcccguuaaguggaaaagaugaggacuagucccuguucccagagcccacuuuuuuuucuuuuuuugaaauaaaauagccugucuuucagaucucaaaggcucuuuucagagccaccaaaaaaaaaaaaaaaaaaaaaaaaaaaaaaaaaaaaaaaaaaaaaaaaaaaaaaaaaaaaaaaaagaauu

SEQ ID NO: 28294 - RNA, 1714 nt, Artificial Sequence
  mRNA product Design a-1 (hSL-A64-N5) comprising derived and/or modified sequence from LASV(LP;Clade I)__AAF86701__GPCmut5 (opt5)
aggagagucccgcagucggcguccagcggcucugcuuguucgugugugugucguugcaggccuuauucaagcuuaccaugggccagaucauuaccuucuuucaagaggugccccacgucaucgaagagguuaugaacauugugcugaucgcccucagccugcuugcuauucugaaggggcucuacaauaucgccacaugcggaaucauuggccugguggcguuccuuuuucugugugggaaauccugcucucucacgcugaagggaggcuaugaacugcagacccucgagcugaacauggaaacacuuaauaugaccaugccucugagcuguaccaaaaacuccucucaucacuacaucagagucgggaaugagacaggacucgagcugacacuuaccaacacgagcauuaucaaucauaaguucugcaaccuguccgacgcucacaaaaagaaucucuaugaucaugcccugaugucuauuaucagcaccuuucaccuguccauuccgaacuucaaucaguacgaagccaugagcugugacuuuaacggcggcaagaucucugugcaguauaaucucucccacagcuacgcuggggaugccgcugagcauugcggaacaguugccaacggcgugcugcaaaccuucaugcggauggcguggggagggcgcuauaucgcccuugacucuggcugugggaauugggauugcauuaugacauccuaccaguaccugaucauucagaacaccacgugggaagaccacugucaguuuagcagacccucuccuaucggauaucucggccugcuuucccaacggacacgcgauauuuacaucagcagacggcugcucggcaccuucacauggacccuguccgacucugaggggaacgagacccccggaggcuauugccugacacgcuggaugcucaucgaagcugagcugaaauguuuugggaauacggccgucgcuaagugcaacgaaaaacaugaugaggaguucugcgacaugcuuagacuguuugauuucaauaagcaggccauucggcgccucaaagcgccugcccagaugagcauccagcugauuaacaaggcugugaaugcccuuaucaacgaccaacugauuaugaagaaucaccucagagauaucauguguauccccuacugcaacuauuccaaauacugguaucugaaucacaccagcucuggacggacaucccugccuaaguguuggcucauuagcaacggcucuuaccugaaugaaacccaguucagcgacgacaucgagcagcaagcugauaacaugauuacagaaaugcuucagaaagaguacaucgaacgccaggggaagaccccgcugggacucguugacauuuuuaucuucuccacgucuuuuuaucugauuagcaucuuccugcaucuuaucaaaauucccacacacagacauaucgugggcaagccuugccccaaaccucaccggcucaaucauaugggcgucuguuccugcgggcuguacaagcaccccggagugccgaccaaguggaaacgcugaggacuagucccuguucccagagcccacuuuuuuuucuuuuuuugaaauaaaauagccugucuuucagaucucaaaggcucuuuucagagccaccaaaaaaaaaaaaaaaaaaaaaaaaaaaaaaaaaaaaaaaaaaaaaaaaaaaaaaaaaaaaaaaaagaauu

SEQ ID NO: 28295 - RNA, 1714 nt, Artificial Sequence
  mRNA product Design a-1 (hSL-A64-N5) comprising derived and/or modified sequence from LASV(803213;Clade II)__AAF86703__GPCmut5 (opt5)
aggagagucccgcagucggcguccagcggcucugcuuguucgugugugugucguugcaggccuuauucaagcuuaccaugggccagaucauuaccuucuuucaagaggugccccacgucaucgaagagguuaugaacauugugcugaucgcccucagccugcuugcuauucugaaggggaucuacaauguggccacaugcggacucuucggccugaucuccuuucuucugcucugugggagaucuugcagcgucacguauaaaggaguguacgaacugcagacccuggagcucaacauggcgaaucugaacaugacaaugccucuuuccuguaccaagaauaacucucaucacuauauuaugguuggcaaugaaacagggcuggagcucacccugacaaacaccagcaucauuaaucauaaauucugcaaccuuuccgacgcucacaagaaaaaucuguacgaucaugcccucaugucuaucauuagcacguuucaccuguccaucccgaacuucaaucaguaugaggccaugagcugugacuuuaacggaggcaagauuucugugcaguacaaucugucccacagcuucgcugucgaugccgcuaaccauugcggcaccaucgccaacggggugcuccaaacauuuaugcggauggcguggggaggcucuuauaucgcccuggacuccggguguggaaauugggauugcauuaugaccagcuaccaguaccuuaucauucagaacacaaccugggaagaccacugucaguucucucgccccuccccuaucggcuaucuggggcuccugagccaaagaacgcgggauauuuacaucucccgcagacuucugggaacauuuaccuggacacucucugacagcgagggcaaugaagcucccggcggguauugccugacccgguggaugcugaucgaggccgagcucaaguguuucggaaacaccgcuguugccaaaugcaaugaaaagcaugaugaggaauuuugcgacaugcugcgccuuuucgauuucaacaaacaggcgauuaagagacugaaaacgccugcccagauguccauccagcucauuaauaaggcugugaacgcccugaucaaugaccaacuuauuaugaagaaccaucugcgggauaucauguguauccccuacugcaauuauagccgcuacugguaucucaaccacacagucaccggcaaaacaucucugccuagauguuggcugguguccaaugggagcuaccucaacgagacccacuuuucugacgacauugaacagcaggcugauaauaugaucacagagaugcugcaaaaggaguacauggaccggcagggaaaaaccccgcuuggccugguggaucucuucgucuuuagcacguccuucuaucugauuucuaucuuucugcaccuuguuaagauucccacacaucgccacaucguggggaaaccuugccccaagccucauagacucaaccacaugggaauuuguagcugcggccuguacaaacaccccggcgugccggucaaguggaagcggugaggacuagucccuguucccagagcccacuuuuuuuucuuuuuuugaaauaaaauagccugucuuucagaucucaaaggcucuuuucagagccaccaaaaaaaaaaaaaaaaaaaaaaaaaaaaaaaaaaaaaaaaaaaaaaaaaaaaaaaaaaaaaaaaagaauu

SEQ ID NO: 28296 - RNA, 1714 nt, Artificial Sequence
  mRNA product Design a-1 (hSL-A64-N5) comprising derived and/or modified sequence from LASV(GA391;Clade III)__CAA36645__GPCmut5 (opt5)
aggagagucccgcagucggcguccagcggcucugcuuguucgugugugugucguugcaggccuuauucaagcuuaccaugggccagaucgugaccuucuuucaagaggucccccacguuauugaagaggugaugaacaucgugcugauugcccucagcauccuggcuauucuuaaggggcuguacaaugucgccacaugcggacucaucggccuggugacguuccuucugcucuccgggagaucuuguagccugaucuauaaaggaaccuacgaacugcagacacucgagcugaacauggaaacccuuaauaugacaaugccucuguccugcaccaagaacaauucucaucacuauauucggguuggcaacgagacagggcucgagcugacccuuacgaauaccagcauccugaaccauaaauuuuguaaucucuccgacgcgcacaagcgcaaccuguacgaucauucucugaugagcauuaucuccacauuccaccucagcauuccgaauuuuaaccaguaugaagcuaugucuugcgacuucaauggaggcaaaaucaccgugcaguacaaccugucccacagcuuugccgucgaugccgcuggccauugugggacacuugccaauggagugcugcaaaccuucaugagaauggcuuggggcgggucuuauauugcccucgacuccggaugcggcaacugggauuguaucaugacgagcuaccaguaccugaucauucagaacacaaccugggacgaucacugccaguuuucucggcccuccccuaucggguaucuuggacugcucagccaacgcacaagagacauuuacaucucccggcgccugcugggcaccuucaccuggacacucucugauagcgagggcaaugaaacgcccgggggauauugucugaccagauggaugcuuauugaggcggagcugaagugcuuuggcaacacagccguugcuaaguguaaugaaaaacaugacgaggaguucugcgauaugcuccggcuguuugacuucaacaagcaggccauccgcagacuuaaaaccccugcucagauguccauccagcugauuaauaaggccgugaacgcgcucaucaaugaucaacugauuaugaaaaaccaucugcgggacaucaugugcauucccuacuguaauuauagccgcuacugguaucucaaccacacaucuaccgggaagacgucccugccuagaugcuggcuuaucagcaauggaucuuaccugaacgaaacaaaguucagcgacgauaucgaacagcaggccgacaauaugauuaccgagaugcuccaaaaagaguacaucgaucggcagggcaagaccccgcuggggcuggucgaccuuuuuguguucuccacaucuuuuuaucucauuagcaucuuccugcaccuggugaaaauucccacccaccgccauaucgucggaaagccuugucccaaaccucacagacucaaccauaugggcauuugcuccuguggccuguacaagcagcccgggguuccggugcgguggaaaagaugaggacuagucccuguucccagagcccacuuuuuuuucuuuuuuugaaauaaaauagccugucuuucagaucucaaaggcucuuuucagagccaccaaaaaaaaaaaaaaaaaaaaaaaaaaaaaaaaaaaaaaaaaaaaaaaaaaaaaaaaaaaaaaaaagaauu

SEQ ID NO: 28297 - RNA, 1717 nt, Artificial Sequence
  mRNA product Design a-1 (hSL-A64-N5) comprising derived and/or modified sequence from LASV(AV;Clade V)__CCA30314__GPCmut5 (opt5)
aggagagucccgcagucggcguccagcggcucugcuuguucgugugugugucguugcaggccuuauucaagcuuaccaugggccagaucgugaccuucuuucaagaggucccccacguuauugaagaggugaugaacaucgugcugauugcccucagcauccuggcuguccuuaaggggcuguacaauauugccacaugcggacucaucggccugaucacguuccuucugcucugugggagauccugcucuagcaaccuguauaaaggaguguacgaacugcagucccucgaccugaauauggagacccuuaacaugacaaugccucugucuuguaccaagaauaacagccaucacuauauucggguuggcaaugauacagggcucgaacugacccuuacaaacaccuccauccugaaucauaaauuuugcaaccucucugacgcgcacaagaaagaucuguacgaccaugcucugaugagcauuaucuccacguuccaccucagcauuccgaauuuuaaccaguaugaggccaugucuugugauuucaauggaggcaagaucuccgugcaguacaaccugagccacucuuaugccauugacgcugccaaucauugcggcaccgucgcuaacgggauccuucaaacauuuaugcgcauggccuggggaggcuccuacaucgcgcuggauagcggguguggaaacugggacugcauuaugaccucuuaccaguaucucaucauucagaauacaaccugggagaaccacugucaguucuccagacccagcccuaucggcuaccuggggcuucugucccaacggacgcgcgauauuuauaucucuagacggcuccugggaacauuuaccuggacacugagcgacuccgaaggcaaugccacccccggcggguacugccucacccgcuggaugcugaucgaggcugaacuuaaguguuucggaaacacagccguggcuaaaugcaaugagaagcaugaugaggaauuuugcgacaugcugagacucuucgauuuuaacaaacaggccauuagccggcugaagucuccugcgcagauguccauccagcuuauuaauaaagccguuaacgcucugaucaaugaccaacucauuaugaagaaccaucugcgcgacaucauguguauccccuauugcaauuacagcaaguauugguaccugaaccacacgauuaccggcaaaacaucucucccuaaguguuggcuggugagcaauggguccuaccuuaacgagacccacuucucugaugacaucgaacagcaggccgauaauaugauuacagagaugcugcaaaaagaauauauggagagacagggaaagaccccgcucggccuggucgaccuguucguguuuagcacguccuucuaccuuaucagcauuuuucuccggcuggugaaaauccccacacaccgccauauugucgggaagccuugccccaaaccucacagacugaaccauaugggaaucuguucuugcggccucuauaagcagcccggcguuccggugcgguggaagcgcugaggacuagucccuguucccagagcccacuuuuuuuucuuuuuuugaaauaaaauagccugucuuucagaucucaaaggcucuuuucagagccaccaaaaaaaaaaaaaaaaaaaaaaaaaaaaaaaaaaaaaaaaaaaaaaaaaaaaaaaaaaaaaaaaagaauu

SEQ ID NO: 28298 - RNA, 1714 nt, Artificial Sequence
  mRNA product Design a-1 (hSL-A64-N5) comprising derived and/or modified sequence from LASV(Togo/2016/7082;Clade VI)__AMR44577__GPCmut5 (opt5)
aggagagucccgcagucggcguccagcggcucugcuuguucgugugugugucguugcaggccuuauucaagcuuaccaugggccagaucauuaccuucuuucaagaggugccccacgucaucgaagagguuaugaacauugugcugaucgcccucagccugcuugcuauucugaaggggguguacaaugucgccacaugcggaaucaucggccucgugacguuccuguuucuuugugggagauccugcucucugauuuauaaaggaagcuacgaacuccagacccuggagcugaacauggaaacacucaauaugaccaugccucuguccuguacaaagaacucuagccaucacuauauccggguuggcaaugagaccgggcuugagcugacacucaccaacacguccauuaucaaucauaaauucugcaaccugucugacgcgcacaagcgcaaucuuuacgaucaugcucugaugagcauucucuccaccuuucaccugagcaucccgaacuucaaucaguaugaagccaugucuugugacuuuaacggaggcaaaauuuccgugcaguacaaucugagccacgccuaugcugucgaugccgcugagcauugcggcacaguggccaacgggguucuccaaaccuucaugagaauggcguggggaggcucuuacaucgcccuggacuccggguguggaaauugggauugcaucaugacaagcuaccaguaucuuauuauccagaacaccacgugggaagaccacugucaguuuucucggcccuccccuauuggcuaccuggggcuccugagccaacgcacaagagauaucuauauuucccggcgccuucugggaaccuucacauggacccucucugacagcgagggcaacgagacccccggcggguacugccugacaagauggaugcugaucgaagcugagcucaaguguuuuggaaauacggccguggcuaagugcaacgaaaaacaugaugaggaguucugcgacaugcugcggcuuuuugauuucaauaagcaggccauccagcgccugaaauccccugcgcagaugagcauucaacucaucaacaaggccgucaaugcucugauuaacgaccagcuuaucaugaaaaaucaccugagagauaugauguguauucccuauugcaacuacucuaaguauugguaccucaaucacaccuccagcggccggacaucucugccuaaguguuggcuggugagcaacggguccuaccucaaugaaacccauuucucugacgacaucgagcagcaagccgauaacaugaucacagaaaugcugcagaaagaguauauugaccgccagggaaagaccccgcuuggccugguggaucucuuugucuucagcacguccuuuuaccugaucagcauuuuccugcaccuuaucaaaauucccacacauagacacaucguugggaagccuugccccaaaccucaucggcucaaucacaugggaauuuguucuugcggccuguauaagcagcccggcgugccgacccgcuggaaaagaugaggacuagucccuguucccagagcccacuuuuuuuucuuuuuuugaaauaaaauagccugucuuucagaucucaaaggcucuuuucagagccaccaaaaaaaaaaaaaaaaaaaaaaaaaaaaaaaaaaaaaaaaaaaaaaaaaaaaaaaaaaaaaaaaagaauu

SEQ ID NO: 28299 - RNA, 1714 nt, Artificial Sequence
  mRNA product Design a-1 (hSL-A64-N5) comprising derived and/or modified sequence from LASV(KAK-428;Clade n.d. (VII))__ANH09740__GPCmut5 (opt5)
aggagagucccgcagucggcguccagcggcucugcuuguucgugugugugucguugcaggccuuauucaagcuuaccaugggccagaucgugaccuucuuucaagaggucccccacguuauugaagaggugaugaacaucgugcugauugcccucagccugcuugcuauccugaaggggcucuacaauuucgccacaugcggagucauuggccugaucacguuucuucugcucugugggagauccugcucugcgaccuauaaaggacaguacgaacugcagacacuggagcucaacauggaaagccugaauaugaccaugccucuuuccuguacaaagaacaauucucaucacuauauccgggcuggcaacaauaccgggcuggagcucacacugaccaacacgagcauuaucucccauaaauucugcaaucuuucugacgcccacaagaaaaaccuguacgaucauacccucaugagcauuaucacaaccuuucaccuguccauuccgaauuucaaccaguaugaggccaugagcugugacuuuaauggaggcaagaucucuauucaauacaaccugucccacagcuaugcuggcgaugccgcucagcauugcgggacaguggccaauggaguucuccagaccuucaugcgcauggcguggggcgggucuuaccuggcccuugacuccggauguagaggcugggauugcaucaucagcucuuaccaguaucugauuauccaaaacacgacaugggacgaucacugucaguuuucccggcccagcccuauuggguaccucggauucgugucccagaagacccgcgacaucuauauuucuagacggcugcuuggcacauuuaccuggacccugagcgauuccgaaggccaugacaugcccgggggauacugccucacacgcuggaugcugaucgaggcugaucugaaauguuucggcaacacggccgucgcuaagugcaaugaaaaacacgacgaggaguuuugcgauauguggagacucuucgacuucaacaagcaggccauccaacggcugaaagcgccugcccagaugaauauucagcuuaucaacaaggcugugaaugcccugauuaacgaccaacucaugaugaagaaucaucugcgcgauaucauguguauucccuauugcaacuacagcaaauuuugguaucuuaauaacaccacaaccgggagaacaucucugccucgguguuggcucaucuccaauggaagcuaccugaacgaaacccacuucucugacgauaucgagcagcaggcugacaauaugauuacggaaaugcugcagaaggaguacauggaucgccaaggcaaaacaccgcucgggcugguugaccuuuuuguguucagcaccuccuuuuaucugaucaccauuuuccuccaccuggucaagauccccacacauagacacauugugggaaaaccuugccccaagccucaucggcugaaccacaugggcaucuguucuugcggccuuuacaaacagcccggggugccgguccgcuggaagagaugaggacuagucccuguucccagagcccacuuuuuuuucuuuuuuugaaauaaaauagccugucuuucagaucucaaaggcucuuuucagagccaccaaaaaaaaaaaaaaaaaaaaaaaaaaaaaaaaaaaaaaaaaaaaaaaaaaaaaaaaaaaaaaaaagaauu

SEQ ID NO: 28300 - RNA, 1714 nt, Artificial Sequence; identical to SEQ ID NO: 28294
  mRNA product Design a-1 (hSL-A64-N5) comprising derived and/or modified sequence from LASV(Pinneo-NIG-1969;Clade I)__AIT17836__GPCmut5 (opt5)

SEQ ID NO: 28301 - RNA, 1714 nt, Artificial Sequence
  mRNA product Design a-1 (hSL-A64-N5) comprising derived and/or modified sequence from LASV(ISTH0009-NIG-2011;Clade II)__AIT17404__GPCmut5 (opt5)
aggagagucccgcagucggcguccagcggcucugcuuguucgugugugugucguugcaggccuuauucaagcuuaccaugggccagaucauuaccuucuuucaagaggugccccacgucaucgaagagguuaugaacauugugcugaucgcccucagccugcuugcuauucugaaggggaucuacaauguggccacaugcggacucuucggccuggucuccuuucuucugcucugugggagaucuugcagcacgaccuauaaaggaguguacgaacugcagacacuggagcucgacauggcgucccugaacaugaccaugccucuuucuuguacaaagaauaacagccaucacuauaucaugguuggcaaugaaaccgggcuggagcucacacugaccaacacguccauuaucaaucauaaauucugcaaccuuucugaugcucacaagaaaaaucuguacgaccaugcccucaugagcauuaucuccaccuuucaccugagcauuccgaacuucaaucaguaugaggccaugucuugugauuuuaacggaggcaagaucuccgugcaguacaaucugagccacgcuuaugccgucgacgcugccaaccauugcggcacaauugcgaauggggugcuccaaaccuucaugcggauggccuggggaggcucuuacaucgcucuggauuccggguguggaagcugggacugcaucaugacaucuuaccaguaucuuauuauccagaacaccacgugggaagaucacugucaguuuucccgccccagcccuauuggcuaccuggggcuccugucccaaagaacacgggacaucuauauuucucgcagacuucugggaaccuucacauggacccucagcgauuccgagggcaacgaaacccccggcggguacugccugacacgguggaugcugaucgaggccgagcucaaguguuuuggaaauacggcuguugccaaaugcaacgaaaagcaugacgaggaguucugcgauaugcugcgccuuuuugacuucaauaaacaggcgaucagacggcugaagaccccugcccagaugagcauucagcucaucaacaaagcugugaaugcccugauuaacgaucaacuuaucaugaagaaucaucugcgcgacauuauguguauccccuauugcaacuacucuaaguauugguaccucaaucacacagucaccggcaaaacaucccugccuagauguuggcuggugagcaacgggucuuaccucaaugaaacccacuucagcgacgauaucgaacagcaggcugacaacaugauuacggagcugcuucaaaaggaguauauggaucggcagggaaaaacaccgcugggccucguggaccuguuugucuucuccaccucuuuuuaccugaucagcauuuuccuucaccucaucaagauucccacccaucgccacaucacagggaaaccuugccccaagccucauagacugaaucacaugggaauuuguuccugcggccuguauaaacaccccggcguuccggugaaguggaagcggugaggacuagucccuguucccagagcccacuuuuuuuucuuuuuuugaaauaaaauagccugucuuucagaucucaaaggcucuuuucagagccaccaaaaaaaaaaaaaaaaaaaaaaaaaaaaaaaaaaaaaaaaaaaaaaaaaaaaaaaaaaaaaaaaagaauu

SEQ ID NO: 28302 - RNA, 1714 nt, Artificial Sequence
  mRNA product Design a-1 (hSL-A64-N5) comprising derived and/or modified sequence from LASV(ISTH2010-NIG-2012;Clade II)__AIT17482__GPCmut5 (opt5)
aggagagucccgcagucggcguccagcggcucugcuuguucgugugugugucguugcaggccuuauucaagcuuaccaugggccagaucauuaccuucuuucaagaggugccccacgucaucgaagagguuaugaacauugugcugaucgcccucagccugcuugcuauucugaaggggaucuacaauguggccacaugcggacucuucggccuggucuccuuucuucugcucugugggagaucuugcagcacgaccuauaaaggaguguacgaacugcagacacuggagcucgacauggcgucccugaacaugaccaugccucuuucuuguacaaagaauaacagccaucacuauaucaugguuggcaaugaaaccgggcuggagcucacacugaccaacacguccauuaucaaucauaaauucugcaaccuuucugaugcucacaagaaaaaucuguacgaccaugcccucaugagcauuaucuccaccuuucaccugagcauuccgaacuucaaucaguaugaggccaugucuugugauuuuaacggaggcaagaucuccgugcaguacaaucugagccacgcuuaugccgucgacgcugccaaccauugcggcacaauugcgaauggggugcuccaaaccuucaugcggauggccuggggaggcucuuacaucgcucuggauuccggguguggaagcugggacugcaucaugacaucuuaccaguaucuuauuauccagaacauuaccugggaagaucacugucaguuuucccgccccagcccuaucggcuaccuggggcuccugucccaaagaacgcgggacauuuauaucucucgcagacuucugggaacauucaccuggacacucagcgauuccgagggcaacgaaacccccggcggguacugccugacccgguggaugcugaucgaggccgagcucaaguguuuuggaaauacagcuguugccaaaugcaacgaaaagcaugacgaggaguucugcgauaugcugcgccuuuuugacuucaauaaacaggcgauuagacggcugaagacgccugcccagaugagcauccagcucauuaacaaagcugugaaugcccugaucaacgaucaacuuauuaugaagaaucaucugcgcgacaucauguguauccccuauugcaacuacucuaaguauugguaccucaaucacaccgucacaggcaaaaccucccugccuagauguuggcuggugagcaacgggucuuaccucaaugaaacacacuucagcgacgauauugaacagcaggcugacaacaugaucaccgagcugcuucaaaaggaguauauugaucggcagggaaaaacgccgcugggccucguggaccuguuugucuucuccacaucuuuuuaccugaucagcauuuuccuucaccucguuaagauccccacccaucgccacgugguggggaaaccuugccccaagccucauagacugaaucacaugggaauuuguuccugcggccuguauaaacaccccggcgucccggugaaguggaagcggugaggacuagucccuguucccagagcccacuuuuuuuucuuuuuuugaaauaaaauagccugucuuucagaucucaaaggcucuuuucagagccaccaaaaaaaaaaaaaaaaaaaaaaaaaaaaaaaaaaaaaaaaaaaaaaaaaaaaaaaaaaaaaaaaagaauu

SEQ ID NO: 28303 - RNA, 1714 nt, Artificial Sequence
  mRNA product Design a-1 (hSL-A64-N5) comprising derived and/or modified sequence from LASV(Lassa virus/H.sapiens-wt/NGA/2015/ISTH_0543;Clade II)__AVO03639__GPCmut5 (opt5)
aggagagucccgcagucggcguccagcggcucugcuuguucgugugugugucguugcaggccuuauucaagcuuaccaugggccagaucauuaccuucuuucaagaggugccccacgucaucgaagagguuaugaacauugugcugaucgcccucagccugcuugcuauucugaaggggaucuacaauguggccacaugcggacucuucggccuggucuccuuucuucugcucugugggagaucuugcagcacgaccuauaaaggaguguacgaacugcagacacuggagcucgacauggcgaaccugaauaugaccaugccucuuuccuguacaaagaacaauucucaucacuauaucaugguuggcaacgaaaccgggcuggagcucacacugaccaauacgagcauuaucaaccauaaauucugcaaucuuuccgaugcucacaagaaaaaccuguacgaccaugcccucaugucuauuaucagcaccuuucaccuguccauuccgaauuucaaccaguaugaggccaugagcugugauuuuaauggaggcaagaucucugugcaguacaaccugucccacacauaugcugucgacgccgcuaaucauugcggcaccauugccaacggggugcuccaaacauucaugcggauggcguggggaggcagcuacaucgcccuggauucuggguguggauccugggacugcaucaugaccagcuaccaguaucuuguuauucagaacacgacaugggaagaucacugucaguuuucucgccccuccccuaucggcuaccuggggcuccugagccaaagaacccgggacauuuauaucucccgcagacuucugggaacauucaccuggacccucucugauagcgagggcaaugaaacacccggcggguacugccugacgcgguggaugcugauugaggcugagcucaaguguuuuggaaacaccgccguggcuaaaugcaaugaaaagcaugacgaggaguucugcgauaugcugcgccuuuuugacuucaacaaacaggccaucagacggcugaagaccccugcgcagauguccauccagcucauuaauaaagccgucaacgcucugaucaaugaucaacuuauuaugaagaaccaucugcgcgacaucauguguauucccuauugcaauuacagcaaguauugguaccucaaccacacagugacaggcaaaaccucucugccuagauguuggcugguguccaaugggagcuaccucaacgaaacgcacuucucugacgauaucgaacagcaggccgacaauaugaucacagagcugcuucaaaaggaguauauugaucggcagggaaaaaccccgcugggccucgucgaccuguuuguuuucagcaccuccuuuuaccugaucucuauuuuccuucaccucgugaagauccccacacaucgccacauuaccgggaaaccuugccccaagccucauagacugaaccacaugggaaucuguagcugcggccuguauaaacaccccggcgugccggucaaguggaagcggugaggacuagucccuguucccagagcccacuuuuuuuucuuuuuuugaaauaaaauagccugucuuucagaucucaaaggcucuuuucagagccaccaaaaaaaaaaaaaaaaaaaaaaaaaaaaaaaaaaaaaaaaaaaaaaaaaaaaaaaaaaaaaaaaagaauu

SEQ ID NO: 28304 - RNA, 1714 nt, Artificial Sequence
  mRNA product Design a-1 (hSL-A64-N5) comprising derived and/or modified sequence from LASV(Lassa virus/H.sapiens-wt/NGA/2016/ISTH_0009;Clade II)__AVO03571__GPCmut5 (opt5)
aggagagucccgcagucggcguccagcggcucugcuuguucgugugugugucguugcaggccuuauucaagcuuaccaugggccagaucauuaccuucuuucaagaggugccccacgucaucgaagagguuaugaacauugugcugaucgcccucagccugcuugcuauucugaaggggaucuacaauguggccacaugcggacuccugggccuugucuccuuccugcuccugugugggagaucuugcagcacgaccuauaaaggaguguacgaacugcagacacucgagcuggacauggcgucccuuaacaugaccaugccucugucuuguacaaagaauaacagccaucacuauaucaugguuggcaaugaaaccgggcucgagcugacacuuaccaacacguccauuaucaaucauaaauuuugcaaccugucugaugcucacaagaaaaaucucuacgaccaugcccugaugagcauuaucuccaccuuccaccugagcauuccgaacuuuaaucaguaugaggccaugucuugugauuucaacggaggccggaucuccgugcaguacaaucucagccacucuuaugcugucgacgccgcuaaccauugcggcacaauugccaauggggugcugcaaaccuuuaugcgcauggcguggggaggcuccuacaucgcccuugauagcggguguggaucuugggacugcaucaugacauccuaccaguaucugauuauccagaacaccacgugggaagaucacugucaguucagcagacccuccccuauuggcuaccucgggcugcuuucucaacggacacgcgacaucuauauuagcagacggcugcucggaaccuuuacauggacccuguccgauagcgagggcaacgaaacccccggcggguacugccugacacgcuggaugcucaucgaggcugagcugaaguguuucggaaauacggccguugcuaagugcaacgaaaaacaugacgaggaauuuugcgauaugcuuagacuguucgacuuuaauaagcaggccauccggcgccucaaaaccccugcgcagaugucuauucagcugaucaacaaggccgugaaugcucuuauuaacgaucaacugaucaugaaaaaucaccucagagacauuauguguauccccuauugcaacuacuccaaguauugguaccugaaucacacagucaccggcaagacaagccugccucgguguuggcucgugucuaacgggagcuaccugaaugagacccauuucuccgacgauaucgaacagcaggccgacaacaugauuacggagcuucugcaaaaagaguauaucgaucgccagggaaagacaccgcucggccugguggaccuguucgucuuuucuaccagcuucuaccuuauuuccaucuuucuccaccugguuaaaauucccacccauagacacaucacagggaagccuugccccaaaccucaucggcugaaucacaugggaauuuguagcugcggccucuauaaccaccccggcgugccggugaaguggaaacgcugaggacuagucccuguucccagagcccacuuuuuuuucuuuuuuugaaauaaaauagccugucuuucagaucucaaaggcucuuuucagagccaccaaaaaaaaaaaaaaaaaaaaaaaaaaaaaaaaaaaaaaaaaaaaaaaaaaaaaaaaaaaaaaaaagaauu

SEQ ID NO: 28305 - RNA, 1714 nt, Artificial Sequence
  mRNA product Design a-1 (hSL-A64-N5) comprising derived and/or modified sequence from LASV(Lassa virus/H.sapiens-wt/NGA/2016/ISTH_0017;Clade II)__AVO03567__GPCmut5 (opt5)
aggagagucccgcagucggcguccagcggcucugcuuguucgugugugugucguugcaggccuuauucaagcuuaccaugggccagaucauuaccuucuuucaagaggugccccacgucaucgaagagguuaugaacauugugcugaucgcccucagccugcuugcuauucugaaggggaucuacaauguggccacaugcggacucuucggccuggucuccuuucuucugcucugugggagaucuugcagcacgaccuauaaaggaguguacgaacugcagacacuggagcucgacauggcgucccugaacaugaccaugccucuuucuuguacaaagaauaacagccaucacuauaucaugguuggcaaugaaaccgggcuggagcucacacugaccaacacguccauuaucaaucauaaauucugcaaccuuucugaugcucacaagaaaaaucuguacgaccaugcccucaugagcauuaucuccaccuuucaccugagcauuccgaacuucaaucaguaugaggccaugucuugugauuuuaacggaggcaagaucuccgugcaguacaaucugagccacacauaugcuauugacgccgcuaaccauugcggcaccaucgccaaugggguccuccaaacauucaugcggauggcguggggaggcucuuacaucgcccuggauuccggguguggaagcugggacugcauuaugaccucuuaccaguaucuuaucauucagaacacgacaugggaagaucacugucaguuuucccgccccagcccuaucggcuaccuggggcuccugucccaaagaacccgggacauuuauaucucucgcagacuucugggaacauucaccuggacccucagcgauuccgagggcaacgaaacacccggcggguacugccugacgcgguggaugcugaucgaggcugagcucaaguguuuuggaaauaccgccguggcuaaaugcaacgaaaagcaugacgaggaguucugcgauaugcugcgccuuuuugacuucaauaaacaggccauuagacggcugaagaccccugcgcagaugagcauccagcucauuaacaaagccguuaaugcucugaucaacgaucaacuuauuaugaagaaucaucugcgcgacaucauguguauccccuauugcaacuacucuaaguauugguaccucaaucacacagugacaggcaaaaccucccugccuagauguuggcuggucagcaacgggucuuaccucaaugaaacgcacuucagcgacgauauugaacagcaggccgacaacaugaucacagagcugcuucaaaaggaguauauggaucggcagggaaaaaccccgcugggccucguggaccuguuuguguucuccaccucuuuuuaccugauuagcaucuuccuucaccucguccgcauucccacacauagacacguuaucgggaagccuugccccaaaccucaucggcugaaucacaugggaauuuguuccugcggccuguauaagcaccccggcgugccggugaaauggaagcgcugaggacuagucccuguucccagagcccacuuuuuuuucuuuuuuugaaauaaaauagccugucuuucagaucucaaaggcucuuuucagagccaccaaaaaaaaaaaaaaaaaaaaaaaaaaaaaaaaaaaaaaaaaaaaaaaaaaaaaaaaaaaaaaaaagaauu

SEQ ID NO: 28306 - RNA, 1714 nt, Artificial Sequence
  mRNA product Design a-1 (hSL-A64-N5) comprising derived and/or modified sequence from LASV(Lassa virus/H.sapiens-wt/NGA/2018/ISTH_0959;Clade II)__AVV65099__GPCmut5 (opt5)
aggagagucccgcagucggcguccagcggcucugcuuguucgugugugugucguugcaggccuuauucaagcuuaccaugggccagaucauuaccuucuuucaagaggugccccacgucaucgaagagguuaugaacauugugcugaucgcccucagccugcuugcuauucugaaggggaucuacaauguggucacaugcggacucuucggccugguguccuuucuucugcucugugggagaucuugcagcacgaccuauaaaggaguuuacgaacugcagacacuggagcucgacauggccucccugaacaugaccaugccucuuucuuguacaaagaauaacagccaucacuauaucauggugggcaaugaaaccgggcuggagcucacacugaccaacacguccauuaucaaucauaaauucugcaaccuuucugaugcgcacaagaaaaaucuguacgaccaugcucucaugagcauuaucuccaccuuucaccugagcauuccgaacuucaaucaguaugaggccaugucuugugauuuuaacggaggcaagaucuccguccaguacaaucugagccacgccuaugcuauugacgccgcuaaccauugcggcacaaucgccaauggggugcuccaaaccuucaugcggauggcguggggaggcucuuacaucgcccuggauuccggguguggaagcugggacugcauuaugacaucuuaccaguaucuuaucauucagaacaccacgugggaagaucacugucaguuuucccgccccagcccuaucggcuaccuggggcuccugucccaaagaacacgggacauuuauaucucucgcagacuucugggaaccuucacauggacccucagcgauuccgagggcaacgaaacccccggcggguacugccugacacgguggaugcugaucgaggcugagcucaaguguuuuggaaauacggccguugcuaaaugcaacgaaaagcaugacgaggaguucugcgauaugcugcgccuuuuugacuucaauaaacaggccauuagacggcugaagaccccugcgcagaugagcauccagcucauuaacaaagccgugaaugcucugaucaacgaucaacuuauuaugaagaaucaucugcgcgacaucauguguauccccuauugcaacuacucuaaguauugguaccucaaucacacagucaccggcaaaacaucccugccuagauguuggcuggugagcaacgggucuuaccucaaugaaacccacuucagcgacgauauugaacagcaggccgacaacaugaucacggagcugcuucaaaaggaguauauugaucggcagggaaaaacaccgcugggccucguggaccuguuugucuucuccaccucuuuuuaccugaucagcauuuuccuucaccucguuaagauccccacccaucgccacgugauugggaaaccuugccccaagccucauagacugaaucacaugggaaucuguuccugcggccuguauaaacaccccggcgugccggucaaguggaagcggugaggacuagucccuguucccagagcccacuuuuuuuucuuuuuuugaaauaaaauagccugucuuucagaucucaaaggcucuuuucagagccaccaaaaaaaaaaaaaaaaaaaaaaaaaaaaaaaaaaaaaaaaaaaaaaaaaaaaaaaaaaaaaaaaagaauu

SEQ ID NO: 28307 - RNA, 1714 nt, Artificial Sequence
  mRNA product Design a-1 (hSL-A64-N5) comprising derived and/or modified sequence from LASV(LASV003-NIG-2008;Clade II)__AIT17580__GPCmut5 (opt5)
aggagagucccgcagucggcguccagcggcucugcuuguucgugugugugucguugcaggccuuauucaagcuuaccaugggccagaucauuaccuucuuucaagaggugccccacgucaucgaagagguuaugaacauugugcugaucgcccucagccugcuugcuauucugaaggggaucuacaauguggccacaugcggacucuucggccuggucuccuuucuucugcucugugggagaucuugcagcacgaccuauaaaggaguguacgaacugcagacacuggagcucgacauggcgucccugaacaugaccaugccucuuucuuguacaaagaauaacagccaucacuauaucaugguuggcaaugaaaccgggcuggagcucacacugaccaacacguccauuaucaaucauaaauucugcaaccuuucugaugcucacaagaaaaaucuguacgaccaugcccucaugagcauuaucuccaccuuucaccugagcauuccgaacuucaaucaguaugaggccaugucuugugauuuuaacggaggcaagaucuccgugcaguacaaucugagccacacauaugcugucgacgccgcuaaccauugcggcaccauugccaauggggugcuccaaacauucaugcggauggcguggggaggcucuuacaucgcccuggauuccggguguggaagcugggacugcaucaugaccucuuaccaguaucuuauuauccagaacacgacaugggaagaucacugucaguuuucccgccccagcccuauuggcuaccuggggcuccugucccaaagaacccgggacaucuauauuucucgcagacuucugggaacauucaccuggacccucagcgauuccgagagcaacgaaacacccggcggcuacugccugacgcgguggaugcugaucgaggcugagcucaaguguuuugggaauaccgccguugcuaaaugcaacgaaaagcaugacgaggaguucugcgauaugcugcgccuuuuugacuucaauaaacaggccaucagacggcugaaggcgccugcccagaugucuauucagcucaucaacaaagcugugaaugcccugauuaacgaucaacuuaucaugaagaaucaucugcgcgacauuauguguauccccuauugcaacuacuccaaguauugguaccucaaucacacagucaccggaagaacaagccugccucgguguuggcuggugucuaacggcagcuaccucaaugaaacccacuucuccgacgauaucgaacagcaggcugacaacaugauuacggagcugcuucaaaaagaguauauggaucgccaggggaagacaccgcugggacucguggaccuguuugucuucucuaccagcuuuuaccugaucuccauuuuccuucaccucguuaaaauccccacccauagacacgugauuggcaagccuugccccaaaccucaucggcugaaucacauggggaucuguagcugcggacuguauaagcaccccggcgugccggucaaauggaagcgcugaggacuagucccuguucccagagcccacuuuuuuuucuuuuuuugaaauaaaauagccugucuuucagaucucaaaggcucuuuucagagccaccaaaaaaaaaaaaaaaaaaaaaaaaaaaaaaaaaaaaaaaaaaaaaaaaaaaaaaaaaaaaaaaaagaauu

SEQ ID NO: 28308 - RNA, 1714 nt, Artificial Sequence
  mRNA product Design a-1 (hSL-A64-N5) comprising derived and/or modified sequence from LASV(LASV035-NIG-2009;Clade II)__AIT17588__GPCmut5 (opt5)
aggagagucccgcagucggcguccagcggcucugcuuguucgugugugugucguugcaggccuuauucaagcuuaccaugggccagaucauuaccuucuuucaagaggugccccacgucaucgaagagguuaugaacauugugcugaucgcccucagccugcuugcuauucugaaggggaucuacaauguggccacaugcggacucuucggccuggucuccuuucuucugcucugugggagaucuugcagcacgaccuauaaaggaguguacgaacugcagacacuggagcucgacauggcgucccugaacaugaccaugccucuuucuuguacaaagaauaacagccaucacuauaucaugguuggcaaugaaaccgggcuggagcucacacugaccaacacguccauuaucaaucauaaauucugcaaccuuucugaugcucacaagaaaaaucuguacgaccaugcccucaugagcauuaucuccaccuuucaccugagcauuccgaacuucaaucaguaugaggccaugucuugugauuuuaacggaggcaagaucuccgugcaguacaaucugagccacgcuuaugccgucgacgcugccaaccauugcggcacaauugcgaauggggugcuccaaaccuucaugcggauggccuggggaggcucuuacaucgcucuggauuccggguguggaagcugggacugcaucaugacaucuuaccaguaucuuauuauccagaacaccacgugggaagaucacugucaguuuucccgccccagcccuauuggcuaccuggggcuccugucccaaagaacacgggacaucuauauuucucgcagacuucugggaaccuucacauggacccucagcgauuccgagggcaacgaaacccccggcggguacugccugacacgguggaugcugaucgaggccgagcucaaguguuuuggaaauacggcuguugccaaaugcaacgaaaagcaugacgaggaguucugcgauaugcugcgccuuuuugacuucaauaaacaggcgaucagacggcugaaggccccugcucagaugagcauucagcucaucaacaaagccgugaaugcucugauuaacgaucaacuuaucaugaagaaucaucugcgcgacauuauguguauccccuauugcaacuacucuaaguauugguaccucaaucacaccgucacaggcaaaaccucccugccuagauguuggcuggugagcaacgggucuuaccucaaugaaacacacuucagcgacgauaucgaacagcaggccgacaacaugauuaccgagcugcuucaaaaggaguauaucgaucggcagggaaaaacgccgcugggccucguggaccuguuugucuucuccacaucuuuuuaccugauuagcaucuuccuucaccucguuaagauucccacccaucgccacgugaucgggaaaccuugccccaagccucauagacugaaucacaugggaauuuguuccugcggccuguauaaacaccccggcgugccggucaaguggaagcggugaggacuagucccuguucccagagcccacuuuuuuuucuuuuuuugaaauaaaauagccugucuuucagaucucaaaggcucuuuucagagccaccaaaaaaaaaaaaaaaaaaaaaaaaaaaaaaaaaaaaaaaaaaaaaaaaaaaaaaaaaaaaaaaaagaauu

SEQ ID NO: 28309 - RNA, 1714 nt, Artificial Sequence
  mRNA product Design a-1 (hSL-A64-N5) comprising derived and/or modified sequence from LASV(LASV1000-NIG-2009;Clade II)__AIT17782__GPCmut5 (opt5)
aggagagucccgcagucggcguccagcggcucugcuuguucgugugugugucguugcaggccuuauucaagcuuaccaugggccagaucauuaccuucuuucaagaggugccccacgucaucgaagagguuaugaacauugugcugaucgcccucagccugcuugcuauucugaaggggaucuacaauguggccacaugcggacucuucggccuggucuccuuucuucugcucugugggagaucuugcagcacgaccuauaaaggaguguacgaacugcagacacuggagcucgacauggcgucccugaacaugaccaugccucuuucuuguacaaagaauaacagccaucacuauaucaugguuggcaaugaaaccgggcuggagcucacacugaccaacacguccauuaucaaucauaaauucugcaaccuuucugaugcucacaagaaaaaucuguacgaccaugcccucaugagcauuaucuccaccuuucaccugagcauuccgaacuucaaucaguaugaggccaugucuugugauuuuaacggaggcaagaucuccgugcaguacaaucugagccacacauaugcugucgacgccgcuaaccauugcggcaccauugccaauggggugcuccaaacauucaugcggauggcguggggaggcucuuacaucgcccuggauuccggguguggaagcugggacugcaucaugaccucuuaccaguaucuuauuauccagaacacgacaugggaagaucacugucaguuuucccgccccagcccuauuggcuaccuggggcuccugucccaaagaacccgggacaucuauauuucucgcagacuucugggaacauucaccuggacccucagcgauuccgagggcaacgaaacacccggcggguacugccugacgcgguggaugcugaucgaggcugagcucaaguguuuuggaaauaccgccguugcuaaaugcaacgaaaagcaugacgaggaguucugcgauaugcugcgccuuuuugacuucaauaaacaggccaucaagagacugaaaaccccugcgcagaugagcauucagcucaucaacaaggccgugaaugcucugauuaacgaucaacuuaucaugaagaaucaucugcgggacauuauguguauccccuauugcaacuacucuaaauauugguaccucaaucacacagucacaggcaagaccucccugccucgcuguuggcuggugagcaacgggucuuaccucaaugaaacgcacuucagcgacgauaucgaacagcaggccgacaacaugauuacagagcugcuucaaaaagaguauaucgauagacagggaaagaccccgcugggccucguggaccuguuugucuucuccaccucuuuuuaccugauuagcaucuuccuucaccucguuaaaauucccacacaucggcacgugguggggaagccuugccccaaaccucaucgccugaaucacaugggaaucuguuccugcggccuguauaagcaccccggcgucccggugaaguggaaaagaugaggacuagucccuguucccagagcccacuuuuuuuucuuuuuuugaaauaaaauagccugucuuucagaucucaaaggcucuuuucagagccaccaaaaaaaaaaaaaaaaaaaaaaaaaaaaaaaaaaaaaaaaaaaaaaaaaaaaaaaaaaaaaaaaagaauu

SEQ ID NO: 28310 - RNA, 1714 nt, Artificial Sequence
  mRNA product Design a-1 (hSL-A64-N5) comprising derived and/or modified sequence from LASV(LASV221-NIG-2010;Clade II)__AIT17624__GPCmut5 (opt5)
aggagagucccgcagucggcguccagcggcucugcuuguucgugugugugucguugcaggccuuauucaagcuuaccaugggccagaucauuaccuucuuucaagaggugccccacgucaucgaagagguuaugaacauugugcugaucgcccucagccugcuugcuauucugaaggggaucuacaauguggccacaugcggacucuucggccuggucuccuuucuucugcucugugggagaucuugcagcacgaccuauaaaggaguguacgaacugcagacacuggagcucgacauggcgucccugaacaugaccaugccucuuucuuguacaaagaauaacagccaucacuauaucaugguuggcaaugaaaccgggcuggagcucacacugaccaacacguccauuaucaaucauaaauucugcaaccuuucugaugcucacaagaaaaaucuguacgaccaugcccucaugagcauuaucuccaccuuucaccugagcauuccgaacuucaaucaguaugaggccaugucuugugauuuuaacggaggcaagaucuccgugcaguacaaucugagccacacauaugcuauugacgccgcuaaccauugcggcaccaucgccaaugggguccuccaaacauucaugcggauggcguggggaggcucuuacaucgcccuggauuccggguguggaagcugggacugcauuaugaccucuuaccaguaucuuaucauucagaacacgacaugggaagaucacugucaguuuucccgccccagcccuaucggcuaccuggggcuccugucccaaagaacccgggacauuuauaucucucgcagacuucugggaacauucaccuggacccucagcgauuccgagggcaacgaaacacccggcggguacugccugacgcgguggaugcugaucgaggcugagcucaaguguuuuggaaauaccgccguggcuaaaugcaacgaaaagcaugacgaggaguucugcgauaugcugcgccuuuuugacuucaauaaacaggccauuagacggcugaagaccccugcgcagaugagcauccagcucauuaacaaagccguuaaugcucugaucaacgaucaacuuauuaugaagaaucaucugcgcgacaucauguguauccccuauugcaacuacucuaaguauugguaccucaaucacacagugacaggcaaaaccucccugccuagauguuggcuggucagcaacgggucuuaccucaaugaaacgcacuucagcgacgauauugaacagcaggccgacaacaugaucacagagaugcugcaaaaggaguauauggaucggcagggaaaaaccccgcuuggccugguggaccucuuuguguucuccaccucuuuuuaccugauuagcaucuuccugcaccuugucaagauucccacacaucgccacguuaucgggaaaccuugccccaagccucauagacucaaucacaugggaauuuguuccugcggccuguauaaacaccccggcgugccggugaaguggaagcggugaggacuagucccuguucccagagcccacuuuuuuuucuuuuuuugaaauaaaauagccugucuuucagaucucaaaggcucuuuucagagccaccaaaaaaaaaaaaaaaaaaaaaaaaaaaaaaaaaaaaaaaaaaaaaaaaaaaaaaaaaaaaaaaaagaauu

SEQ ID NO: 28311 - RNA, 1714 nt, Artificial Sequence
  mRNA product Design a-1 (hSL-A64-N5) comprising derived and/or modified sequence from LASV(LASV237-NIG-2010;Clade II)__AIT17638__GPCmut5 (opt5)
aggagagucccgcagucggcguccagcggcucugcuuguucgugugugugucguugcaggccuuauucaagcuuaccaugggccagaucauuaccuucuuucaagaggugccccacgucaucgaagagguuaugaacauugugcugaucgcccucagccugcuugcuauucugaaggggaucuacaauguggccacaugcggacucuucggccuggucuccuuucuucugcucugugggagaucuugcagcacgaccuauaaaggaguguacgaacugcagacacuggagcucgacauggcgucccugaacaugaccaugccucuuucuuguacaaagaauaacagccaucacuauaucaugguuggcaaugaaaccgggcuggagcucacacugaccaacacguccauuaucaaucauaaauucugcaaccuuucugaugcucacaagaaagaccuguacgaucaugcccucaugagcauuaucuccaccuuucaccugagcauuccgaauuucaaccaguaugaggccaugucuugugacuuuaauggaggcaagaucuccgugcaguacaaccugagccacacauaugcugucgaugccgcuaaucauugcggcaccauugccaacggggugcuccaaacauucaugcggauggcguggggaggcucuuacaucgcccuggacuccggguguggaagcugggauugcaucaugaccucuuaccaguaucuuauuauccagaauacgacaugggaagaccacugucaguuuucccgccccagcccuauuggcuaccuggggcuccugucccaaagaacccgggauaucuauauuucucgcagacuucugggaacauucaccuggacccucagcgacuccgagggcaacgaaacacccggcggguacugccugacgcgguggaugcugaucgaggcugagcucaaguguuuuggaaacaccgccguugcuaaaugcaaugaaaagcaugaugaggaguucugcgacaugcugcgccuuuuugauuucaacaaacaggccaucagacggcugaagaccccugcgcagaugagcauucagcucaucaauaaagccgugaacgcucugauuaaugaccaacuuaucaugaagaaccaucugcgcgacauuauguguauccccuauugcaauuacucuaaguauugguaccucaaccacacagucacaggcaaaaccucccugccuagauguuggcuggugagcaaugggucuuaccucaacgaaacgcacuucagcgaugacaucgaacagcaggccgauaauaugauuacagagcugcuucaaaaggaguauauggaccggcagggaaaaaccccgcugggccucguggaucuguuugucuucuccaccucuuuuuaccugaucagcauuuuccuucaccucaucaagauucccacacaucgccacaucaccgggaaaccuugccccaagccucauagacugaaccacaugggaauuuguuccugcggccuguauaaacaccccggcguuccggugaaguggaagcggugaggacuagucccuguucccagagcccacuuuuuuuucuuuuuuugaaauaaaauagccugucuuucagaucucaaaggcucuuuucagagccaccaaaaaaaaaaaaaaaaaaaaaaaaaaaaaaaaaaaaaaaaaaaaaaaaaaaaaaaaaaaaaaaaagaauu

SEQ ID NO: 28312 - RNA, 1714 nt, Artificial Sequence
  mRNA product Design a-1 (hSL-A64-N5) comprising derived and/or modified sequence from LASV(LASV253-NIG-2011;Clade II)__AIT17670__GPCmut5 (opt5)
aggagagucccgcagucggcguccagcggcucugcuuguucgugugugugucguugcaggccuuauucaagcuuaccaugggccagaucauuaccuucuuucaagaggugccccacgucaucgaagagguuaugaacauugugcugaucgcccucagccugcuugcuauucugaaggggaucuacaauguggccacaugcggacucuucggccuggucuccuuucuucugcucugugggagaucuugcagcacgaccuauaaaggaguguacgaacugcagacacuggagcucgacauggcgucccugaacaugaccaugccucuuucuuguacaaagaauaacagccaucacuauaucaugguuggcaaugaaaccgggcuggagcucacacugaccaacacguccauuaucaaucauaaauucugcaaccuuucugaugcucacaagaaaaaucuguacgaccaugcccucaugagcauuaucuccaccuuucaccugagcauuccgaacuucaaucaguaugaggccaugucuugugauuuuaacggaggcaagaucuccgugcaguacaaucugagccacacauaugcugucgacgccgcuaaccauugcggcaccauugccaauggggugcuccaaacauucaugcggauggcguggggaggcucuuacaucgcccuggauuccggguguggaagcugggacugcaucaugaccucuuaccaguaucuuauuauccagaacacgacaugggaagaucacugucaguuuucccgccccagcccuauuggcuaccuggggcuccugucccaaagaacccgggacaucuauauuucucgcagacuucugggaacauucaccuggacccucagcgauuccgagggcaacgaaacacccggcggguacugccugacgcgguggaugcugaucgaggcugagcucaaguguuuuggaaauaccgccguugcuaaaugcaacgaaaagcaugacgaggaguucugcgauaugcugcgccuuuuugacuucaauaaacaggccaucagacggcugaaggcgccugcccagaugagcauucagcucaucaacaaagcugugaaugcccugauuaacgaucaacuuaucaugaagaaucaucugcgcgacauuauguguauccccuauugcaacuacucuaaguauugguaccucaaucacacagucaccggcagaacaucccugccucgguguuggcuggugagcaacgggucuuaccucaaugaaacccacuucagcgacgauaucgaacagcaggcugacaacaugauuacggagcugcuucaaaaagaguauaucgaucgccagggaaagacaccgcugggccucguggaccuguuugucuucuccaccucuuuuuaccugauuagcaucuuccuucaccucguuaaaauucccacccauagacacaucauugggaagccuugccccaaaccucaucggcugaaucacaugggaaucuguuccugcggccuguauaagcaccccggcgugccggugaaauggaagcgcugaggacuagucccuguucccagagcccacuuuuuuuucuuuuuuugaaauaaaauagccugucuuucagaucucaaaggcucuuuucagagccaccaaaaaaaaaaaaaaaaaaaaaaaaaaaaaaaaaaaaaaaaaaaaaaaaaaaaaaaaaaaaaaaaagaauu

SEQ ID NO: 28313 - RNA, 1714 nt, Artificial Sequence
  mRNA product Design a-1 (hSL-A64-N5) comprising derived and/or modified sequence from LASV(LASV254-NIG-2011;Clade II)__AIT17674__GPCmut5 (opt5)
aggagagucccgcagucggcguccagcggcucugcuuguucgugugugugucguugcaggccuuauucaagcuuaccaugggccagaucauuaccuucuuucaagaggugccccacgucaucgaagagguuaugaacauugugcugaucgcccucagccugcuugcuauucugaaggggaucuacaauguggccacaugcggacucuucggccuggucuccuuucuucugcucugugggagaucuugcagcacgaccuauaaaggaguguacgaacugcagacacuggagcucgacaugaccaaccugaauaugacaaugccucuuuccuguaccaagaacaauucucaucacuauaucaugguuggcaacgaaacagggcuggagcucacccugacgaauaccagcauuaucaaccauaaauucugcaaucuuuccgaugcgcacaagaaaaaccuguacaaucaugcucucaugucuauuaucagcacauuucaccuguccauuccgaacuucaaucaguaugaggccaugagcugugacuuuaacggaggcaagaucucugugcaguacaaucugucccacagcuaugccgucgaugcugccaaccauugcggcaccauugcuaacggggugcuccaaacauucaugcggauggccuggggaggcucuuacaucgcgcuggacuccggguguggaaauugggauugcaucaugaccagcuaccaguaucuuauuauccagaacacgacaugggaagaccacugucaguuuucucgccccuccccuauuggcuaccuggggcuccugagccaaagaacccgggauaucuauauuucccgcagacuucugggaacauucaccuggacccucucugacagcgagggcaaugaaacacccggcggguacugccugacgcgguggaugcugaucgaggccgagcucaaguguuuuggaaacaccgcuguugccaaaugcaaugaaaagcaugaugaggaguucugcgacaugcugcgccuuuuugauuucaacaaacaggcuaucagacggcugaagaccccugcccaggcgaauauucagcucaucaacaaagccgugaaugcucugauuaacgaccaacuuaucaugaagaaucaucugcgcgauauuauguguauccccuauugcaacuacuccaaguauugguaccucaaucacacagucacaggcaaaaccagccugccuagauguuggcuggugucuaacggguccuaccucaaugaaacgcacuucagcgacgacaucgaacagcaggccgauaacaugauuacagagcugcuucaaaaggaguauauggaccggcagggaaaaaccccgcugggccucguggaucuguuugucuucucuaccagcuuuuaccugaucuccauuuuccuucaccucguuaagauccccacacaucgccacgugauugggaaaccuugccccaagccucauagacugaaccacaugggaaucuguucuugcggccuguauaaacaccccggcgugccggucaaguggaagcggugaggacuagucccuguucccagagcccacuuuuuuuucuuuuuuugaaauaaaauagccugucuuucagaucucaaaggcucuuuucagagccaccaaaaaaaaaaaaaaaaaaaaaaaaaaaaaaaaaaaaaaaaaaaaaaaaaaaaaaaaaaaaaaaaagaauu

SEQ ID NO: 28314 - RNA, 1714 nt, Artificial Sequence
  mRNA product Design a-1 (hSL-A64-N5) comprising derived and/or modified sequence from LASV(Nig08-A19;Clade III)__ADU56618__GPCmut5 (opt5)
aggagagucccgcagucggcguccagcggcucugcuuguucgugugugugucguugcaggccuuauucaagcuuaccaugggccagaucgugaccuucuuucaagaggucccccacguuauugaagaggugaugaacaucgugcugauugcccucagcauccuggcuauucuuaaggggcuguacaauaucgccacaugcggacucaucggccuggucacguuccuucugcucuccgggagaucuuguagcaugaccuauaaaggaguguacgaacugcagacacuggagcucaacaugaauacccugaacaugacaaugccucuuuccugcaccaagaauaacucucaucacuauauuaugguuggcaaugaaacagggcuggagcucacccugacgaacaccagccuucugcaucacaaauuuuguaaucucuccgacgcgcauaagaaaaaccuguacgaucacacacugaugucuaucauuagcaccuuccaccucuccaucccgaauuuuaaccaguaugaggcuaugagcugcgacuucaauggaggcaagauuacagugcaguacaaccugucucauuccuaugccaucgaugccgcuaaucacuguggcaccgucgccaacggggugcuucaaacguuuaugcggauggcuuggggaggcagcuacauugcccuggacucugggugcggaaagugggauuguaucaugacauccuaccaguaucucaucauucagaacaccacaugggaagaccauugccaguucagccgccccucuccuaucggcuaccuggggcuucugucccaaagaacccgggauauuuauaucagccgcagacuccugggaaccuuuacauggacgcuguccgacucugagggcaaugaaacccccggcggguacugucucacacgguggaugcugauugaggcggagcuuaaaugcuucggaaacaccgccguugcuaaguguaaugaaaaacacgaugaggaauuuugcgacaugcugcgccucuucgauuuuaacaagcaggccaucagacggcugaaagcuccugcccagaugagcauccagcuuauuaauaaggcggugaacgcccugaucaaugaccaacucauuaugaagaaccaucugcgcgauaucaugugcauucccuauuguaauuacuccaaauauugguaccugaaccacacaagcaccggcagaacgucucucccucggugcuggcuggucuccaaugggagcuaccuuaacgagacacacuucucugacgacaucgaacagcaggcugauaauaugaucaccgagaugcugcaaaaggaguaucucgaccgccagggaaaaaccccgcugggccugguggaucuuuucguguuuagcacauccuucuaccucauuucuaucuuucugcaucuggucaagauucccacccacagacauaucguugggaaaccuugucccaagccucaccggcucaaccacaugggaauuugcagcuguggccuguauaaacagcccggcgugccggugcgcuggaagagaugaggacuagucccuguucccagagcccacuuuuuuuucuuuuuuugaaauaaaauagccugucuuucagaucucaaaggcucuuuucagagccaccaaaaaaaaaaaaaaaaaaaaaaaaaaaaaaaaaaaaaaaaaaaaaaaaaaaaaaaaaaaaaaaaagaauu

SEQ ID NO: 28315 - RNA, 1717 nt, Artificial Sequence
  mRNA product Design a-1 (hSL-A64-N5) comprising derived and/or modified sequence from LASV(G1180-SLE-2010;Clade IV)__AIT17168__GPCmut5 (opt5)
aggagagucccgcagucggcguccagcggcucugcuuguucgugugugugucguugcaggccuuauucaagcuuaccaugggccagaucgugaccuucuuucaagaggucccccacguuauugaagaggugaugaacaucgugcugauugcccucagcauccuggcuguccuuaaggggcuguacaauuucgccacaugcggacucgugggccugcuuacguuucugcuccugugugggagauccugcaccgcgucucgguauaaaggaguuuacgaacugcagacacucgagcugaacauggaaacccuuaauaugacaaugccucugagcuguaccaagaacaauucccaucacuauauuauggugggcaacgagacagggcucgagcugacccuuacgaauaccucuaucaucaaccauaaauucugcaaucugagcgacgcucacaagaaaaaccucuacgaucaugcccugauguccauuaucucuacauuucaccugagcauuccgaauuucaaccaguaugaagccauguccugugacuuuaauggaggcaagaucagcguccaguacaaccucucucacuccuaugcuggcgaugccgcuaaucauugcgggaccguggccaacggaguucugcaaacauucaugcgcauggcguggggcgggagcuacauugcccuugacucuggauguggcuccugggauugcaucaugaccagcuaccaguaucugauuauccagaacacgacaugggaggaccacugucaguuuucuagacccuccccuaucggguaccucggacugcuuagccaacggacccgcgauauuuauaucuccagacggcugcucggcacauucaccuggacccugucugacagcgaaggcaaggauacacccgggggauacugccugacgcgcuggaugcucauugaggcugagcugaaauguuuuggcaauaccgccguggcuaagugcaacgaaaaacaugacgaggaguucugcgauaugcuuagacuguuugacuucaauaagcaggccauccagcggcucaaagcgccugcccagauguccauucaacugaucaacaaggcugucaaugcccuuaucaacgaucagcugauuaugaagaaucaccuccgcgacaucauguguauucccuauugcaacuacagcaaauauugguaccugaaucacacaaccacagggaagaccucucugccuaaauguuggcucguguccaacggaagcuaccugaaugaaacgcauuucucugacgauaucgaacagcaagcugacaacaugauuacagagaugcuucagaaggaguauauggaaagacagggcaaaaccccgcuggggcucguggaucuguuugucuucagcaccuccuuuuaccugaucucuaucuuccuucaccucguuaagauucccacacaucggcacaucgugggaaaaagcugcccuaagccccaucgccugaaucacaugggcauuuguuccugcggccuguauaagcagccuggggugcccgucaaauggaagagaugaggacuagucccuguucccagagcccacuuuuuuuucuuuuuuugaaauaaaauagccugucuuucagaucucaaaggcucuuuucagagccaccaaaaaaaaaaaaaaaaaaaaaaaaaaaaaaaaaaaaaaaaaaaaaaaaaaaaaaaaaaaaaaaaagaauu

SEQ ID NO: 28316 - RNA, 1717 nt, Artificial Sequence
  mRNA product Design a-1 (hSL-A64-N5) comprising derived and/or modified sequence from LASV(G1442-SLE-2011;Clade IV)__AIT17180__GPCmut5 (opt5)
aggagagucccgcagucggcguccagcggcucugcuuguucgugugugugucguugcaggccuuauucaagcuuaccaugggccagaucgugaccuucuuucaagaggucccccacguuauugaagaggugaugaacaucgugcugauugcccucagcauccuggcuguccuuaaggggcuguacaauguggccacaugcggacucauuggccugguuacguuccuucugcucugugggagauccugcaccacaacccuguauaaaggaguguacgaacugcagacacucgagcugaacauggaaacccuuaauaugacaaugccucugucuuguaccaagaacaauagccaucacuauauccgggucggcaacgagacggggcucgagcugacccuuacaaauaccuccaucauuaaccauaaauuuugcaaucugucugacgcgcacaagaaaaaccucuacgaucaugcucugaugagcaucauuuccacauuccaccugucuaucccgaauuuuaaccaguaugaagccaugagcugugacuucaauggaggcaagauuuccgugcaguacaaccucagccacucuuaugccggcgaugcugccaaucauugcgggaccguugcuaacggagugcugcaaacguuuaugcgcauggccuggggcggguccuacaucgcgcuugacagcggauguggcaacugggauugcauuaugacaucuuaccaguaucugaucauccagaauaccacaugggacgaucacugucaguucuccagacccagcccuauuggguaccucggacugcuuucucaacggacccgcgacgucuauaucuccagacggcugcucggcaccuuuacauggacgcugagcgauuccgagggcaaggacacccccgggggauacugccugacacgcuggaugcucauugaagccgagcugaaauguuucggcaacaccgcuguggccaagugcaaugagaaacaugaugaagaguuuugcgacaugcuuagacuguucgauuuuaacaagcaggcuauccagcggcucaaagccccugcgcagaugucuauucaacugaucaauaaggccgugaacgcucuuaucaaugaccagcugauuaugaagaaccaccuccgcgacaucauguguauucccuauugcaauuacagcaaauauugguaccugaacaauacagccaccgggaagacgucccugccuaaauguuggcucaucagcaacggaucuuaccugaaugaaacacacuucuccgaugacauugagcaggaagcugauaacaugaucaccgagaugcuucaaaaggaguauauggaaagacagggcaaaaccccgcuggggcucgucgaccuguucguuuuuagcacaucuuucuaccugaucagcauuuuucuucaucucgugaagauccccacccaccggcauauugugggaaaauccugcccuaagccccaccgccugaaucauaugggcaucuguucuugcggccuguauaagcagccugggguccccgugagauggaaacggugaggacuagucccuguucccagagcccacuuuuuuuucuuuuuuugaaauaaaauagccugucuuucagaucucaaaggcucuuuucagagccaccaaaaaaaaaaaaaaaaaaaaaaaaaaaaaaaaaaaaaaaaaaaaaaaaaaaaaaaaaaaaaaaaagaauu

SEQ ID NO: 28317 - RNA, 1717 nt, Artificial Sequence
  mRNA product Design a-1 (hSL-A64-N5) comprising derived and/or modified sequence from LASV(G3010-SLE-2013;Clade IV)__AIT17344__GPCmut5 (opt5)
aggagagucccgcagucggcguccagcggcucugcuuguucgugugugugucguugcaggccuuauucaagcuuaccaugggccagaucgugaccuucuuucaagaggucccccacguuauugaagaggugaugaacaucgugcugauugcccucagcauccuggcuguccuuaaggggcuguacaauuucgccacaugcggacucgugggccugguuacguuucuucugcucugugggagauccugcaccacaucucuguauaaaggaguguacgaacugcagacccucgagcugaacauggaaacacuuaauaugaccaugccucugagcuguacaaagaacaauucccaucacuauauuauggucggcaacgagaccgggcucgagcugacgcuuaccaauacaucuaucaucaaccauaaauucugcaaucugagcgacgcgcacaagaaaaaccucuacaaucaugcucugauguccauuaucucuaccuuucaccugagcauuccgaacuucaaucaguaugaagccauguccugugauuuuaacggaggcaagaucagcgugcaguacaaucucucucacuccuaugccggcgacgcugccagccauugcgggacaguugcuaacggagugcugcaaaccuucaugcggauggccuggggcgggucuuacauugcgcuugauuccggauguggcaagugggacugcaucaugacgagcuaccaguaucugauuauccagaacacaaccugggaggaucacugucaguuuucucgccccuccccuaucggguaccucggacugcuuagccaaagaacacgggacauuuauaucucccgcagacugcucggcaccuucaccuggacacugucugauagcgaaggcaaagacacgcccgggggauacugccugacccgguggaugcucauugaggccgagcugaaguguuuuggcaauacagcugucgccaaaugcaacgaaaagcaugaugaggaguucugcgacaugcuucgccuguuugauuucaauaaacaggcuauccagagacucaagaccccugcccagauguccauucaacugaucaacaaggcggugaaugcccuuaucaacgaccagcugauuaugaaaaaucaccuccgggauaucauguguauucccuauugcaacuacagcaaguauugguaccugaaucacacaaccacggggaaaacaucucugccuaaguguuggcucguguccaacggaagcuaccugaaugaaacccauuucucugacgacaucgaacagcaagcugauaacaugauuaccgagaugcuucagaaagaguauauggaacgccagggcaagacaccgcuggggcucgucgaccuguuuguuuucagcaccuccuuuuaccugaucucuaucuuccuucaccucgugaaaauucccacacauagacacaucgugggaaagagcugcccuaagccccaucggcugaaucacaugggcauuuguuccugcggccuguauaaacagccugggguccccgugcgcuggaagagaugaggacuagucccuguucccagagcccacuuuuuuuucuuuuuuugaaauaaaauagccugucuuucagaucucaaaggcucuuuucagagccaccaaaaaaaaaaaaaaaaaaaaaaaaaaaaaaaaaaaaaaaaaaaaaaaaaaaaaaaaaaaaaaaaagaauu

SEQ ID NO: 28318 - RNA, 1717 nt, Artificial Sequence
  mRNA product Design a-1 (hSL-A64-N5) comprising derived and/or modified sequence from LASV(G502-SLE-2009;Clade IV)__AIT17126__GPCmut5 (opt5)
aggagagucccgcagucggcguccagcggcucugcuuguucgugugugugucguugcaggccuuauucaagcuuaccaugggccagaucgugaccuucuuucaagaggucccccacguuauugaagaggugaugaacaucgugcugauugcccucagcauccuggcuguccuuaaggggcuguacaauuucgccacaugcggacucgugggccugcuuacguuucugcuccugugugggagauccugcaccacaggacuguauaaaggcguuuacgaacuccagacccuggagcuuaacauggaaacacugaauaugaccaugccucucucuuguacaaagaacaauagccaucacuauauuaugguggggaacgagaccggacuggagcuuacgcugaccaauacauccaucaucaaccauaaauucugcaaucucucugacgcgcacaagaaaaaccuguacgaucaugcucugaugagcauuaucuccaccuuucaccucucuauuccgaauuucaaccaguaugaagccaugagcugugacuuuaauggcggcaagaucuccguccaguacaaccugagccacucuuaugccggggaugcugccgaccauugcggaacaguggcuaauggcguucuucaaaccuucaugcggauggccuggggaggguccuacauugcgcuggauagcggcugugggcgcugggacugcaucaugacgucuuaccaguaucucauuauccagaacacaaccugggaggaucacugucaguuuuccagacccagcccuaucggauaccugggccuucugucucaacggacacgcgacauuuauaucuccagacggcuccugggcaccuucaccuggacacugagcgauuccgaagggaaggacacgcccggaggcuacugccucacccgcuggaugcugauugaggccgagcuuaaauguuuugggaacacagcuguggccaagugcaaugaaaaacaugaugaggaguucugcgacaugcugagacucuuugauuucaacaagcaggcuauccagcggcugaaagccccugcgcagaugucuauucaacuuaucaauaaggccgucaacgcucugaucaaugaccagcucgugaugaagaaccaucugcgcgacauuauguguauccccuauugcaauuacagcagauauugguaccugaaccacaccacaaccggacggacgucccucccuaaauguuggcuggugagcaauggcucuuaccuuaacgaaacacacuucuccgaugacauugaacagcaagccgauaauaugaucaccgagaugcugcagaaggaguauauggaacgccaggggaaaaccccgcucggacuggucgaccuguuuguuuucagcacaucuuuuuaccuuauuagcaucuuccuccaccuggugaagauccccacccauagacacauugugggcaaauccugcccuaagccccaucggcugaaccacaugggcaucuguucuugcgggcucuauaaacagccuggaguccccgugaaguggaagcgcugaggacuagucccuguucccagagcccacuuuuuuuucuuuuuuugaaauaaaauagccugucuuucagaucucaaaggcucuuuucagagccaccaaaaaaaaaaaaaaaaaaaaaaaaaaaaaaaaaaaaaaaaaaaaaaaaaaaaaaaaaaaaaaaaagaauu

SEQ ID NO: 28319 - RNA, 1717 nt, Artificial Sequence
  mRNA product Design a-1 (hSL-A64-N5) comprising derived and/or modified sequence from LASV(G733-SLE-2010;Clade IV)__AIT17154__GPCmut5 (opt5)
aggagagucccgcagucggcguccagcggcucugcuuguucgugugugugucguugcaggccuuauucaagcuuaccaugggccagaucgugaccuucuuucaagaggucccccacguuauugaagaggugaugaacaucgugcugauugcccucagcauccuggcuguccuuaaggggcuguacaauuucgccacaugcggaauugugggccucguuuccuuucugcuucugugugggagaucuugcacgaccagccucuauaaaggaguguacgaacugcagacacuggagcucaacauggaaacccugaauaugacaaugccucuuuccuguaccaagaacaauucucaucacuauaucauggucggcaacgagacagggcuggagcucacccugacgaauaccagcaucauuaaccauaaauucugcaaucuuuccgacgcgcacaagaaaaaccuguacgaucaugcucucaugucuaucauuagcacauuucaccuguccaucccgaauuucaaccaguaugaagccaugagcugugacuuuaauggaggcaagauuucugugcaguacaaccugucccacagcuaugccggcgaugcugccaaucauugcgggaccaucgcuaacggaguucuccaaacauucaugcggauggccuggggcgggucuuacauugcgcuggacuccggaugugaucgcugggacugcaucaugaccagcuaccaguaucuuaucauucagaacacgacaugggaggaucacugucaguuuucuagacccuccccuaucggcuaccuggggcuccugagccaacggacccgcgacauuuauaucuccagacggcuucugggaacauucaccuggacccucucugauagcgaaggcaaggacacacccggcggguacugccugacgcgcuggaugcugauugaggccgagcucaaauguuuuggaaauaccgcuguggccaagugcaacgaaaaacaugaugaggaguucugcgacaugcugagacuuuuugauuucaauaagcaggcuauccagcggcugaaagccccugcgcagauguccauccaacucauuaacaaggccgucaaugcucugaucaacgaccagcuuauuaugaagaaucaucugcgcgacaucauguguauucccuauugcaacuacagcaaauauugguaccucaaucacacaaccacaggcaagaccucucugccuaaauguuggcugguguccaacgggagcuaccucaaugaaacgcacuucucugaugacaucgaacagcaagccgauaacaugaucacagagaugcugcagaaggaguauauggaaagacagggaaaaaccccgcuuggccugguggaccucuuugucuucagcaccuccuuuuaccugauuucuaucuuccugcaccuuguuaagauucccacacaucggcacgugguggggaaaagcugcccuaagccccaucgccucaaucacaugggaaucuguuccugcggccuguauggccagccugggguccccgugaaguggaaaagaugaggacuagucccuguucccagagcccacuuuuuuuucuuuuuuugaaauaaaauagccugucuuucagaucucaaaggcucuuuucagagccaccaaaaaaaaaaaaaaaaaaaaaaaaaaaaaaaaaaaaaaaaaaaaaaaaaaaaaaaaaaaaaaaaagaauu

SEQ ID NO: 28320 - RNA, 1717 nt, Artificial Sequence
  mRNA product Design a-1 (hSL-A64-N5) comprising derived and/or modified sequence from MOPV/LASV reassortant(IGS-1;Clade IV)__AFY05576__GPCmut5 (opt5)
aggagagucccgcagucggcguccagcggcucugcuuguucgugugugugucguugcaggccuuauucaagcuuaccaugggccagaucgugaccuucuuucaagaggucccccacguuauugaagaggugaugaacaucgugcugauugcccucagcguccuggcugugcuuaaggggcuguacaauuucgccacaugcggacucguuggccuggugacguuucuucugcucugugggagauccugcaccacaucucuguauaaaggagucuacgaacugcagacccucgagcugaacauggaaacacuuaauaugaccaugccucugagcuguacaaagaacaauucccaucacuauaucauggugggcaacgagaccgggcucgagcugacgcuuaccaauacaucuauuaucaaccauaaauucugcaaucugagcgacgcgcacaagaaaaaccucuacgaucaugcucugauguccaucauuucuaccuuucaccugagcaucccgaauuucaaccaguaugaagccauguccugugacuuuaauggaggcaagauuagcguucaguacaaccucucucacuccuaugccggcgaugcugccaaucauugcgggacaguggcuaacggaguccugcaaaccuucaugcggauggccuggggcgggagcuacaucgcgcuugacucuggauguggcaacugggauugcauuaugacguccuaccaguaucugaucauucagaauacaaccugggaggaccacugucaguuuagccgccccucuccuaucggguaccucggacugcuuucccaaagaacacgggauaucuauauuagccgcagacugcucggcaccuucaccuggacacuguccgacucugaaggcgaggauacgcccgggggauacugccugacccgguggaugcucaucgaggccgaacugaaguguuuuggcaacacagcuguggccaaaugcaaugagaagcaugacgaagaguucugcgauaugcuucgccuguuugacuucaacaaacaggcuauucagagacucaaggccccugcgcagaugagcauccaacugauuaauaaagccgugaacgcucuuaucaaugaucagcugaucaugaagaaccaccuccgggacauuauguguauccccuauugcaauuacuccaaguauugguaccugaaccacaccacaaccgggcgcacgagccugccuaaauguuggcucgucucuaauggauccuaccugaacgaaacacauuucagcgacgauauugagcagcaagccgacaauaugaucaccgagaugcuucagaaggaauauauggagagacagggcaaaaccccgcuggggcucguugaucuguuuguguucucuaccagcuuuuaccugauuuccaucuuccuucaccucgugaagauccccacacaucggcacauugucggaaaaucuugcccuaagccccaucgccugaaccacaugggcaucuguagcugcggccuguauaaacagccuggggugcccguuaaguggaagagaugaggacuagucccuguucccagagcccacuuuuuuuucuuuuuuugaaauaaaauagccugucuuucagaucucaaaggcucuuuucagagccaccaaaaaaaaaaaaaaaaaaaaaaaaaaaaaaaaaaaaaaaaaaaaaaaaaaaaaaaaaaaaaaaaagaauu

SEQ ID NO: 28321 - RNA, 1717 nt, Artificial Sequence
  mRNA product Design a-1 (hSL-A64-N5) comprising derived and/or modified sequence from LASV(LM765-SLE-2012;Clade IV)__AIT17814__GPCmut5 (opt5)
aggagagucccgcagucggcguccagcggcucugcuuguucgugugugugucguugcaggccuuauucaagcuuaccaugggccagaucgugaccuucuuucaagaggucccccacguuauugaagaggugaugaacaucgugcugauugcccucagcauccuggcuguccuuaaggggcuguacaauuucgccacaugcggacucgugggccugguuacguuucuucugcucugugggagauccugcaccacaucucuguauaaaggaguguacgaacugcagacccucgagcugaacauggaaacacuuaauaugaccaugccucugagcuguacaaagaacaauucccaucacuauauuauggucggcaacgagaccgggcucgagcugacgcuuaccaauacaucuaucaucgaccauaaauucugcaaccugagcgaugcgcaccggaagaaucucuacgaccaugcucugauguccauuaucucuaccuuucaccugagcauuccgaacuucaaucaguaugaagccauguccugugauuuuaacggaggcaaaaucagcgugcaguacaaucucucucacuccuaugccaaggacgcugccgaucauugcggcacaguugcuaacggggugcugcaaaccuucaugcgcauggccuggggaggcagcuacauugcgcuugacucuggguguggaagaugggauugcaucaugacguccuaccaguaucugauuauccagaauacaaccugggaggaccacugucaguuuagccggcccucuccuaucggcuaccucgggcugcuuucccaacgcacaagagauauuuauaucagccggcgccugcucggaaccuucaccuggacacuguccgacucugaaggcaaggauacgcccggcggguacugccugaccagauggaugcucauugaggccgagcugaaauguuuuggaaacacagcugucgccaagugcaacgaaaaacaugacgaggaguucugcgauaugcuucggcuguuugacuucaauaagcaggcuauccagcgccucaaagccccugcgcagaugagcauucaacugaucaacaaggccgugaaugcucuuaucaacgaccagcugauuaugaagaaucaccucagagauaucauguguauucccuauugcaacuacuccaaauauugguaccugaaucacaccacaaccggcaagacgagccugccuaaauguuggcucgugucuaacggguccuaccugaaugaaacacauuucagcgacgauaucgaacagcaagccgacaacaugauuaccgagaugcuucagaaggaguauauggaacggcagggaaaaaccccgcugggccucgucgaucuguuuguuuucucuaccagcuuuuaccugaucuccaucuuccuucaccucgugaagauucccacacaucgccacaucguggggaaaccuugccccaagccucauagacugaaucacaugggaauuuguucuugcggccuguauaagcagcccggcgucccggugaaauggaagcggugaggacuagucccuguucccagagcccacuuuuuuuucuuuuuuugaaauaaaauagccugucuuucagaucucaaaggcucuuuucagagccaccaaaaaaaaaaaaaaaaaaaaaaaaaaaaaaaaaaaaaaaaaaaaaaaaaaaaaaaaaaaaaaaaagaauu

SEQ ID NO: 28322 - RNA, 1717 nt, Artificial Sequence
  mRNA product Design a-1 (hSL-A64-N5) comprising derived and/or modified sequence from LASV(LM776-SLE-2012;Clade IV)__AIT17824__GPCmut5 (opt5)
aggagagucccgcagucggcguccagcggcucugcuuguucgugugugugucguugcaggccuuauucaagcuuaccaugggccagaucgugaccuucuuucaagaggucccccacguuauugaagaggugaugaacaucgugcugauugcccucagcauccuggcuguccuuaaggggcuguacaauuucgccacaugcggacucgugggccugguuacguuucuucugcucugugggagauccugcaccacaucuguguauaaaggagucuacgaacugcagacccuggagcucaacauggaaacacugaauaugaccaugccucuuagcuguacaaagaacaauucccaucacuauauuauggugggcaacgagaccgggcuggagcucacgcugaccaauacaucuaucaucaaccauaaauucugcaaucuuagcgacgcgcacaagaaaaaccuguacgaucaugcucucauguccauuaucucuaccuuucaccugagcauuccgaauuucaaccaguaugaagccauguccugugacuuuaauggaggcaagaucagcguucaguacaaccugucucacuccuaugccggcgaugcugccaaucauugcgggacaguggcuaacggaguccuccaaaccuucaugcggauggccuggggcgggagcuacauugcgcuggacucuggauguggcaagugggauugcaucaugacguccuaccaguaucuuauuauccagaacacaaccugggaggaccacugucaguuuagccgccccucuccuaucggguaccugggacuccugucccaaagaacacgggauauuuauaucagccgcagacuucugggcaccuucaccuggacacucuccgacucugaaggcaaagauacgcccgggggauacugccugacccgguggaugcugauugaggccgagcucaaguguuuuggcaauacagcuguggccaaaugcaacgaaaagcaugacgaggaguucugcgauaugcugcgccuuuuugacuucaauaaacaggcuauccagagacugaaggccccugcgcagaugagcauucaacucaucaacaaggccgugaaugcucugaucaacgaucagcuuauuaugaaaaaucaucugcgggacaucauguguauucccuauugcaacuacuccaaguauugguaccucaaucacaccacaaccgggaaaacgagccugccuaaguguuggcuggucucuaacggauccuaccucaaugaaacacacuucagcgacgauaucgaacagcaagccgacaacaugauuaccgagaugcugcagaaagaguauauggaacgccagggcaagaccccgcuugggcugguugaucucuuuguguucucuaccagcuuuuaccugaucuccaucuuccugcaccuugugaaaauucccacacauagacacaucgucggaaagucuugcccuaagccccaucggcucaaucacaugggcauuuguagcugcggccuguauaaacagccuggggugcccguucgcuggaagagaugaggacuagucccuguucccagagcccacuuuuuuuucuuuuuuugaaauaaaauagccugucuuucagaucucaaaggcucuuuucagagccaccaaaaaaaaaaaaaaaaaaaaaaaaaaaaaaaaaaaaaaaaaaaaaaaaaaaaaaaaaaaaaaaaagaauu

SEQ ID NO: 28323 - RNA, 1717 nt, Artificial Sequence
  mRNA product Design a-1 (hSL-A64-N5) comprising derived and/or modified sequence from LASV(Mad39;Clade IV)__ANH09722__GPCmut5 (opt5)
aggagagucccgcagucggcguccagcggcucugcuuguucgugugugugucguugcaggccuuauucaagcuuaccaugggccagaucgugaccuucuuucaagaggucccccacguuauugaagaggugaugaacaucgugcugauugcccucagcauccuggcuguccuuaaggggcuguacaauguggccacaugcggacucauuggccugguuacguuccuucugcucugugggagauccugcaccacaacccuguauaaaggaguguacgaacugcaggcgcucgagcugaacauggaaacacuuaauaugaccaugccucugucuuguacaaagaacaauagccaucacuauauccgggucggcaacgagaccgggcucgagcugacgcuuaccaauacaucccugaucaaccauaaauuuugcaaucucucugacgcucacaagaaaaaccuguacgaucaugcccugaugagcauuaucuccaccuuccaccucucuauuccgaauuuuaaccaguaugaagccaugagcugugacuucaaugauggaaagaucuccgugcaguacaaccugagccacacauaugcuggcgacaccgccaaucauugcggcacgguugcuaacggggugcuucaaacauuuaugcgcauggccuggggaggcucuuacauugcgcuggauuccggguguggaggcugggacugcaucaugaccagcuaccaguaucucauuauccagaacacaaccugggaggaucacugucaguucucuagacccuccccuaucggguaccugggacuucugagccaacggacccgcgacauuuauaucucuagacggcuccugggcacauuuacguggacccuguccgauagcgaaggcaaggacacacccgggggauacugccucacccgcuggaugcugauugaggccgagcuuaaauguuucggcaauacagcugucgccaagugcaacgaaaaacaugaugaggaauuuugcgacaugcugagacucuucgauuuuaauaagcaggcuauccagcggcugaaagccccugcgcagauguccauucaacuuaucaacaaggccgugaaugcucugaucaacgaccagcucauuaugaagaaucaucugcgcgacaucauguguauucccuauugcaacuacucuaaauauugguaccugaaucacaccgugacggggaagacaagccucccuaaauguuggcuggucuccaacggaagcuaccuuaaugagacccacuucucugaugacaucgaacagcaagccgauaacaugauuaccgagaugcugcagaaggaguauauggaaagacagggcaaaacaccgcucgggcugguugaccuguucguguuuuccaccagcuucuaccuuaucucuaucuuucuccaccuggugaagauucccacacaucggcacgucgugggaaaaccuugccccaagccucaucgccugaaucacaugggcaucuguagcugcggcuucuauaagcagcccgggguuccggugagauggaaacggugaggacuagucccuguucccagagcccacuuuuuuuucuuuuuuugaaauaaaauagccugucuuucagaucucaaaggcucuuuucagagccaccaaaaaaaaaaaaaaaaaaaaaaaaaaaaaaaaaaaaaaaaaaaaaaaaaaaaaaaaaaaaaaaaagaauu

SEQ ID NO: 28324 - RNA, 1717 nt, Artificial Sequence
  mRNA product Design a-1 (hSL-A64-N5) comprising derived and/or modified sequence from LASV(Z0947-SLE-2011;Clade IV)__AIT17840__GPCmut5 (opt5)
aggagagucccgcagucggcguccagcggcucugcuuguucgugugugugucguugcaggccuuauucaagcuuaccaugggccagaucgugaccuucuuucaagaggucccccacguuauugaagaggugaugaacaucgugcugauugcccucagcauccuggcuguccuuaaggggcuguacaauuucgccacaugcggacucgugggccugguuacguuucuucugcucugugggagauccugcaccauuucucuguauaaaggaguguacgaacugcagacacucgagcugaacauggaaacccuuaauaugacaaugccucugagcuguaccaagaacaauucccaucacuauaucauggucggcaacgagacagggcucgagcugacccuuacgaauaccucuaucauuaaccauaaauucugcaaucugagcgacgcgcacaagaaaaaccucuacgaucaugcucugauguccaucauuucuacauuucaccugagcaucccgaauuucaaccaguaugaagccauguccugugacuuuaauggaggcaagauuagcgugcaguacaaccucucucacuccuaugccggcgaugcugccaaucauugcgggaccguugcuaacggagugcugcaaacauucaugcggauggccuggggcgggagcuacaucgcgcuugacucuggaugugaucgcugggacugcauuaugaccuccuaccaguaucugaucauccagaacacgacaugggaggaucacugucaguuuagcagacccucuccuauuggcuaccucgggcugcuuucccaacggacccgcgacaucuauauuagcagacggcugcucggaacauucaccuggacccuguccgauucugaaggcaaggacacacccggcggguacugccugacgcgcuggaugcucaucgaggccgagcugaaauguuuuggaaauaccgcugucgccaagugcaacgaaaaacaugaugaggaguucugcgacaugcuuagacuguuugauuucaauaagcaggcuauucagcggcucaaagccccugcgcagaugagcauccaacugaucaacaaggccgugaaugcucuuauuaacgaccagcugaucaugaagaaucaccuccgcgacauuauguguauccccuauugcaacuacuccaaauauugguaccugaaucacacaaccacaggcaagaccagccugccuaaauguuggcucgugucuaacggguccuaccugaaugaaacgcauuucagcgaugacauugaacagcaagccgauaacaugaucacagagaugcuucagaaggaguauauggaaagacagggaaaaaccccgcugggccucgucgaccuguuuguuuucucuaccagcuuuuaccugaucuccauuuuccuucaccucgugaagauccccacacaucggcacauuguggggaaaccuugccccaagccucaucgccugaaucacaugggaaucuguucuugcggccuguauaagcagcccggcgucccggugaaauggaagagaugaggacuagucccuguucccagagcccacuuuuuuuucuuuuuuugaaauaaaauagccugucuuucagaucucaaaggcucuuuucagagccaccaaaaaaaaaaaaaaaaaaaaaaaaaaaaaaaaaaaaaaaaaaaaaaaaaaaaaaaaaaaaaaaaagaauu

SEQ ID NO: 28325 - RNA, 1748 nt, Artificial Sequence
  mRNA product Design a-1 (hSL-A100) comprising derived and/or modified sequence from LASV(Josiah;Clade IV)__NP_694870__GPCmut5 (opt1)
aggagagucccgcagucggcguccagcggcucugcuuguucgugugugugucguugcaggccuuauucaagcuuaccaugggccagaucgugaccuucuuccaggaggucccccacgugaucgaggaggugaugaacaucguccugaucgcccucagcgugcuggccgugcugaaggggcucuacaacuucgcgaccugcggccuggucgggcuggugacguuccuccugcugugcggccgcuccugcaccaccagccucuacaaggggguguacgagcugcagacccuggagcucaacauggagacgcugaacaugaccaugccgcuguccugcaccaagaacaacagccaccacuacaucauggucggcaacgagaccggccucgagcugacgcugaccaacaccuccaucaucaaccacaaguucugcaaccucagcgacgcccacaagaagaaccuguacgaccacgcccugauguccaucaucagcaccuuccaccucuccauccccaacuucaaccaguacgaggccaugagcugcgacuucaacgggggcaagaucuccgugcaguacaaccugagccacuccuacgccggggacgcggccaaccacugcggcacgguggccaacgggguccugcagaccuucaugcggauggccuggggcggcagcuacaucgcgcucgacuccgggugcggcaacugggacugcaucaugaccagcuaccaguaccugaucauccagaacaccacgugggaggaccacugccaguucucccggcccagccccaucggguaccugggccuccugucccagcgcacccgggacaucuacaucagccgccggcugcucggcaccuucaccuggacgcugagcgacuccgaggggaaggacaccccgggcggguacugccugacccgcuggaugcucaucgaggccgagcugaagugcuucggcaacaccgccguggccaagugcaacgagaagcacgacgaggaguucugcgacaugcugcggcuguucgacuucaacaagcaggccauccagcgccugaaggcgcccgcccagaugagcauccagcugaucaacaaggccgugaacgcccucaucaacgaccagcugaucaugaagaaccaccuccgggacaucaugugcauccccuacugcaacuacuccaaguacugguaccucaaccacacgaccaccggccgcaccagccugcccaagugcuggcuggucuccaacggcagcuaccucaacgagacgcacuucuccgacgacaucgagcagcaggccgacaacaugaucaccgagaugcugcagaaggaguacauggagcggcaggggaagacgccccugggccucguggaccuguucguguucagcaccuccuucuaccugaucagcaucuuccugcaccucgucaagaucccgacccaccgccacaucguggggaaguccugccccaagccccaccggcugaaccacaugggcaucugcagcugcgggcuguacaagcagcccggcgugccggucaaguggaagcgcugaggacuagucccuguucccagagcccacuuuuuuuucuuuuuuugaaauaaaauagccugucuuucagaucucaaaggcucuuuucagagccaccaaaaaaaaaaaaaaaaaaaaaaaaaaaaaaaaaaaaaaaaaaaaaaaaaaaaaaaaaaaaaaaaaaaaaaaaaaaaaaaaaaaaaaaaaaaaaaaaaaaaa

SEQ ID NO: 28326 - RNA, 1745 nt, Artificial Sequence
  mRNA product Design a-1 (hSL-A100) comprising derived and/or modified sequence from LASV(LP;Clade I)__AAF86701__GPCmut5 (opt1)
aggagagucccgcagucggcguccagcggcucugcuuguucgugugugugucguugcaggccuuauucaagcuuaccaugggccagaucaucaccuucuuccaggaggugccccacgucaucgaggaggugaugaacaucgugcugaucgcccucagccugcuggccauccucaaggggcuguacaacaucgcgaccugcggcaucaucgggcuggucgccuuccucuuccugugcggcaaguccugcagccugacgcucaagggcggguacgagcugcagacccuggagcucaacauggagacccugaacaugaccaugccgcuguccugcacgaagaacagcucccaccacuacauccgcgugggcaacgagaccgggcucgagcugacccugaccaacacgagcaucaucaaccacaaguucugcaaccucuccgacgcccacaagaagaaccuguacgaccacgcccugaugagcaucaucuccaccuuccaccucagcauccccaacuucaaccaguacgaggccauguccugcgacuucaacggcgggaagaucagcgugcaguacaaccugucccacagcuacgcgggcgacgccgccgagcacugcgggaccgucgccaacggcgugcugcagaccuucaugcggauggcguggggcgggcgcuacaucgcccucgacuccggcugcgggaacugggacugcaucaugacgagcuaccaguaccugaucauccagaacaccaccugggaggaccacugccaguucucccggcccagccccaucggcuaccugggccuccugucccagcgcacccgggacaucuacaucagccgccggcugcucgggacguucaccuggacccugagcgacuccgagggcaacgagacccccgggggcuacugccugacgcgcuggaugcucaucgaggccgagcugaagugcuucgggaacaccgccguggccaagugcaacgagaagcacgacgaggaguucugcgacaugcugcggcuguucgacuucaacaagcaggcgauccgccggcugaaggcccccgcccagaugagcauccagcugaucaacaaggccgucaacgcccucaucaacgaccagcugaucaugaagaaccaccuccgcgacaucaugugcauccccuacugcaacuacuccaaguacugguaccucaaccacaccagcuccggccggaccagccugcccaagugcuggcugaucuccaacgggagcuaccucaacgagacgcaguucuccgacgacaucgagcagcaggcggacaacaugaucaccgagaugcugcagaaggaguacaucgagcgccagggcaagaccccgcuggggcucguggacaucuucaucuucagcaccuccuucuaccugaucagcaucuuccugcaccugaucaagaucccgacgcaccggcacaucgugggcaagcccugccccaagccccaccgccucaaccacaugggggucugcuccugcggccuguacaagcacccgggcgugcccaccaaguggaagcggugaggacuagucccuguucccagagcccacuuuuuuuucuuuuuuugaaauaaaauagccugucuuucagaucucaaaggcucuuuucagagccaccaaaaaaaaaaaaaaaaaaaaaaaaaaaaaaaaaaaaaaaaaaaaaaaaaaaaaaaaaaaaaaaaaaaaaaaaaaaaaaaaaaaaaaaaaaaaaaaaaaaaa

SEQ ID NO: 28327 - RNA, 1745 nt, Artificial Sequence
  mRNA product Design a-1 (hSL-A100) comprising derived and/or modified sequence from LASV(803213;Clade II)__AAF86703__GPCmut5 (opt1)
aggagagucccgcagucggcguccagcggcucugcuuguucgugugugugucguugcaggccuuauucaagcuuaccaugggccagaucaucaccuucuuccaggaggugccccacgucaucgaggaggugaugaacaucgugcugaucgcccucagccugcuggccauccucaaggggaucuacaacgucgcgaccugcggccuguucgggcugaucuccuuccuccugcugugcggccgcagcugcuccgugacguacaaggggguguacgagcuccagacccuggagcugaacauggccaaccucaacaugaccaugccgcugagcugcaccaagaacaacucccaccacuacaucauggucggcaacgagacgggccuggagcucacccugaccaacaccagcaucaucaaccacaaguucugcaaccuguccgacgcccacaagaagaaccucuacgaccacgcccugaugagcaucaucuccacguuccaccugagcauccccaacuucaaccaguacgaggccauguccugcgacuucaacgggggcaagaucagcgugcaguacaaccucucccacagcuucgcgguggacgccgccaaccacugcgggaccaucgccaacggcguccugcagaccuucaugcggauggcguggggcggguccuacaucgcccuggacagcggcugcgggaacugggacugcaucaugaccuccuaccaguaccucaucauccagaacacgaccugggaggaccacugccaguucagccgccccucccccaucggcuaccuggggcugcucagccagcggacccgcgacaucuacaucagccggcgccugcugggcaccuucacguggacccucuccgacagcgagggcaacgaggcccccgggggcuacugccugacccgguggaugcugaucgaggccgagcucaagugcuucgggaacaccgccguggcgaagugcaacgagaagcacgacgaggaguucugcgacaugcugcgccuguucgacuucaacaagcaggccaucaagcggcucaagacgcccgcccagauguccauccagcugaucaacaaggccgugaacgcccugaucaacgaccagcucaucaugaagaaccaccuccgcgacaucaugugcauccccuacugcaacuacagccgguacugguaccugaaccacaccgucaccgggaagaccucccugccccgcugcuggcuggugagcaacggcuccuaccugaacgagacgcacuucagcgacgacaucgagcagcaggcggacaacaugaucaccgagaugcuccagaaggaguacauggaccggcagggcaagaccccgcuggggcugguggaccucuucgucuucuccaccagcuucuaccugaucuccaucuuccugcaccuggugaagaucccgacgcaccgccacaucgugggcaagcccugccccaagccccaccggcucaaccacauggggaucugcagcugcggccuguacaagcacccggggguccccgugaaguggaagcgcugaggacuagucccuguucccagagcccacuuuuuuuucuuuuuuugaaauaaaauagccugucuuucagaucucaaaggcucuuuucagagccaccaaaaaaaaaaaaaaaaaaaaaaaaaaaaaaaaaaaaaaaaaaaaaaaaaaaaaaaaaaaaaaaaaaaaaaaaaaaaaaaaaaaaaaaaaaaaaaaaaaaaa

SEQ ID NO: 28328 - RNA, 1745 nt, Artificial Sequence
  mRNA product Design a-1 (hSL-A100) comprising derived and/or modified sequence from LASV(GA391;Clade III)__CAA36645__GPCmut5 (opt1)
aggagagucccgcagucggcguccagcggcucugcuuguucgugugugugucguugcaggccuuauucaagcuuaccaugggccagaucgugaccuucuuccaggaggucccccacgugaucgaggaggugaugaacaucguccugaucgcccucagcauccuggccauccugaaggggcucuacaacguggcgaccugcggccugaucgggcuggugacguuccuccugcuguccggccgcagcugcucccucaucuacaaggggaccuacgagcugcagacccuggagcucaacauggagacccugaacaugacgaugccgcugagcugcaccaagaacaacucccaccacuacauccgggucggcaacgagaccggccucgagcugacccugacgaacaccagcauccucaaccacaaguucugcaaccuguccgacgcccacaagcgcaaccuguacgaccacagccucauguccaucaucagcaccuuccaccuguccauccccaacuucaaccaguacgaggccaugagcugcgacuucaacgggggcaagaucaccgugcaguacaaccugucccacagcuucgccguggacgccgcggggcacugcggcacgcucgccaacgggguccugcagaccuucaugcggauggccuggggcggcuccuacaucgcccuggacagcgggugcggcaacugggacugcaucaugaccuccuaccaguaccucaucauccagaacaccacgugggacgaccacugccaguucagccggcccucccccaucggguaccugggccugcucagccagcgcacccgggacaucuacaucagccgccggcugcugggcaccuucaccuggacgcucuccgacagcgaggggaacgagaccccgggcggguacugccugacccgcuggaugcugaucgaggcggagcucaagugcuucggcaacaccgccguggccaagugcaacgagaagcacgacgaggaguucugcgacaugcugcggcuguucgacuucaacaagcaggccauccgccggcucaagacgcccgcccagauguccauccagcugaucaacaaggcggugaacgcccugaucaacgaccagcucaucaugaagaaccaccuccgcgacaucaugugcauccccuacugcaacuacagccgguacugguaccugaaccacaccuccaccggcaagaccagccugccccgcugcuggcugaucuccaacggcagcuaccugaacgagacgaaguucuccgacgacaucgagcagcaggccgacaacaugaucaccgagaugcuccagaaggaguacaucgaccggcaggggaagacgccccugggccuggucgaccuguucguguucagcaccuccuucuaccucaucagcaucuuccugcaccuggugaagaucccgacccaccgccacaucgucgggaagcccugccccaagccccaccggcucaaccacaugggcaucugcuccugcgggcuguacaagcagccgggcgugcccgugcgcuggaagcggugaggacuagucccuguucccagagcccacuuuuuuuucuuuuuuugaaauaaaauagccugucuuucagaucucaaaggcucuuuucagagccaccaaaaaaaaaaaaaaaaaaaaaaaaaaaaaaaaaaaaaaaaaaaaaaaaaaaaaaaaaaaaaaaaaaaaaaaaaaaaaaaaaaaaaaaaaaaaaaaaaaaaa

SEQ ID NO: 28329 - RNA, 1748 nt, Artificial Sequence
  mRNA product Design a-1 (hSL-A100) comprising derived and/or modified sequence from LASV(AV;Clade V)__CCA30314__GPCmut5 (opt1)
aggagagucccgcagucggcguccagcggcucugcuuguucgugugugugucguugcaggccuuauucaagcuuaccaugggccagaucgugaccuucuuccaggaggucccccacgugaucgaggaggugaugaacaucguccugaucgcccucagcauccuggccgugcugaaggggcucuacaacaucgcgaccugcggccugaucgggcugaucacguuccuccugcugugcggccgcuccugcagcuccaaccucuacaaggggguguacgagcugcagagccuggaccucaacauggagacccugaacaugaccaugccgcuguccugcaccaagaacaacagccaccacuacauccgggucggcaacgacacgggccucgagcugacccugaccaacaccuccauccucaaccacaaguucugcaaccugagcgacgcccacaagaaggaccuguacgaccacgcccucauguccaucaucagcacguuccaccuguccauccccaacuucaaccaguacgaggccaugagcugcgacuucaacgggggcaagaucuccgugcaguacaaccugagccacuccuacgccaucgacgcggccaaccacugcgggaccguggccaacggcauccuccagaccuucaugcgcauggccuggggcgggagcuacaucgcgcuggacuccggcugcgggaacugggacugcaucaugaccagcuaccaguaccugaucauccagaacacgaccugggagaaccacugccaguucucccgccccagccccaucggcuaccucgggcugcugagccagcggacccgcgacaucuacaucucccggcgccuccugggcaccuucacguggacccugagcgacuccgagggcaacgccacccccgggggcuacugccucacccgguggaugcugaucgaggccgagcugaagugcuucgggaacacggccgucgccaagugcaacgagaagcacgacgaggaguucugcgacaugcuccgccuguucgacuucaacaagcaggcgaucagccggcugaagucccccgcccagaugagcauccagcucaucaacaaggccgugaacgcccugaucaacgaccagcugaucaugaagaaccaccuccgcgacaucaugugcauccccuacugcaacuacuccaaguacugguaccugaaccacaccaucaccgggaagaccagccugcccaagugcuggcucguguccaacggcagcuaccugaacgagacgcacuucuccgacgacaucgagcagcaggccgacaacaugaucaccgagaugcugcagaaggaguacauggagcggcagggcaagaccccgcucgggcuggucgaccuguucguguucagcaccuccuucuaccugaucagcaucuuccuccgccuggugaagaucccgacgcaccggcacaucgucggcaagcccugccccaagccccaccgccugaaccacauggggaucugcuccugcggccucuacaagcagccgggggugcccgugcgguggaagcgcugaggacuagucccuguucccagagcccacuuuuuuuucuuuuuuugaaauaaaauagccugucuuucagaucucaaaggcucuuuucagagccaccaaaaaaaaaaaaaaaaaaaaaaaaaaaaaaaaaaaaaaaaaaaaaaaaaaaaaaaaaaaaaaaaaaaaaaaaaaaaaaaaaaaaaaaaaaaaaaaaaaaaa

SEQ ID NO: 28330 - RNA, 1745 nt, Artificial Sequence
  mRNA product Design a-1 (hSL-A100) comprising derived and/or modified sequence from LASV(Togo/2016/7082;Clade VI)__AMR44577__GPCmut5 (opt1)
aggagagucccgcagucggcguccagcggcucugcuuguucgugugugugucguugcaggccuuauucaagcuuaccaugggccagaucaucaccuucuuccaggaggugccccacgucaucgaggaggugaugaacaucgugcugaucgcccucagccugcuggccauccucaagggggucuacaacguggcgaccugcggcaucaucgggcuggugacguuccuguuccucugcggccgcuccugcagccugaucuacaagggguccuacgagcugcagacccucgagcugaacauggagacccugaacaugaccaugccgcucagcugcacgaagaacuccagccaccacuacauccgggucggcaacgagaccggccuggagcugacccucaccaacacguccaucaucaaccacaaguucugcaaccugagcgacgcccacaagcgcaaccuguacgaccacgcccucauguccauccugagcaccuuccaccuguccauccccaacuucaaccaguacgaggccaugagcugcgacuucaacgggggcaagaucuccgugcaguacaaccucagccacgccuacgcgguggacgccgccgagcacugcgggaccgucgccaacggcgugcugcagaccuucaugcggauggcguggggcggguccuacaucgcccuggacagcggcugcgggaacugggacugcaucaugacguccuaccaguaccucaucauccagaacaccaccugggaggaccacugccaguucagccggcccucccccaucggcuaccuggggcugcucagccagcgcacccgggacaucuacaucagccgccggcugcugggcacguucaccuggacccucuccgacagcgagggcaacgagacccccgggggcuacugccugacgcgcuggaugcugaucgaggccgagcucaagugcuucgggaacaccgccguggccaagugcaacgagaagcacgacgaggaguucugcgacaugcugcggcuguucgacuucaacaagcaggcgauccagcgccucaagucccccgcccagaugagcauccagcugaucaacaaggccgucaacgcccugaucaacgaccagcucaucaugaagaaccaccuccgggacaugaugugcauccccuacugcaacuacuccaaguacugguaccugaaccacaccagcuccgggcgcaccagccugcccaagugcuggcugguguccaacggcagcuaccugaacgagacgcacuucuccgacgacaucgagcagcaggccgacaacaugaucaccgagaugcuccagaaggaguacaucgaccggcagggcaagaccccgcuggggcugguggaccucuucgucuucagcaccuccuucuaccugaucagcaucuuccugcaccugaucaagaucccgacgcaccgccacaucgugggcaagcccugccccaagccccaccggcucaaccacauggggaucugcuccugcggccuguacaagcagccgggggugcccacccgcuggaagcggugaggacuagucccuguucccagagcccacuuuuuuuucuuuuuuugaaauaaaauagccugucuuucagaucucaaaggcucuuuucagagccaccaaaaaaaaaaaaaaaaaaaaaaaaaaaaaaaaaaaaaaaaaaaaaaaaaaaaaaaaaaaaaaaaaaaaaaaaaaaaaaaaaaaaaaaaaaaaaaaaaaaaa

SEQ ID NO: 28331 - RNA, 1745 nt, Artificial Sequence
  mRNA product Design a-1 (hSL-A100) comprising derived and/or modified sequence from LASV(KAK-428;Clade n.d. (VII))__ANH09740__GPCmut5 (opt1)
aggagagucccgcagucggcguccagcggcucugcuuguucgugugugugucguugcaggccuuauucaagcuuaccaugggccagaucgugaccuucuuccaggaggucccccacgugaucgaggaggugaugaacaucguccugaucgcccucagccugcuggccauccucaaggggcuguacaacuucgcgaccugcggcgugaucgggcugaucacguuccuccugcugugcggccgcuccugcagcgccaccuacaaggggcaguacgagcuccagacccuggagcugaacauggagucccucaacaugaccaugccgcugagcugcacgaagaacaacucccaccacuacauccgggccggcaacaacaccggccuggagcucacccugaccaacacgagcaucaucucccacaaguucugcaaccugagcgacgcccacaagaagaaccucuacgaccacacccugauguccaucaucaccaccuuccaccugagcauccccaacuucaaccaguacgaggccauguccugcgacuucaacgggggcaagaucagcauccaguacaaccucucccacagcuacgcgggggacgccgcccagcacugcggcacgguggccaacgggguccugcagaccuucaugcgcauggcguggggcggcuccuaccuggcccucgacagcgggugccgcggcugggacugcaucaucuccagcuaccaguaccugaucauccagaacaccaccugggacgaccacugccaguucucccggcccagccccaucggguaccugggcuucgugagccagaagacgcgcgacaucuacaucucccggcgccuccugggcaccuucaccuggacccugagcgacuccgaggggcacgacaugccgggcggguacugccucacgcgguggaugcugaucgaggccgaccugaagugcuucggcaacaccgccguggccaagugcaacgagaagcacgacgaggaguucugcgacauguggcgccucuucgacuucaacaagcaggcgauccagcggcugaaggcccccgcccagaugaacauccagcugaucaacaaggccgucaacgcccucaucaacgaccagcugaugaugaagaaccaccuccgcgacaucaugugcauccccuacugcaacuacagcaaguucugguaccugaacaacaccaccacgggccggaccucccugccccgcugcuggcugaucagcaacggcuccuaccucaacgagacccacuucagcgacgacaucgagcagcaggcggacaacaugaucaccgagaugcugcagaaggaguacauggaccggcaggggaagacgccccugggccucguggaccuguucguguucuccaccagcuucuaccugaucaccaucuuccuccaccuggucaagaucccgacccaccgccacaucguggggaagcccugccccaagccccaccggcugaaccacaugggcaucugcuccugcgggcuguacaagcagccgggcgugcccguccgcuggaagcggugaggacuagucccuguucccagagcccacuuuuuuuucuuuuuuugaaauaaaauagccugucuuucagaucucaaaggcucuuuucagagccaccaaaaaaaaaaaaaaaaaaaaaaaaaaaaaaaaaaaaaaaaaaaaaaaaaaaaaaaaaaaaaaaaaaaaaaaaaaaaaaaaaaaaaaaaaaaaaaaaaaaaa

SEQ ID NO: 28332 - RNA, 1745 nt, Artificial Sequence; identical to SEQ ID NO: 28326
  mRNA product Design a-1 (hSL-A100) comprising derived and/or modified sequence from LASV(Pinneo-NIG-1969;Clade I)__AIT17836__GPCmut5 (opt1)

SEQ ID NO: 28333 - RNA, 1745 nt, Artificial Sequence
  mRNA product Design a-1 (hSL-A100) comprising derived and/or modified sequence from LASV(ISTH0009-NIG-2011;Clade II)__AIT17404__GPCmut5 (opt1)
aggagagucccgcagucggcguccagcggcucugcuuguucgugugugugucguugcaggccuuauucaagcuuaccaugggccagaucaucaccuucuuccaggaggugccccacgucaucgaggaggugaugaacaucgugcugaucgcccucagccugcuggccauccucaaggggaucuacaacgucgcgaccugcggccuguucgggcugguguccuuccuccugcugugcggccgcagcugcuccacgaccuacaaggggguguacgagcuccagacccuggagcuggacauggccagccucaacaugaccaugccgcuguccugcacgaagaacaacagccaccacuacaucauggucggcaacgagaccggccuggagcucacccugaccaacacguccaucaucaaccacaaguucugcaaccugagcgacgcccacaagaagaaccucuacgaccacgcccugauguccaucaucagcaccuuccaccuguccauccccaacuucaaccaguacgaggccaugagcugcgacuucaacgggggcaagaucuccgugcaguacaaccucagccacgcguacgccguggacgccgccaaccacugcgggaccaucgcgaacggcguccugcagaccuucaugcggauggccuggggcggguccuacaucgcccuggacagcggcugcggguccugggacugcaucaugacgagcuaccaguaccucaucauccagaacaccaccugggaggaccacugccaguucucccgccccagccccaucggcuaccuggggcugcucagccagcggacccgcgacaucuacaucucccggcgccugcugggcacguucaccuggacccucagcgacuccgagggcaacgagacccccgggggcuacugccugacgcgguggaugcugaucgaggccgagcucaagugcuucgggaacaccgccguggcgaagugcaacgagaagcacgacgaggaguucugcgacaugcugcgccuguucgacuucaacaagcaggccauccggcgccucaagacccccgcccagaugagcauccagcugaucaacaaggccgugaacgcccugaucaacgaccagcucaucaugaagaaccaccuccgggacaucaugugcaucccguacugcaacuacuccaaguacugguaccugaaccacaccgucacggggaagaccagccugccccgcugcuggcugguguccaacggcagcuaccugaacgagacccacuucuccgacgacaucgagcagcaggcggacaacaugaucaccgagcuccugcagaaggaguacauggaccggcagggcaagacgccccuggggcucguggaccuguucgucuucagcaccuccuucuaccugaucagcaucuuccugcaccucaucaagaucccgacccaccgccacaucaccggcaagcccugccccaagccccaccggcugaaccacauggggaucugcuccugcggccuguacaagcacccgggggugcccgugaaguggaagcgcugaggacuagucccuguucccagagcccacuuuuuuuucuuuuuuugaaauaaaauagccugucuuucagaucucaaaggcucuuuucagagccaccaaaaaaaaaaaaaaaaaaaaaaaaaaaaaaaaaaaaaaaaaaaaaaaaaaaaaaaaaaaaaaaaaaaaaaaaaaaaaaaaaaaaaaaaaaaaaaaaaaaaa

SEQ ID NO: 28334 - RNA, 1745 nt, Artificial Sequence
  mRNA product Design a-1 (hSL-A100) comprising derived and/or modified sequence from LASV(ISTH2010-NIG-2012;Clade II)__AIT17482__GPCmut5 (opt1)
aggagagucccgcagucggcguccagcggcucugcuuguucgugugugugucguugcaggccuuauucaagcuuaccaugggccagaucaucaccuucuuccaggaggugccccacgucaucgaggaggugaugaacaucgugcugaucgcccucagccugcuggccauccucaaggggaucuacaacgucgcgaccugcggccuguucgggcugguguccuuccuccugcugugcggccgcagcugcuccacgaccuacaaggggguguacgagcuccagacccuggagcuggacauggccagccucaacaugaccaugccgcuguccugcacgaagaacaacagccaccacuacaucauggucggcaacgagaccggccuggagcucacccugaccaacacguccaucaucaaccacaaguucugcaaccugagcgacgcccacaagaagaaccucuacgaccacgcccugauguccaucaucagcaccuuccaccuguccauccccaacuucaaccaguacgaggccaugagcugcgacuucaacgggggcaagaucuccgugcaguacaaccucagccacgcguacgccguggacgccgccaaccacugcgggaccaucgcgaacggcguccugcagaccuucaugcggauggccuggggcggguccuacaucgcccuggacagcggcugcggguccugggacugcaucaugacgagcuaccaguaccucaucauccagaacaucaccugggaggaccacugccaguucucccgccccagccccaucggcuaccuggggcugcucagccagcggacccgcgacaucuacaucucccggcgccugcugggcaccuucacguggacccucagcgacuccgagggcaacgagacccccgggggcuacugccugacccgguggaugcugaucgaggccgagcucaagugcuucgggaacacggccguggcgaagugcaacgagaagcacgacgaggaguucugcgacaugcugcgccuguucgacuucaacaagcaggccauccggcgccucaagacccccgcccagaugagcauccagcugaucaacaaggccgugaacgcccugaucaacgaccagcucaucaugaagaaccaccuccgggacaucaugugcauccccuacugcaacuacuccaaguacugguaccugaaccacaccgucaccgggaagacgagccugccccgcugcuggcugguguccaacggcagcuaccugaacgagacccacuucuccgacgacaucgagcagcaggcggacaacaugaucaccgagcuccugcagaaggaguacaucgaccggcagggcaagaccccgcuggggcucguggaccuguucgucuucagcacguccuucuaccugaucagcaucuuccugcaccucgugaagaucccgacccaccgccacguggucggcaagcccugccccaagccccaccggcugaaccacauggggaucugcuccugcggccuguacaagcacccgggggugcccgugaaguggaagcgcugaggacuagucccuguucccagagcccacuuuuuuuucuuuuuuugaaauaaaauagccugucuuucagaucucaaaggcucuuuucagagccaccaaaaaaaaaaaaaaaaaaaaaaaaaaaaaaaaaaaaaaaaaaaaaaaaaaaaaaaaaaaaaaaaaaaaaaaaaaaaaaaaaaaaaaaaaaaaaaaaaaaaa

SEQ ID NO: 28335 - RNA, 1745 nt, Artificial Sequence
  mRNA product Design a-1 (hSL-A100) comprising derived and/or modified sequence from LASV(Lassa virus/H.sapiens-wt/NGA/2015/ISTH_0543;Clade II)__AVO03639__GPCmut5 (opt1)
aggagagucccgcagucggcguccagcggcucugcuuguucgugugugugucguugcaggccuuauucaagcuuaccaugggccagaucaucaccuucuuccaggaggugccccacgucaucgaggaggugaugaacaucgugcugaucgcccucagccugcuggccauccucaaggggaucuacaacgucgcgaccugcggccuguucgggcugguguccuuccuccugcugugcggccgcagcugcuccacgaccuacaaggggguguacgagcuccagacccuggagcuggacauggccaaccucaacaugaccaugccgcugagcugcacgaagaacaacucccaccacuacaucauggucggcaacgagaccggccuggagcucacccugaccaacacgagcaucaucaaccacaaguucugcaaccuguccgacgcccacaagaagaaccucuacgaccacgcccugaugagcaucaucuccaccuuccaccugagcauccccaacuucaaccaguacgaggccauguccugcgacuucaacgggggcaagaucagcgugcaguacaaccucucccacaccuacgcgguggacgccgccaaccacugcgggaccaucgccaacggcguccugcagacguucaugcggauggcguggggcgggagcuacaucgcccuggacuccggcugcgggagcugggacugcaucaugaccuccuaccaguaccucgugauccagaacaccaccugggaggaccacugccaguucagccgccccucccccaucggcuaccuggggcugcucagccagcggacgcgcgacaucuacaucagccggcgccugcugggcaccuucaccuggacccucuccgacagcgagggcaacgagacgcccgggggcuacugccugacccgguggaugcugaucgaggccgagcucaagugcuucgggaacaccgccguggccaagugcaacgagaagcacgacgaggaguucugcgacaugcugcgccuguucgacuucaacaagcaggcgauccggcgccucaagacccccgcccagauguccauccagcugaucaacaaggccgucaacgcccugaucaacgaccagcucaucaugaagaaccaccuccgggacaucaugugcauccccuacugcaacuacagcaaguacugguaccugaaccacacggugaccgggaagaccucccugccccgcugcuggcuggugagcaacggcuccuaccugaacgagacccacuucagcgacgacaucgagcagcaggccgacaacaugaucacggagcuccugcagaaggaguacaucgaccggcagggcaagaccccgcuggggcucgucgaccuguucguguucuccaccagcuucuaccugaucuccaucuuccugcaccucgugaagaucccgacccaccgccacaucacgggcaagcccugccccaagccccaccggcugaaccacauggggaucugcagcugcggccuguacaagcacccggggguccccgugaaguggaagcgcugaggacuagucccuguucccagagcccacuuuuuuuucuuuuuuugaaauaaaauagccugucuuucagaucucaaaggcucuuuucagagccaccaaaaaaaaaaaaaaaaaaaaaaaaaaaaaaaaaaaaaaaaaaaaaaaaaaaaaaaaaaaaaaaaaaaaaaaaaaaaaaaaaaaaaaaaaaaaaaaaaaaaa

SEQ ID NO: 28336 - RNA, 1745 nt, Artificial Sequence
  mRNA product Design a-1 (hSL-A100) comprising derived and/or modified sequence from LASV(Lassa virus/H.sapiens-wt/NGA/2016/ISTH_0009;Clade II)__AVO03571__GPCmut5 (opt1)
aggagagucccgcagucggcguccagcggcucugcuuguucgugugugugucguugcaggccuuauucaagcuuaccaugggccagaucaucaccuucuuccaggaggugccccacgucaucgaggaggugaugaacaucgugcugaucgcccucagccugcuggccauccucaaggggaucuacaacgucgcgaccugcggccugcuggggcucguguccuuccugcugcucugcggccgcagcugcuccacgaccuacaaggggguguacgagcugcagacccuggagcucgacauggccagccugaacaugaccaugccgcuguccugcacgaagaacaacagccaccacuacaucauggucggcaacgagaccggccucgagcugacccugaccaacacguccaucaucaaccacaaguucugcaaccucagcgacgcccacaagaagaaccuguacgaccacgcccugauguccaucaucagcaccuuccaccucuccauccccaacuucaaccaguacgaggccaugagcugcgacuucaacgggggccggaucuccgugcaguacaaccugagccacuccuacgcgguggacgccgccaaccacugcgggaccaucgccaacggcguccugcagaccuucaugcgcauggcguggggcgggagcuacaucgcccucgacuccggcugcgggagcugggacugcaucaugacguccuaccaguaccugaucauccagaacaccaccugggaggaccacugccaguucagccggcccagccccaucggcuaccuggggcuccugucccagcgcacccgggacaucuacaucagccgccggcugcucggcacguucaccuggacccuguccgacagcgagggcaacgagacccccgggggcuacugccugacgcgcuggaugcucaucgaggccgagcugaagugcuucgggaacaccgccguggccaagugcaacgagaagcacgacgaggaguucugcgacaugcugcggcuguucgacuucaacaagcaggcgauccgccggcugaagacccccgcccagauguccauccagcugaucaacaaggccgugaacgcccucaucaacgaccagcugaucaugaagaaccaccuccgcgacaucaugugcaucccguacugcaacuacagcaaguacugguaccucaaccacaccgucacggggaagaccucccugccccggugcuggcuggugagcaacggcuccuaccucaacgagacccacuucagcgacgacaucgagcagcaggccgacaacaugaucaccgagcugcugcagaaggaguacaucgaccgccagggcaagacgccccucgggcugguggaccuguucgucuucuccaccagcuucuaccugaucuccaucuuccuccaccuggugaagaucccgacccaccggcacaucaccggcaagcccugccccaagccccaccgccugaaccacauggggaucugcagcugcggccucuacaaccacccgggggugcccgucaaguggaagcggugaggacuagucccuguucccagagcccacuuuuuuuucuuuuuuugaaauaaaauagccugucuuucagaucucaaaggcucuuuucagagccaccaaaaaaaaaaaaaaaaaaaaaaaaaaaaaaaaaaaaaaaaaaaaaaaaaaaaaaaaaaaaaaaaaaaaaaaaaaaaaaaaaaaaaaaaaaaaaaaaaaaaa

SEQ ID NO: 28337 - RNA, 1745 nt, Artificial Sequence
  mRNA product Design a-1 (hSL-A100) comprising derived and/or modified sequence from LASV(Lassa virus/H.sapiens-wt/NGA/2016/ISTH_0017;Clade II)__AVO03567__GPCmut5 (opt1)
aggagagucccgcagucggcguccagcggcucugcuuguucgugugugugucguugcaggccuuauucaagcuuaccaugggccagaucaucaccuucuuccaggaggugccccacgucaucgaggaggugaugaacaucgugcugaucgcccucagccugcuggccauccucaaggggaucuacaacgucgcgaccugcggccuguucgggcugguguccuuccuccugcugugcggccgcagcugcuccacgaccuacaaggggguguacgagcuccagacccuggagcuggacauggccagccucaacaugaccaugccgcuguccugcacgaagaacaacagccaccacuacaucauggucggcaacgagaccggccuggagcucacccugaccaacacguccaucaucaaccacaaguucugcaaccugagcgacgcccacaagaagaaccucuacgaccacgcccugauguccaucaucagcaccuuccaccuguccauccccaacuucaaccaguacgaggccaugagcugcgacuucaacgggggcaagaucuccgugcaguacaaccucagccacaccuacgcgaucgacgccgccaaccacugcgggaccaucgccaacggcgugcugcagacguucaugcggauggcguggggcggguccuacaucgcccuggacagcggcugcggguccugggacugcaucaugaccagcuaccaguaccucaucauccagaacaccaccugggaggaccacugccaguucucccgccccagccccaucggcuaccuggggcugcucagccagcggacgcgcgacaucuacaucucccggcgccugcugggcaccuucaccuggacccucagcgacuccgagggcaacgagacgcccgggggcuacugccugacccgguggaugcugaucgaggccgagcucaagugcuucgggaacaccgccgucgccaagugcaacgagaagcacgacgaggaguucugcgacaugcugcgccuguucgacuucaacaagcaggcgauccggcgccucaagacccccgcccagaugagcauccagcugaucaacaaggccgugaacgcccugaucaacgaccagcucaucaugaagaaccaccuccgggacaucaugugcauccccuacugcaacuacuccaaguacugguaccugaaccacacggugaccgggaagaccagccugccccgcugcuggcuggucuccaacggcagcuaccugaacgagacccacuucuccgacgacaucgagcagcaggccgacaacaugaucacggagcuccugcagaaggaguacauggaccggcagggcaagaccccgcuggggcucguggaccuguucguguucagcaccuccuucuaccugaucagcaucuuccugcaccucguccgcaucccgacccaccggcacgugaucggcaagcccugccccaagccccaccgccugaaccacauggggaucugcuccugcggccuguacaagcacccgggggugcccgucaaguggaagcggugaggacuagucccuguucccagagcccacuuuuuuuucuuuuuuugaaauaaaauagccugucuuucagaucucaaaggcucuuuucagagccaccaaaaaaaaaaaaaaaaaaaaaaaaaaaaaaaaaaaaaaaaaaaaaaaaaaaaaaaaaaaaaaaaaaaaaaaaaaaaaaaaaaaaaaaaaaaaaaaaaaaaa

SEQ ID NO: 28338 - RNA, 1745 nt, Artificial Sequence
  mRNA product Design a-1 (hSL-A100) comprising derived and/or modified sequence from LASV(Lassa virus/H.sapiens-wt/NGA/2018/ISTH_0959;Clade II)__AVV65099__GPCmut5 (opt1)
aggagagucccgcagucggcguccagcggcucugcuuguucgugugugugucguugcaggccuuauucaagcuuaccaugggccagaucaucaccuucuuccaggaggugccccacgucaucgaggaggugaugaacaucgugcugaucgcccucagccugcuggccauccucaaggggaucuacaacgucgugaccugcggccuguucgggcugguguccuuccuccugcugugcggccgcagcugcuccacgaccuacaagggggucuacgagcuccagacccuggagcuggacauggcgagccucaacaugaccaugccgcuguccugcacgaagaacaacagccaccacuacaucauggugggcaacgagaccggccuggagcucacccugaccaacacguccaucaucaaccacaaguucugcaaccugagcgacgcccacaagaagaaccucuacgaccacgcccugauguccaucaucagcaccuuccaccuguccauccccaacuucaaccaguacgaggccaugagcugcgacuucaacgggggcaagaucuccgugcaguacaaccucagccacgccuacgcgaucgacgccgccaaccacugcgggaccaucgccaacggcguccugcagaccuucaugcggauggcguggggcggguccuacaucgcccuggacagcggcugcggguccugggacugcaucaugacgagcuaccaguaccucaucauccagaacaccaccugggaggaccacugccaguucucccgccccagccccaucggcuaccuggggcugcucagccagcggacccgcgacaucuacaucucccggcgccugcugggcacguucaccuggacccucagcgacuccgagggcaacgagacccccgggggcuacugccugacgcgguggaugcugaucgaggccgagcucaagugcuucgggaacaccgccguggccaagugcaacgagaagcacgacgaggaguucugcgacaugcugcgccuguucgacuucaacaagcaggcgauccggcgccucaagacccccgcccagaugagcauccagcugaucaacaaggccgugaacgcccugaucaacgaccagcucaucaugaagaaccaccuccgggacaucaugugcaucccguacugcaacuacuccaaguacugguaccugaaccacaccgucacggggaagaccagccugccccgcugcuggcugguguccaacggcagcuaccugaacgagacccacuucuccgacgacaucgagcagcaggccgacaacaugaucaccgagcuccugcagaaggaguacaucgaccggcagggcaagacgccccuggggcucguggaccuguucgucuucagcaccuccuucuaccugaucagcaucuuccugcaccucgugaagaucccgacccaccgccacgugaucggcaagcccugccccaagccccaccggcugaaccacauggggaucugcuccugcggccuguacaagcacccggggguccccgugaaguggaagcgcugaggacuagucccuguucccagagcccacuuuuuuuucuuuuuuugaaauaaaauagccugucuuucagaucucaaaggcucuuuucagagccaccaaaaaaaaaaaaaaaaaaaaaaaaaaaaaaaaaaaaaaaaaaaaaaaaaaaaaaaaaaaaaaaaaaaaaaaaaaaaaaaaaaaaaaaaaaaaaaaaaaaaa

SEQ ID NO: 28339 - RNA, 1745 nt, Artificial Sequence
  mRNA product Design a-1 (hSL-A100) comprising derived and/or modified sequence from LASV(LASV003-NIG-2008;Clade II)__AIT17580__GPCmut5 (opt1)
aggagagucccgcagucggcguccagcggcucugcuuguucgugugugugucguugcaggccuuauucaagcuuaccaugggccagaucaucaccuucuuccaggaggugccccacgucaucgaggaggugaugaacaucgugcugaucgcccucagccugcuggccauccucaaggggaucuacaacgucgcgaccugcggccuguucgggcugguguccuuccuccugcugugcggccgcagcugcuccacgaccuacaaggggguguacgagcuccagacccuggagcuggacauggccagccucaacaugaccaugccgcuguccugcacgaagaacaacagccaccacuacaucauggucggcaacgagaccggccuggagcucacccugaccaacacguccaucaucaaccacaaguucugcaaccugagcgacgcccacaagaagaaccucuacgaccacgcccugauguccaucaucagcaccuuccaccuguccauccccaacuucaaccaguacgaggccaugagcugcgacuucaacgggggcaagaucuccgugcaguacaaccucagccacaccuacgcgguggacgccgccaaccacugcgggaccaucgccaacggcguccugcagacguucaugcggauggcguggggcggguccuacaucgcccuggacagcggcugcggguccugggacugcaucaugaccagcuaccaguaccucaucauccagaacaccaccugggaggaccacugccaguucucccgccccagccccaucggcuaccuggggcugcucagccagcggacgcgcgacaucuacaucucccggcgccugcugggcaccuucaccuggacccucagcgacuccgagagcaacgagacgccgggcggguacugccugacccgguggaugcugaucgaggccgagcucaagugcuucggcaacaccgccguggccaagugcaacgagaagcacgacgaggaguucugcgacaugcugcgccuguucgacuucaacaagcaggcgauccggcgccucaaggcccccgcccagauguccauccagcugaucaacaaggccgugaacgcccugaucaacgaccagcucaucaugaagaaccaccuccgggacaucaugugcauccccuacugcaacuacagcaaguacugguaccugaaccacaccgucacgggccgcaccucccugccccggugcuggcuggugagcaacggguccuaccugaacgagacccacuucagcgacgacaucgagcagcaggcggacaacaugaucaccgagcuccugcagaaggaguacauggaccgccagggcaagacgccccugggccucguggaccuguucgucuucuccaccagcuucuaccugaucuccaucuuccugcaccucgugaagaucccgacccaccggcacgugaucgggaagcccugccccaagccccaccgccugaaccacaugggcaucugcagcugcgggcuguacaagcacccgggcguccccgugaaguggaagcggugaggacuagucccuguucccagagcccacuuuuuuuucuuuuuuugaaauaaaauagccugucuuucagaucucaaaggcucuuuucagagccaccaaaaaaaaaaaaaaaaaaaaaaaaaaaaaaaaaaaaaaaaaaaaaaaaaaaaaaaaaaaaaaaaaaaaaaaaaaaaaaaaaaaaaaaaaaaaaaaaaaaaa

SEQ ID NO: 28340 - RNA, 1745 nt, Artificial Sequence
  mRNA product Design a-1 (hSL-A100) comprising derived and/or modified sequence from LASV(LASV035-NIG-2009;Clade II)__AIT17588__GPCmut5 (opt1)
aggagagucccgcagucggcguccagcggcucugcuuguucgugugugugucguugcaggccuuauucaagcuuaccaugggccagaucaucaccuucuuccaggaggugccccacgucaucgaggaggugaugaacaucgugcugaucgcccucagccugcuggccauccucaaggggaucuacaacgucgcgaccugcggccuguucgggcugguguccuuccuccugcugugcggccgcagcugcuccacgaccuacaaggggguguacgagcuccagacccuggagcuggacauggccagccucaacaugaccaugccgcuguccugcacgaagaacaacagccaccacuacaucauggucggcaacgagaccggccuggagcucacccugaccaacacguccaucaucaaccacaaguucugcaaccugagcgacgcccacaagaagaaccucuacgaccacgcccugauguccaucaucagcaccuuccaccuguccauccccaacuucaaccaguacgaggccaugagcugcgacuucaacgggggcaagaucuccgugcaguacaaccucagccacgcguacgccguggacgccgccaaccacugcgggaccaucgcgaacggcguccugcagaccuucaugcggauggccuggggcggguccuacaucgcccuggacagcggcugcggguccugggacugcaucaugacgagcuaccaguaccucaucauccagaacaccaccugggaggaccacugccaguucucccgccccagccccaucggcuaccuggggcugcucagccagcggacccgcgacaucuacaucucccggcgccugcugggcacguucaccuggacccucagcgacuccgagggcaacgagacccccgggggcuacugccugacgcgguggaugcugaucgaggccgagcucaagugcuucgggaacaccgccguggcgaagugcaacgagaagcacgacgaggaguucugcgacaugcugcgccuguucgacuucaacaagcaggccauccggcgccucaaggcccccgcccagaugagcauccagcugaucaacaaggccgugaacgcgcugaucaacgaccagcucaucaugaagaaccaccuccgggacaucaugugcauccccuacugcaacuacuccaaguacugguaccugaaccacaccgucaccgggaagacgagccugccccgcugcuggcugguguccaacggcagcuaccugaacgagacccacuucuccgacgacaucgagcagcaggccgacaacaugaucaccgagcuccugcagaaggaguacaucgaccggcagggcaagaccccgcuggggcucguggaccuguucgucuucagcacguccuucuaccugaucagcaucuuccugcaccucgugaagaucccgacccaccgccacgugaucggcaagcccugccccaagccccaccggcugaaccacauggggaucugcuccugcggccuguacaagcacccggggguccccgugaaguggaagcgcugaggacuagucccuguucccagagcccacuuuuuuuucuuuuuuugaaauaaaauagccugucuuucagaucucaaaggcucuuuucagagccaccaaaaaaaaaaaaaaaaaaaaaaaaaaaaaaaaaaaaaaaaaaaaaaaaaaaaaaaaaaaaaaaaaaaaaaaaaaaaaaaaaaaaaaaaaaaaaaaaaaaaa

SEQ ID NO: 28341 - RNA, 1745 nt, Artificial Sequence
  mRNA product Design a-1 (hSL-A100) comprising derived and/or modified sequence from LASV(LASV1000-NIG-2009;Clade II)__AIT17782__GPCmut5 (opt1)
aggagagucccgcagucggcguccagcggcucugcuuguucgugugugugucguugcaggccuuauucaagcuuaccaugggccagaucaucaccuucuuccaggaggugccccacgucaucgaggaggugaugaacaucgugcugaucgcccucagccugcuggccauccucaaggggaucuacaacgucgcgaccugcggccuguucgggcugguguccuuccuccugcugugcggccgcagcugcuccacgaccuacaaggggguguacgagcuccagacccuggagcuggacauggccagccucaacaugaccaugccgcuguccugcacgaagaacaacagccaccacuacaucauggucggcaacgagaccggccuggagcucacccugaccaacacguccaucaucaaccacaaguucugcaaccugagcgacgcccacaagaagaaccucuacgaccacgcccugauguccaucaucagcaccuuccaccuguccauccccaacuucaaccaguacgaggccaugagcugcgacuucaacgggggcaagaucuccgugcaguacaaccucagccacaccuacgcgguggacgccgccaaccacugcgggaccaucgccaacggcguccugcagacguucaugcggauggcguggggcggguccuacaucgcccuggacagcggcugcggguccugggacugcaucaugaccagcuaccaguaccucaucauccagaacaccaccugggaggaccacugccaguucucccgccccagccccaucggcuaccuggggcugcucagccagcggacgcgcgacaucuacaucucccggcgccugcugggcaccuucaccuggacccucagcgacuccgagggcaacgagacgcccgggggcuacugccugacccgguggaugcugaucgaggccgagcucaagugcuucgggaacaccgccguggccaagugcaacgagaagcacgacgaggaguucugcgacaugcugcgccuguucgacuucaacaagcaggcgaucaagcggcucaagacccccgcccagaugagcauccagcugaucaacaaggccgugaacgcccugaucaacgaccagcucaucaugaagaaccaccuccgcgacaucaugugcauccccuacugcaacuacuccaaguacugguaccugaaccacacggucaccgggaagaccagccugccccggugcuggcugguguccaacggcagcuaccugaacgagacccacuucuccgacgacaucgagcagcaggccgacaacaugaucacggagcuccugcagaaggaguacaucgaccgccagggcaagaccccgcuggggcucguggaccuguucgucuucagcaccuccuucuaccugaucagcaucuuccugcaccucgugaagaucccgacccaccggcacguggucggcaagcccugccccaagccccaccgccugaaccacauggggaucugcuccugcggccuguacaagcacccgggggugcccgugaaguggaagcggugaggacuagucccuguucccagagcccacuuuuuuuucuuuuuuugaaauaaaauagccugucuuucagaucucaaaggcucuuuucagagccaccaaaaaaaaaaaaaaaaaaaaaaaaaaaaaaaaaaaaaaaaaaaaaaaaaaaaaaaaaaaaaaaaaaaaaaaaaaaaaaaaaaaaaaaaaaaaaaaaaaaaa

SEQ ID NO: 28342 - RNA, 1745 nt, Artificial Sequence
  mRNA product Design a-1 (hSL-A100) comprising derived and/or modified sequence from LASV(LASV221-NIG-2010;Clade II)__AIT17624__GPCmut5 (opt1)
aggagagucccgcagucggcguccagcggcucugcuuguucgugugugugucguugcaggccuuauucaagcuuaccaugggccagaucaucaccuucuuccaggaggugccccacgucaucgaggaggugaugaacaucgugcugaucgcccucagccugcuggccauccucaaggggaucuacaacgucgcgaccugcggccuguucgggcugguguccuuccuccugcugugcggccgcagcugcuccacgaccuacaaggggguguacgagcuccagacccuggagcuggacauggccagccucaacaugaccaugccgcuguccugcacgaagaacaacagccaccacuacaucauggucggcaacgagaccggccuggagcucacccugaccaacacguccaucaucaaccacaaguucugcaaccugagcgacgcccacaagaagaaccucuacgaccacgcccugauguccaucaucagcaccuuccaccuguccauccccaacuucaaccaguacgaggccaugagcugcgacuucaacgggggcaagaucuccgugcaguacaaccucagccacaccuacgcgaucgacgccgccaaccacugcgggaccaucgccaacggcgugcugcagacguucaugcggauggcguggggcggguccuacaucgcccuggacagcggcugcggguccugggacugcaucaugaccagcuaccaguaccucaucauccagaacaccaccugggaggaccacugccaguucucccgccccagccccaucggcuaccuggggcugcucagccagcggacgcgcgacaucuacaucucccggcgccugcugggcaccuucaccuggacccucagcgacuccgagggcaacgagacgcccgggggcuacugccugacccgguggaugcugaucgaggccgagcucaagugcuucgggaacaccgccgucgccaagugcaacgagaagcacgacgaggaguucugcgacaugcugcgccuguucgacuucaacaagcaggcgauccggcgccucaagacccccgcccagaugagcauccagcugaucaacaaggccgugaacgcccugaucaacgaccagcucaucaugaagaaccaccuccgggacaucaugugcauccccuacugcaacuacuccaaguacugguaccugaaccacacggugaccgggaagaccagccugccccgcugcuggcuggucuccaacggcagcuaccugaacgagacccacuucuccgacgacaucgagcagcaggccgacaacaugaucacggagaugcuccagaaggaguacauggaccggcagggcaagaccccgcuggggcugguggaccucuucguguucagcaccuccuucuaccugaucagcaucuuccugcaccuggucaagaucccgacccaccgccacgugaucggcaagcccugccccaagccccaccggcucaaccacauggggaucugcuccugcggccuguacaagcacccgggggugcccgucaaguggaagcgcugaggacuagucccuguucccagagcccacuuuuuuuucuuuuuuugaaauaaaauagccugucuuucagaucucaaaggcucuuuucagagccaccaaaaaaaaaaaaaaaaaaaaaaaaaaaaaaaaaaaaaaaaaaaaaaaaaaaaaaaaaaaaaaaaaaaaaaaaaaaaaaaaaaaaaaaaaaaaaaaaaaaaa

SEQ ID NO: 28343 - RNA, 1745 nt, Artificial Sequence
  mRNA product Design a-1 (hSL-A100) comprising derived and/or modified sequence from LASV(LASV237-NIG-2010;Clade II)__AIT17638__GPCmut5 (opt1)
aggagagucccgcagucggcguccagcggcucugcuuguucgugugugugucguugcaggccuuauucaagcuuaccaugggccagaucaucaccuucuuccaggaggugccccacgucaucgaggaggugaugaacaucgugcugaucgcccucagccugcuggccauccucaaggggaucuacaacgucgcgaccugcggccuguucgggcugguguccuuccuccugcugugcggccgcagcugcuccacgaccuacaaggggguguacgagcuccagacccuggagcuggacauggccagccucaacaugaccaugccgcuguccugcacgaagaacaacagccaccacuacaucauggucggcaacgagaccggccuggagcucacccugaccaacacguccaucaucaaccacaaguucugcaaccugagcgacgcccacaagaaggaccucuacgaccacgcccugauguccaucaucagcaccuuccaccuguccauccccaacuucaaccaguacgaggccaugagcugcgacuucaacgggggcaagaucuccgugcaguacaaccucagccacaccuacgcgguggacgccgccaaccacugcgggaccaucgccaacggcguccugcagacguucaugcggauggcguggggcggguccuacaucgcccuggacagcggcugcggguccugggacugcaucaugaccagcuaccaguaccucaucauccagaacaccaccugggaggaccacugccaguucucccgccccagccccaucggcuaccuggggcugcucagccagcggacgcgcgacaucuacaucucccggcgccugcugggcaccuucaccuggacccucagcgacuccgagggcaacgagacgcccgggggcuacugccugacccgguggaugcugaucgaggccgagcucaagugcuucgggaacaccgccguggccaagugcaacgagaagcacgacgaggaguucugcgacaugcugcgccuguucgacuucaacaagcaggcgauccggcgccucaagacccccgcccagaugagcauccagcugaucaacaaggccgugaacgcccugaucaacgaccagcucaucaugaagaaccaccuccgggacaucaugugcauccccuacugcaacuacuccaaguacugguaccugaaccacacggucaccgggaagaccagccugccccgcugcuggcugguguccaacggcagcuaccugaacgagacccacuucuccgacgacaucgagcagcaggccgacaacaugaucacggagcuccugcagaaggaguacauggaccggcagggcaagaccccgcuggggcucguggaccuguucgucuucagcaccuccuucuaccugaucagcaucuuccugcaccucaucaagaucccgacccaccgccacaucacgggcaagcccugccccaagccccaccggcugaaccacauggggaucugcuccugcggccuguacaagcacccgggggugcccgugaaguggaagcgcugaggacuagucccuguucccagagcccacuuuuuuuucuuuuuuugaaauaaaauagccugucuuucagaucucaaaggcucuuuucagagccaccaaaaaaaaaaaaaaaaaaaaaaaaaaaaaaaaaaaaaaaaaaaaaaaaaaaaaaaaaaaaaaaaaaaaaaaaaaaaaaaaaaaaaaaaaaaaaaaaaaaaa

SEQ ID NO: 28344 - RNA, 1745 nt, Artificial Sequence
  mRNA product Design a-1 (hSL-A100) comprising derived and/or modified sequence from LASV(LASV253-NIG-2011;Clade II)__AIT17670__GPCmut5 (opt1)
aggagagucccgcagucggcguccagcggcucugcuuguucgugugugugucguugcaggccuuauucaagcuuaccaugggccagaucaucaccuucuuccaggaggugccccacgucaucgaggaggugaugaacaucgugcugaucgcccucagccugcuggccauccucaaggggaucuacaacgucgcgaccugcggccuguucgggcugguguccuuccuccugcugugcggccgcagcugcuccacgaccuacaaggggguguacgagcuccagacccuggagcuggacauggccagccucaacaugaccaugccgcuguccugcacgaagaacaacagccaccacuacaucauggucggcaacgagaccggccuggagcucacccugaccaacacguccaucaucaaccacaaguucugcaaccugagcgacgcccacaagaagaaccucuacgaccacgcccugauguccaucaucagcaccuuccaccuguccauccccaacuucaaccaguacgaggccaugagcugcgacuucaacgggggcaagaucuccgugcaguacaaccucagccacaccuacgcgguggacgccgccaaccacugcgggaccaucgccaacggcguccugcagacguucaugcggauggcguggggcggguccuacaucgcccuggacagcggcugcggguccugggacugcaucaugaccagcuaccaguaccucaucauccagaacaccaccugggaggaccacugccaguucucccgccccagccccaucggcuaccuggggcugcucagccagcggacgcgcgacaucuacaucucccggcgccugcugggcaccuucaccuggacccucagcgacuccgagggcaacgagacgcccgggggcuacugccugacccgguggaugcugaucgaggccgagcucaagugcuucgggaacaccgccguggccaagugcaacgagaagcacgacgaggaguucugcgacaugcugcgccuguucgacuucaacaagcaggcgauccggcgccucaaggcccccgcccagaugagcauccagcugaucaacaaggccgugaacgcccugaucaacgaccagcucaucaugaagaaccaccuccgggacaucaugugcaucccguacugcaacuacuccaaguacugguaccugaaccacaccgucacggggcgcaccagccugccccggugcuggcugguguccaacggcagcuaccugaacgagacccacuucuccgacgacaucgagcagcaggcggacaacaugaucaccgagcuccugcagaaggaguacaucgaccgccagggcaagacgccccuggggcucguggaccuguucgucuucagcaccuccuucuaccugaucagcaucuuccugcaccucgugaagaucccgacccaccggcacaucaucggcaagcccugccccaagccccaccgccugaaccacauggggaucugcuccugcggccuguacaagcacccgggggugcccgucaaguggaagcggugaggacuagucccuguucccagagcccacuuuuuuuucuuuuuuugaaauaaaauagccugucuuucagaucucaaaggcucuuuucagagccaccaaaaaaaaaaaaaaaaaaaaaaaaaaaaaaaaaaaaaaaaaaaaaaaaaaaaaaaaaaaaaaaaaaaaaaaaaaaaaaaaaaaaaaaaaaaaaaaaaaaaa

SEQ ID NO: 28345 - RNA, 1745 nt, Artificial Sequence
  mRNA product Design a-1 (hSL-A100) comprising derived and/or modified sequence from LASV(LASV254-NIG-2011;Clade II)__AIT17674__GPCmut5 (opt1)
aggagagucccgcagucggcguccagcggcucugcuuguucgugugugugucguugcaggccuuauucaagcuuaccaugggccagaucaucaccuucuuccaggaggugccccacgucaucgaggaggugaugaacaucgugcugaucgcccucagccugcuggccauccucaaggggaucuacaacgucgcgaccugcggccuguucgggcugguguccuuccuccugcugugcggccgcagcugcuccacgaccuacaaggggguguacgagcuccagacccuggagcuggacaugaccaaccucaacaugacgaugccgcugagcugcaccaagaacaacucccaccacuacaucauggucggcaacgagaccggccuggagcucacccugacgaacaccagcaucaucaaccacaaguucugcaaccuguccgacgcccacaagaagaaccucuacaaccacgcccugaugagcaucaucuccaccuuccaccugagcauccccaacuucaaccaguacgaggccauguccugcgacuucaacgggggcaagaucagcgugcaguacaaccucucccacagcuacgccguggacgcggccaaccacugcgggaccaucgccaacggcguccugcagacguucaugcggauggccuggggcggguccuacaucgcgcuggacagcggcugcgggaacugggacugcaucaugaccuccuaccaguaccucaucauccagaacaccaccugggaggaccacugccaguucagccgccccucccccaucggcuaccuggggcugcucagccagcggacgcgcgacaucuacaucagccggcgccugcugggcaccuucaccuggacccucuccgacagcgagggcaacgagacgcccgggggcuacugccugacccgguggaugcugaucgaggccgagcucaagugcuucgggaacaccgccguggccaagugcaacgagaagcacgacgaggaguucugcgacaugcugcgccuguucgacuucaacaagcaggccauccggcgccucaagacccccgcgcaggccaacauccagcugaucaacaaggccgugaacgcccugaucaacgaccagcucaucaugaagaaccaccuccgggacaucaugugcauccccuacugcaacuacuccaaguacugguaccugaaccacacggucaccgggaagaccagccugccccgcugcuggcugguguccaacggcagcuaccugaacgagacccacuucuccgacgacaucgagcagcaggccgacaacaugaucacggagcuccugcagaaggaguacauggaccggcagggcaagaccccgcuggggcucguggaccuguucgucuucagcaccuccuucuaccugaucagcaucuuccugcaccucgugaagaucccgacccaccgccacgugaucggcaagcccugccccaagccccaccggcugaaccacauggggaucugcuccugcggccuguacaagcacccggggguccccgugaaguggaagcgcugaggacuagucccuguucccagagcccacuuuuuuuucuuuuuuugaaauaaaauagccugucuuucagaucucaaaggcucuuuucagagccaccaaaaaaaaaaaaaaaaaaaaaaaaaaaaaaaaaaaaaaaaaaaaaaaaaaaaaaaaaaaaaaaaaaaaaaaaaaaaaaaaaaaaaaaaaaaaaaaaaaaaa

SEQ ID NO: 28346 - RNA, 1745 nt, Artificial Sequence
  mRNA product Design a-1 (hSL-A100) comprising derived and/or modified sequence from LASV(Nig08-A19;Clade III)__ADU56618__GPCmut5 (opt1)
aggagagucccgcagucggcguccagcggcucugcuuguucgugugugugucguugcaggccuuauucaagcuuaccaugggccagaucgugaccuucuuccaggaggucccccacgugaucgaggaggugaugaacaucguccugaucgcccucagcauccuggccauccugaaggggcucuacaacaucgcgaccugcggccugaucgggcuggugacguuccuccugcuguccggccgcagcugcuccaugaccuacaaggggguguacgagcuccagacccuggagcugaacaugaacacccucaacaugacgaugccgcugagcugcaccaagaacaacucccaccacuacaucauggucggcaacgagaccggccuggagcucacccugacgaacaccagccugcuccaccacaaguucugcaaccuguccgacgcccacaagaagaaccuguacgaccacacccucaugagcaucaucuccaccuuccaccugagcauccccaacuucaaccaguacgaggccauguccugcgacuucaacgggggcaagaucacggugcaguacaaccugagccacuccuacgccaucgacgccgcgaaccacugcgggaccguggccaacggcguccuccagaccuucaugcggauggccuggggcgggagcuacaucgcccuggacuccggcugcgggaagugggacugcaucaugaccagcuaccaguaccugaucauccagaacacgaccugggaggaccacugccaguucucccggcccagccccaucggcuaccucgggcugcugucccagcgcacccgggacaucuacaucagccgccggcuccugggcaccuucacguggacccugagcgacuccgagggcaacgagacccccgggggcuacugccucacccgcuggaugcugaucgaggcggagcugaagugcuucgggaacacggccguggccaagugcaacgagaagcacgacgaggaguucugcgacaugcuccggcuguucgacuucaacaagcaggccauccgccggcugaaggcccccgcgcagaugagcauccagcucaucaacaaggccgugaacgcccugaucaacgaccagcugaucaugaagaaccaccuccgcgacaucaugugcauccccuacugcaacuacuccaaguacugguaccugaaccacaccagcaccgggcggaccucccugccccgcugcuggcucgucagcaacggcuccuaccugaacgagacgcacuucagcgacgacaucgagcagcaggccgacaacaugaucaccgagaugcugcagaaggaguaccucgaccggcagggcaagaccccgcuggggcugguggaccuguucguguucuccaccagcuucuaccucaucuccaucuuccugcaccuggucaagaucccgacgcaccgccacaucgugggcaagcccugccccaagccccaccggcucaaccacauggggaucugcagcugcggccuguacaagcagccgggggugcccguccgcuggaagcggugaggacuagucccuguucccagagcccacuuuuuuuucuuuuuuugaaauaaaauagccugucuuucagaucucaaaggcucuuuucagagccaccaaaaaaaaaaaaaaaaaaaaaaaaaaaaaaaaaaaaaaaaaaaaaaaaaaaaaaaaaaaaaaaaaaaaaaaaaaaaaaaaaaaaaaaaaaaaaaaaaaaaa

SEQ ID NO: 28347 - RNA, 1748 nt, Artificial Sequence
  mRNA product Design a-1 (hSL-A100) comprising derived and/or modified sequence from LASV(G1180-SLE-2010;Clade IV)__AIT17168__GPCmut5 (opt1)
aggagagucccgcagucggcguccagcggcucugcuuguucgugugugugucguugcaggccuuauucaagcuuaccaugggccagaucgugaccuucuuccaggaggucccccacgugaucgaggaggugaugaacaucguccugaucgcccucagcauccuggccgugcugaaggggcucuacaacuucgcgaccugcggccugguggggcugcucaccuuccugcugcucugcggccgcuccugcaccgccagccgguacaagggggucuacgagcugcagacccuggagcucaacauggagacccugaacaugacgaugccgcuguccugcaccaagaacaacagccaccacuacaucauggugggcaacgagaccggccucgagcugacccugacgaacaccuccaucaucaaccacaaguucugcaaccucagcgacgcccacaagaagaaccuguacgaccacgcccugauguccaucaucagcaccuuccaccucuccauccccaacuucaaccaguacgaggccaugagcugcgacuucaacgggggcaagaucuccgugcaguacaaccugagccacuccuacgcgggggacgccgccaaccacugcggcaccgucgccaacggggugcugcagacguucaugcgcauggcguggggcggcagcuacaucgcccucgacuccgggugcggcagcugggacugcaucaugaccuccuaccaguaccugaucauccagaacaccaccugggaggaccacugccaguucagccggcccucccccaucggguaccugggccuccugagccagcgcacgcgggacaucuacaucagccgccggcugcucggcaccuucaccuggacccuguccgacagcgaggggaaggacacgccgggcggguacugccugacccgcuggaugcucaucgaggccgagcugaagugcuucggcaacaccgccguggccaagugcaacgagaagcacgacgaggaguucugcgacaugcugcggcuguucgacuucaacaagcaggcgauccagcgccugaaggcccccgcccagauguccauccagcugaucaacaaggccgucaacgcccucaucaacgaccagcugaucaugaagaaccaccuccgggacaucaugugcauccccuacugcaacuacagcaaguacugguaccucaaccacaccacgaccggcaagaccucccugcccaagugcuggcuggugagcaacggcuccuaccucaacgagacccacuucagcgacgacaucgagcagcaggcggacaacaugaucacggagaugcugcagaaggaguacauggagcgccaggggaagacgccccugggccucguggaccuguucgucuucuccaccagcuucuaccugaucuccaucuuccugcaccucgugaagaucccgacccaccggcacaucgugggcaagagcugccccaagccccaccgccugaaccacauggggaucugcuccugcgggcuguacaagcagcccggcgucccggugaaguggaagcggugaggacuagucccuguucccagagcccacuuuuuuuucuuuuuuugaaauaaaauagccugucuuucagaucucaaaggcucuuuucagagccaccaaaaaaaaaaaaaaaaaaaaaaaaaaaaaaaaaaaaaaaaaaaaaaaaaaaaaaaaaaaaaaaaaaaaaaaaaaaaaaaaaaaaaaaaaaaaaaaaaaaaa

SEQ ID NO: 28348 - RNA, 1748 nt, Artificial Sequence
  mRNA product Design a-1 (hSL-A100) comprising derived and/or modified sequence from LASV(G1442-SLE-2011;Clade IV)__AIT17180__GPCmut5 (opt1)
aggagagucccgcagucggcguccagcggcucugcuuguucgugugugugucguugcaggccuuauucaagcuuaccaugggccagaucgugaccuucuuccaggaggucccccacgugaucgaggaggugaugaacaucguccugaucgcccucagcauccuggccgugcugaaggggcucuacaacguggcgaccugcggccugaucgggcuggucacguuccuccugcugugcggccgcuccugcaccaccacccucuacaaggggguguacgagcugcagacgcuggagcucaacauggagacccugaacaugaccaugccgcugagcugcaccaagaacaacucccaccacuacauccgggugggcaacgagacgggccucgagcugacccugaccaacaccagcaucaucaaccacaaguucugcaaccucuccgacgcccacaagaagaaccuguacgaccacgcccugaugagcaucaucuccacguuccaccucagcauccccaacuucaaccaguacgaggccauguccugcgacuucaacgggggcaagaucagcguccaguacaaccugucccacagcuacgccggggacgcggccaaccacugcggcaccguggccaacggggugcugcagaccuucaugcgcauggccuggggcggcuccuacaucgcgcucgacagcgggugcggcaacugggacugcaucaugaccuccuaccaguaccugaucauccagaacacgaccugggacgaccacugccaguucagccgccccucccccaucggguaccugggccuccugagccagcggacccgcgacgucuacaucucccggcgccugcucggcaccuucacguggacccugagcgacagcgaggggaaggacaccccgggcggguacugccugacccgguggaugcucaucgaggccgagcugaagugcuucggcaacacggccguggccaagugcaacgagaagcacgacgaggaguucugcgacaugcugcgccucuucgacuucaacaagcaggccauccagcggcugaaggcgcccgcccagauguccauccagcugaucaacaaggccgugaacgcccucaucaacgaccagcugaucaugaagaaccaccuccgcgacaucaugugcauccccuacugcaacuacagcaaguacugguaccugaacaacaccgccaccggcaagaccucccugcccaagugcuggcugaucagcaacggcuccuaccucaacgagacgcacuucagcgacgacaucgagcaggaggcggacaacaugaucaccgagaugcugcagaaggaguacauggagcggcaggggaagacgccccugggccucgucgaccuguucguguucuccaccagcuucuaccugaucuccaucuuccugcaccucgugaagaucccgacccaccgccacaucgucggcaagagcugccccaagccccaccggcugaaccacauggggaucugcuccugcgggcuguacaagcagcccggcgugccggugcgcuggaagcggugaggacuagucccuguucccagagcccacuuuuuuuucuuuuuuugaaauaaaauagccugucuuucagaucucaaaggcucuuuucagagccaccaaaaaaaaaaaaaaaaaaaaaaaaaaaaaaaaaaaaaaaaaaaaaaaaaaaaaaaaaaaaaaaaaaaaaaaaaaaaaaaaaaaaaaaaaaaaaaaaaaaaa

SEQ ID NO: 28349 - RNA, 1748 nt, Artificial Sequence
  mRNA product Design a-1 (hSL-A100) comprising derived and/or modified sequence from LASV(G3010-SLE-2013;Clade IV)__AIT17344__GPCmut5 (opt1)
aggagagucccgcagucggcguccagcggcucugcuuguucgugugugugucguugcaggccuuauucaagcuuaccaugggccagaucgugaccuucuuccaggaggucccccacgugaucgaggaggugaugaacaucguccugaucgcccucagcauccuggccgugcugaaggggcucuacaacuucgcgaccugcggccugguggggcuggucacguuccuccugcugugcggccgcuccugcaccaccagccucuacaaggggguguacgagcugcagacccuggagcucaacauggagacgcugaacaugaccaugccgcuguccugcaccaagaacaacagccaccacuacaucauggugggcaacgagaccggccucgagcugacgcugaccaacaccuccaucaucaaccacaaguucugcaaccucagcgacgcccacaagaagaaccuguacaaccacgcccugauguccaucaucagcaccuuccaccucuccauccccaacuucaaccaguacgaggccaugagcugcgacuucaacgggggcaagaucuccguccaguacaaccugagccacuccuacgccggggacgcggccagccacugcggcacgguggccaacggggugcugcagaccuucaugcggauggccuggggcggcuccuacaucgcgcucgacagcgggugcggcaagugggacugcaucaugaccuccuaccaguaccugaucauccagaacaccacgugggaggaccacugccaguucagccgccccucccccaucggguaccugggccuccugagccagcggacccgcgacaucuacaucagccggcgccugcucggcaccuucaccuggacgcuguccgacagcgaggggaaggacaccccgggcggguacugccugacccgguggaugcucaucgaggccgagcugaagugcuucggcaacaccgccgucgccaagugcaacgagaagcacgacgaggaguucugcgacaugcugcgccucuucgacuucaacaagcaggccauccagcggcugaagacgcccgcgcagauguccauccagcugaucaacaaggccgugaacgcccucaucaacgaccagcugaucaugaagaaccaccuccgcgacaucaugugcauccccuacugcaacuacagcaaguacugguaccugaaccacaccaccaccggcaagacgucccugcccaagugcuggcuggugagcaacggcuccuaccucaacgagacccacuucagcgacgacaucgagcagcaggccgacaacaugaucaccgagaugcugcagaaggaguacauggagcggcaggggaagacgccccugggccucgucgaccuguucguguucuccaccagcuucuaccugaucuccaucuuccugcaccucgugaagaucccgacccaccgccacaucgucggcaagagcugccccaagccccaccggcugaaccacauggggaucugcuccugcgggcuguacaagcagcccggcgugccggugcgcuggaagcggugaggacuagucccuguucccagagcccacuuuuuuuucuuuuuuugaaauaaaauagccugucuuucagaucucaaaggcucuuuucagagccaccaaaaaaaaaaaaaaaaaaaaaaaaaaaaaaaaaaaaaaaaaaaaaaaaaaaaaaaaaaaaaaaaaaaaaaaaaaaaaaaaaaaaaaaaaaaaaaaaaaaaa

SEQ ID NO: 28350 - RNA, 1748 nt, Artificial Sequence
  mRNA product Design a-1 (hSL-A100) comprising derived and/or modified sequence from LASV(G502-SLE-2009;Clade IV)__AIT17126__GPCmut5 (opt1)
aggagagucccgcagucggcguccagcggcucugcuuguucgugugugugucguugcaggccuuauucaagcuuaccaugggccagaucgugaccuucuuccaggaggucccccacgugaucgaggaggugaugaacaucguccugaucgcccucagcauccuggccgugcugaaggggcucuacaacuucgcgaccugcggccugguggggcugcucacguuccugcugcucugcggccgcuccugcaccaccgggcuguacaagggcgucuacgagcugcagacccucgagcugaacauggagacgcugaacaugaccaugccgcucagcugcaccaagaacaacucccaccacuacaucauggugggcaacgagaccgggcuggagcugacgcucaccaacaccagcaucaucaaccacaaguucugcaaccuguccgacgcccacaagaagaaccuguacgaccacgcccucaugagcaucaucuccaccuuccaccugagcauccccaacuucaaccaguacgaggccauguccugcgacuucaacggcgggaagaucagcgugcaguacaaccugucccacagcuacgccggcgacgcggccgaccacugcgggacggucgccaacggcgugcuccagaccuucaugcggauggccuggggcggguccuacaucgcgcuggacagcggcugcgggcggugggacugcaucaugaccuccuaccaguaccugaucauccagaacaccacgugggaggaccacugccaguucagccgccccucccccaucggcuaccucggccugcugagccagcggacccgcgacaucuacaucucccggcgccuccuggggaccuucaccuggacgcugagcgacagcgagggcaaggacacccccgggggcuacugccucacccgguggaugcugaucgaggccgagcugaagugcuucgggaacaccgccguggccaagugcaacgagaagcacgacgaggaguucugcgacaugcuccgccuguucgacuucaacaagcaggccauccagcggcugaaggcgcccgcccagauguccauccagcucaucaacaaggccgucaacgcccugaucaacgaccagcuggugaugaagaaccaccuccgcgacaucaugugcauccccuacugcaacuacagccgguacugguaccugaaccacacgaccaccggccgcaccucccugcccaagugcuggcucgugagcaacggguccuaccugaacgagacgcacuucagcgacgacaucgagcagcaggccgacaacaugaucaccgagaugcugcagaaggaguacauggagcggcagggcaagaccccgcucgggcuggucgaccuguucguguucuccaccagcuucuaccugaucuccaucuuccuccaccuggugaagaucccgacgcaccgccacaucgucggcaagagcugccccaagccccaccggcugaaccacauggggaucugcuccugcggccucuacaagcagcccggcgugccggugaaguggaagcgcugaggacuagucccuguucccagagcccacuuuuuuuucuuuuuuugaaauaaaauagccugucuuucagaucucaaaggcucuuuucagagccaccaaaaaaaaaaaaaaaaaaaaaaaaaaaaaaaaaaaaaaaaaaaaaaaaaaaaaaaaaaaaaaaaaaaaaaaaaaaaaaaaaaaaaaaaaaaaaaaaaaaaa

SEQ ID NO: 28351 - RNA, 1748 nt, Artificial Sequence
  mRNA product Design a-1 (hSL-A100) comprising derived and/or modified sequence from LASV(G733-SLE-2010;Clade IV)__AIT17154__GPCmut5 (opt1)
aggagagucccgcagucggcguccagcggcucugcuuguucgugugugugucguugcaggccuuauucaagcuuaccaugggccagaucgugaccuucuuccaggaggucccccacgugaucgaggaggugaugaacaucguccugaucgcccucagcauccuggccgugcugaaggggcucuacaacuucgcgaccugcggcaucguggggcuggucuccuuccugcuccugugcggccgcagcugcacgaccucccuguacaaggggguguacgagcuccagacccuggagcugaacauggagacccucaacaugacgaugccgcugagcugcaccaagaacaacucccaccacuacaucauggugggcaacgagaccggccuggagcucacccugacgaacaccagcaucaucaaccacaaguucugcaaccuguccgacgcccacaagaagaaccucuacgaccacgcccugaugagcaucaucuccaccuuccaccugagcauccccaacuucaaccaguacgaggccauguccugcgacuucaacgggggcaagaucagcguccaguacaaccucucccacagcuacgccggggacgcggccaaccacugcggcaccaucgccaacggggugcugcagacguucaugcggauggccuggggcggcuccuacaucgcgcuggacagcgggugcgaccggugggacugcaucaugaccuccuaccaguaccucaucauccagaacaccaccugggaggaccacugccaguucagccgccccucccccaucggcuaccuggggcugcucagccagcggacgcgcgacaucuacaucagccggcgccugcugggcaccuucaccuggacccucuccgacagcgagggcaaggacacgcccgggggcuacugccugacccgguggaugcugaucgaggccgagcucaagugcuucgggaacaccgccguggccaagugcaacgagaagcacgacgaggaguucugcgacaugcugcgccuguucgacuucaacaagcaggccauccagcggcucaaggcgcccgcccagauguccauccagcugaucaacaaggccgucaacgcccugaucaacgaccagcucaucaugaagaaccaccuccgcgacaucaugugcauccccuacugcaacuacagcaaguacugguaccugaaccacaccacgaccgggaagaccucccugcccaagugcuggcuggugagcaacggcuccuaccugaacgagacccacuucagcgacgacaucgagcagcaggccgacaacaugaucacggagaugcuccagaaggaguacauggagcggcagggcaagaccccgcuggggcugguggaccucuucgucuucuccaccagcuucuaccugaucuccaucuuccugcaccuggugaagaucccgacccaccgccacguggucggcaagagcugccccaagccccaccggcucaaccacauggggaucugcuccugcggccuguacgggcagcccggcgugccggugaaguggaagcgcugaggacuagucccuguucccagagcccacuuuuuuuucuuuuuuugaaauaaaauagccugucuuucagaucucaaaggcucuuuucagagccaccaaaaaaaaaaaaaaaaaaaaaaaaaaaaaaaaaaaaaaaaaaaaaaaaaaaaaaaaaaaaaaaaaaaaaaaaaaaaaaaaaaaaaaaaaaaaaaaaaaaaa

SEQ ID NO: 28352 - RNA, 1748 nt, Artificial Sequence
  mRNA product Design a-1 (hSL-A100) comprising derived and/or modified sequence from MOPV/LASV reassortant(IGS-1;Clade IV)__AFY05576__GPCmut5 (opt1)
aggagagucccgcagucggcguccagcggcucugcuuguucgugugugugucguugcaggccuuauucaagcuuaccaugggccagaucgugaccuucuuccaggaggucccccacgugaucgaggaggugaugaacaucguccugaucgcccucagcgugcuggccgugcugaaggggcucuacaacuucgcgaccugcggccuggucgggcuggugacguuccuccugcugugcggccgcuccugcaccaccagccucuacaaggggguguacgagcugcagacccuggagcucaacauggagacgcugaacaugaccaugccgcuguccugcaccaagaacaacagccaccacuacaucauggucggcaacgagaccggccucgagcugacgcugaccaacaccuccaucaucaaccacaaguucugcaaccucagcgacgcccacaagaagaaccuguacgaccacgcccugauguccaucaucagcaccuuccaccucuccauccccaacuucaaccaguacgaggccaugagcugcgacuucaacgggggcaagaucuccgugcaguacaaccugagccacuccuacgccggggacgcggccaaccacugcggcacgguggccaacgggguccugcagaccuucaugcggauggccuggggcggcagcuacaucgcgcucgacuccgggugcggcaacugggacugcaucaugaccagcuaccaguaccugaucauccagaacaccacgugggaggaccacugccaguucucccggcccagccccaucggguaccugggccuccugucccagcgcacccgggacaucuacaucagccgccggcugcucggcaccuucaccuggacgcugagcgacuccgagggggaggacaccccgggcggguacugccugacccgcuggaugcucaucgaggccgagcugaagugcuucggcaacaccgccguggccaagugcaacgagaagcacgacgaggaguucugcgacaugcugcggcuguucgacuucaacaagcaggccauccagcgccugaaggcgcccgcccagaugagcauccagcugaucaacaaggccgugaacgcccucaucaacgaccagcugaucaugaagaaccaccuccgggacaucaugugcauccccuacugcaacuacuccaaguacugguaccucaaccacacgaccaccggccgcaccagccugcccaagugcuggcuggucuccaacggcagcuaccucaacgagacgcacuucuccgacgacaucgagcagcaggccgacaacaugaucaccgagaugcugcagaaggaguacauggagcggcaggggaagacgccccugggccucguggaccuguucguguucagcaccuccuucuaccugaucagcaucuuccugcaccucgucaagaucccgacccaccgccacaucguggggaaguccugccccaagccccaccggcugaaccacaugggcaucugcagcugcgggcuguacaagcagcccggcgugccggucaaguggaagcgcugaggacuagucccuguucccagagcccacuuuuuuuucuuuuuuugaaauaaaauagccugucuuucagaucucaaaggcucuuuucagagccaccaaaaaaaaaaaaaaaaaaaaaaaaaaaaaaaaaaaaaaaaaaaaaaaaaaaaaaaaaaaaaaaaaaaaaaaaaaaaaaaaaaaaaaaaaaaaaaaaaaaaa

SEQ ID NO: 28353 - RNA, 1748 nt, Artificial Sequence
  mRNA product Design a-1 (hSL-A100) comprising derived and/or modified sequence from LASV(LM765-SLE-2012;Clade IV)__AIT17814__GPCmut5 (opt1)
aggagagucccgcagucggcguccagcggcucugcuuguucgugugugugucguugcaggccuuauucaagcuuaccaugggccagaucgugaccuucuuccaggaggucccccacgugaucgaggaggugaugaacaucguccugaucgcccucagcauccuggccgugcugaaggggcucuacaacuucgcgaccugcggccugguggggcuggucacguuccuccugcugugcggccgcuccugcaccaccagccucuacaaggggguguacgagcugcagacccuggagcucaacauggagacgcugaacaugaccaugccgcuguccugcaccaagaacaacagccaccacuacaucauggugggcaacgagaccggccucgagcugacgcugaccaacaccuccaucaucgaccacaaguucugcaaccucagcgacgcccaccggaagaaccuguacgaccacgcccugauguccaucaucagcaccuuccaccucuccauccccaacuucaaccaguacgaggccaugagcugcgacuucaacgggggcaagaucuccguccaguacaaccugagccacuccuacgccaaggacgcggccgaccacugcgggacgguggccaacggcgugcugcagaccuucaugcgcauggccuggggcgggagcuacaucgcgcucgacuccggcugcgggcgcugggacugcaucaugaccagcuaccaguaccugaucauccagaacaccacgugggaggaccacugccaguucucccggcccagccccaucggcuaccuggggcuccugucccagcgcacccgggacaucuacaucagccgccggcugcucggcaccuucaccuggacgcugagcgacuccgagggcaaggacacccccgggggcuacugccugacccgcuggaugcucaucgaggccgagcugaagugcuucgggaacaccgccgucgccaagugcaacgagaagcacgacgaggaguucugcgacaugcugcggcuguucgacuucaacaagcaggccauccagcgccugaaggcgcccgcccagaugagcauccagcugaucaacaaggccgugaacgcccucaucaacgaccagcugaucaugaagaaccaccuccgggacaucaugugcauccccuacugcaacuacuccaaguacugguaccucaaccacacgaccaccgggaagaccagccugcccaagugcuggcugguguccaacggcagcuaccucaacgagacgcacuucuccgacgacaucgagcagcaggccgacaacaugaucaccgagaugcugcagaaggaguacauggagcgccagggcaagaccccgcuggggcucgucgaccuguucguguucagcaccuccuucuaccugaucagcaucuuccugcaccucgugaagaucccgacgcaccggcacaucgucggcaagcccugccccaagccccaccgccugaaccacauggggaucugcuccugcggccuguacaagcagccgggggugcccgugaaguggaagcggugaggacuagucccuguucccagagcccacuuuuuuuucuuuuuuugaaauaaaauagccugucuuucagaucucaaaggcucuuuucagagccaccaaaaaaaaaaaaaaaaaaaaaaaaaaaaaaaaaaaaaaaaaaaaaaaaaaaaaaaaaaaaaaaaaaaaaaaaaaaaaaaaaaaaaaaaaaaaaaaaaaaaa

SEQ ID NO: 28354 - RNA, 1748 nt, Artificial Sequence
  mRNA product Design a-1 (hSL-A100) comprising derived and/or modified sequence from LASV(LM776-SLE-2012;Clade IV)__AIT17824__GPCmut5 (opt1)
aggagagucccgcagucggcguccagcggcucugcuuguucgugugugugucguugcaggccuuauucaagcuuaccaugggccagaucgugaccuucuuccaggaggucccccacgugaucgaggaggugaugaacaucguccugaucgcccucagcauccuggccgugcugaaggggcucuacaacuucgcgaccugcggccugguggggcuggucacguuccuccugcugugcggccgcuccugcaccaccagcguguacaaggggguguacgagcuccagacccuggagcugaacauggagacgcucaacaugaccaugccgcuguccugcaccaagaacaacagccaccacuacaucauggucggcaacgagaccggccuggagcucacgcugaccaacaccuccaucaucaaccacaaguucugcaaccugagcgacgcccacaagaagaaccucuacgaccacgcccugauguccaucaucagcaccuuccaccuguccauccccaacuucaaccaguacgaggccaugagcugcgacuucaacgggggcaagaucuccgugcaguacaaccucagccacuccuacgccggggacgcggccaaccacugcggcacgguggccaacgggguccugcagaccuucaugcggauggccuggggcggcagcuacaucgcgcuggacuccgggugcggcaagugggacugcaucaugaccagcuaccaguaccucaucauccagaacaccacgugggaggaccacugccaguucucccgccccagccccaucggguaccugggccugcucucccagcggacccgcgacaucuacaucagccggcgccugcugggcaccuucaccuggacgcucagcgacuccgaggggaaggacaccccgggcggguacugccugacccgguggaugcugaucgaggccgagcucaagugcuucggcaacaccgccguggccaagugcaacgagaagcacgacgaggaguucugcgacaugcugcgccuguucgacuucaacaagcaggccauccagcggcucaaggcgcccgcccagaugagcauccagcugaucaacaaggccgugaacgcccugaucaacgaccagcucaucaugaagaaccaccuccgcgacaucaugugcauccccuacugcaacuacuccaaguacugguaccugaaccacacgaccaccggcaagaccagccugcccaagugcuggcuggucuccaacggcagcuaccugaacgagacgcacuucuccgacgacaucgagcagcaggccgacaacaugaucaccgagaugcuccagaaggaguacauggagcggcaggggaagacgccccugggccugguggaccucuucguguucagcaccuccuucuaccugaucagcaucuuccugcaccuggucaagaucccgacccaccgccacaucguggggaaguccugccccaagccccaccggcucaaccacaugggcaucugcagcugcgggcuguacaagcagcccggcgugccgguccgcuggaagcggugaggacuagucccuguucccagagcccacuuuuuuuucuuuuuuugaaauaaaauagccugucuuucagaucucaaaggcucuuuucagagccaccaaaaaaaaaaaaaaaaaaaaaaaaaaaaaaaaaaaaaaaaaaaaaaaaaaaaaaaaaaaaaaaaaaaaaaaaaaaaaaaaaaaaaaaaaaaaaaaaaaaaa

SEQ ID NO: 28355 - RNA, 1748 nt, Artificial Sequence
  mRNA product Design a-1 (hSL-A100) comprising derived and/or modified sequence from LASV(Mad39;Clade IV)__ANH09722__GPCmut5 (opt1)
aggagagucccgcagucggcguccagcggcucugcuuguucgugugugugucguugcaggccuuauucaagcuuaccaugggccagaucgugaccuucuuccaggaggucccccacgugaucgaggaggugaugaacaucguccugaucgcccucagcauccuggccgugcugaaggggcucuacaacguggcgaccugcggccugaucgggcuggucacguuccuccugcugugcggccgcuccugcaccaccacccucuacaaggggguguacgagcugcaggcccuggagcucaacauggagacgcugaacaugaccaugccgcugagcugcaccaagaacaacucccaccacuacauccgggugggcaacgagaccggccucgagcugacgcugaccaacaccagccucaucaaccacaaguucugcaaccuguccgacgcccacaagaagaaccuguacgaccacgcccucaugagcaucaucuccaccuuccaccugagcauccccaacuucaaccaguacgaggccauguccugcgacuucaacgacgggaagaucagcguccaguacaaccugucccacacguacgcgggcgacaccgccaaccacugcgggaccguggccaacggcgugcuccagaccuucaugcgcauggccuggggcgggagcuacaucgcgcuggacuccggcugcgggggcugggacugcaucaugacgagcuaccaguaccugaucauccagaacaccaccugggaggaccacugccaguucucccggcccagccccaucggguaccucggccugcugucccagcggacccgcgacaucuacaucagccggcgccuccugggcacguucaccuggacccuguccgacagcgaggggaaggacaccccgggcggguacugccucacgcgguggaugcugaucgaggccgagcugaagugcuucggcaacaccgccgucgccaagugcaacgagaagcacgacgaggaguucugcgacaugcuccgccuguucgacuucaacaagcaggccauccagcggcugaaggcgcccgcccagaugagcauccagcucaucaacaaggccgugaacgcccugaucaacgaccagcugaucaugaagaaccaccuccgcgacaucaugugcauccccuacugcaacuacuccaaguacugguaccugaaccacaccgugaccggcaagacgagccugcccaagugcuggcucgucuccaacggcagcuaccugaacgagacccacuucuccgacgacaucgagcagcaggccgacaacaugaucaccgagaugcugcagaaggaguacauggagcggcaggggaagacgccccucggccugguggaccuguucguguucagcaccuccuucuaccugaucagcaucuuccuccaccuggucaagaucccgacccaccgccacgugguggggaagcccugccccaagccccaccggcugaaccacaugggcaucugcuccugcggguucuacaagcagccgggcguccccgugcgcuggaagcggugaggacuagucccuguucccagagcccacuuuuuuuucuuuuuuugaaauaaaauagccugucuuucagaucucaaaggcucuuuucagagccaccaaaaaaaaaaaaaaaaaaaaaaaaaaaaaaaaaaaaaaaaaaaaaaaaaaaaaaaaaaaaaaaaaaaaaaaaaaaaaaaaaaaaaaaaaaaaaaaaaaaaa

SEQ ID NO: 28356 - RNA, 1748 nt, Artificial Sequence
  mRNA product Design a-1 (hSL-A100) comprising derived and/or modified sequence from LASV(Z0947-SLE-2011;Clade IV)__AIT17840__GPCmut5 (opt1)
aggagagucccgcagucggcguccagcggcucugcuuguucgugugugugucguugcaggccuuauucaagcuuaccaugggccagaucgugaccuucuuccaggaggucccccacgugaucgaggaggugaugaacaucguccugaucgcccucagcauccuggccgugcugaaggggcucuacaacuucgcgaccugcggccugguggggcuggucacguuccuccugcugugcggccgcuccugcaccaucagccucuacaaggggguguacgagcugcagacccuggagcucaacauggagacccugaacaugacgaugccgcuguccugcaccaagaacaacagccaccacuacaucauggugggcaacgagaccggccucgagcugacccugacgaacaccuccaucaucaaccacaaguucugcaaccucagcgacgcccacaagaagaaccuguacgaccacgcccugauguccaucaucagcaccuuccaccucuccauccccaacuucaaccaguacgaggccaugagcugcgacuucaacgggggcaagaucuccguccaguacaaccugagccacuccuacgccggggacgcggccaaccacugcggcaccguggccaacggggugcugcagacguucaugcggauggccuggggcggcagcuacaucgcgcucgacuccgggugcgaccggugggacugcaucaugaccagcuaccaguaccugaucauccagaacaccaccugggaggaccacugccaguucucccgccccagccccaucggcuaccuggggcuccugucccagcggacgcgcgacaucuacaucagccggcgccugcucggcaccuucaccuggacccugagcgacuccgagggcaaggacacgcccgggggcuacugccugacccgguggaugcucaucgaggccgagcugaagugcuucgggaacaccgccgucgccaagugcaacgagaagcacgacgaggaguucugcgacaugcugcgccucuucgacuucaacaagcaggccauccagcggcugaaggcgcccgcccagaugagcauccagcugaucaacaaggccgugaacgcccucaucaacgaccagcugaucaugaagaaccaccuccgcgacaucaugugcauccccuacugcaacuacuccaaguacugguaccugaaccacaccacgaccgggaagaccagccugcccaagugcuggcugguguccaacggcagcuaccucaacgagacccacuucuccgacgacaucgagcagcaggccgacaacaugaucacggagaugcugcagaaggaguacauggagcggcagggcaagaccccgcuggggcucgucgaccuguucguguucagcaccuccuucuaccugaucagcaucuuccugcaccucgugaagaucccgacccaccgccacaucgucggcaagcccugccccaagccccaccggcugaaccacauggggaucugcuccugcggccuguacaagcagccgggggugcccgugaaguggaagcgcugaggacuagucccuguucccagagcccacuuuuuuuucuuuuuuugaaauaaaauagccugucuuucagaucucaaaggcucuuuucagagccaccaaaaaaaaaaaaaaaaaaaaaaaaaaaaaaaaaaaaaaaaaaaaaaaaaaaaaaaaaaaaaaaaaaaaaaaaaaaaaaaaaaaaaaaaaaaaaaaaaaaaa

SEQ ID NO: 28357 - RNA, 1748 nt, Artificial Sequence
  mRNA product Design a-1 (hSL-A100) comprising derived and/or modified sequence from LASV(Josiah;Clade IV)__NP_694870__GPCmut5 (opt1)
aggagagucccgcagucggcguccagcggcucugcuuguucgugugugugucguugcaggccuuauucaagcuuaccaugggccagaucgugaccuucuuccaggaggucccccacgugaucgaggaggugaugaacaucguccugaucgcccucagcgugcuggccgugcugaaggggcucuacaacuucgcgaccugcggccuggucgggcuggugacguuccuccugcugugcggccgcuccugcaccaccagccucuacaaggggguguacgagcugcagacccuggagcucaacauggagacgcugaacaugaccaugccgcuguccugcaccaagaacaacagccaccacuacaucauggucggcaacgagaccggccucgagcugacgcugaccaacaccuccaucaucaaccacaaguucugcaaccucagcgacgcccacaagaagaaccuguacgaccacgcccugauguccaucaucagcaccuuccaccucuccauccccaacuucaaccaguacgaggccaugagcugcgacuucaacgggggcaagaucuccgugcaguacaaccugagccacuccuacgccggggacgcggccaaccacugcggcacgguggccaacgggguccugcagaccuucaugcggauggccuggggcggcagcuacaucgcgcucgacuccgggugcggcaacugggacugcaucaugaccagcuaccaguaccugaucauccagaacaccacgugggaggaccacugccaguucucccgccccagccccaucggguaccugggccuccugucccagcggacccgcgacaucuacaucagccggcgccugcucggcaccuucaccuggacgcugagcgacuccgaggggaaggacaccccgggcggguacugccugacccgguggaugcucaucgaggccgagcugaagugcuucggcaacaccgccguggccaagugcaacgagaagcacgacgaggaguucugcgacaugcugcgccucuucgacuucaacaagcaggccauccagcggcugaaggcgcccgcccagaugagcauccagcugaucaacaaggccgugaacgcccucaucaacgaccagcugaucaugaagaaccaccuccgcgacaucaugugcauccccuacugcaacuacuccaaguacugguaccugaaccacacgaccaccgggcggaccagccugcccaagugcuggcuggucuccaacggcagcuaccucaacgagacgcacuucuccgacgacaucgagcagcaggccgacaacaugaucaccgagaugcugcagaaggaguacauggagcgccagggcaagaccccgcuggggcugguggaccucuucguguucagcaccuccuucuaccugaucagcaucuuccugcaccucgucaagauccccacgcaccggcacaucgugggcaaguccugccccaagccccaccgccugaaccacauggggaucugcagcugcggccuguacaagcagccgggggugcccgucaaguggaagcggugaggacuagucccuguucccagagcccacuuuuuuuucuuuuuuugaaauaaaauagccugucuuucagaucucaaaggcucuuuucagagccaccaaaaaaaaaaaaaaaaaaaaaaaaaaaaaaaaaaaaaaaaaaaaaaaaaaaaaaaaaaaaaaaaaaaaaaaaaaaaaaaaaaaaaaaaaaaaaaaaaaaaa

SEQ ID NO: 28358 - RNA, 1745 nt, Artificial Sequence
  mRNA product Design a-1 (hSL-A100) comprising derived and/or modified sequence from LASV(LP;Clade I)__AAF86701__GPCmut5 (opt1)
aggagagucccgcagucggcguccagcggcucugcuuguucgugugugugucguugcaggccuuauucaagcuuaccaugggccagaucaucaccuucuuccaggaggugccccacgucaucgaggaggugaugaacaucgugcugaucgcccucagccugcuggccauccucaaggggcuguacaacaucgcgaccugcggcaucaucgggcuggucgccuuccucuuccugugcggcaaguccugcagccugacgcucaagggcggguacgagcugcagacccuggagcucaacauggagacccugaacaugaccaugccgcuguccugcacgaagaacagcucccaccacuacauccgcgugggcaacgagaccgggcucgagcugacccugaccaacacgagcaucaucaaccacaaguucugcaaccucuccgacgcccacaagaagaaccuguacgaccacgcccugaugagcaucaucuccaccuuccaccucagcauccccaacuucaaccaguacgaggccauguccugcgacuucaacggcgggaagaucagcgugcaguacaaccugucccacagcuacgcgggcgacgccgccgagcacugcgggaccgucgccaacggcgugcugcagaccuucaugcggauggcguggggcgggcgcuacaucgcccucgacuccggcugcgggaacugggacugcaucaugacgagcuaccaguaccugaucauccagaacaccaccugggaggaccacugccaguucucccggcccagccccaucggcuaccugggccuccugucccagcgcacccgggacaucuacaucagccgccggcugcucgggacguucaccuggacccugagcgacuccgagggcaacgagacccccgggggcuacugccugacgcgcuggaugcucaucgaggccgagcugaagugcuucgggaacaccgccguggccaagugcaacgagaagcacgacgaggaguucugcgacaugcugcggcuguucgacuucaacaagcaggcgauccgccggcugaaggccccggcccagaugagcauccagcugaucaacaaggccgucaacgcccucaucaacgaccagcugaucaugaagaaccaccuccgcgacaucaugugcauccccuacugcaacuacuccaaguacugguaccucaaccacaccagcuccggccggaccagccugcccaagugcuggcugaucuccaacggcagcuaccucaacgagacgcaguucuccgacgacaucgagcagcaggcggacaacaugaucaccgagaugcugcagaaggaguacaucgagcgccaggggaagaccccgcugggccugguggacaucuucaucuucagcaccuccuucuaccucaucagcaucuuccugcaccugaucaagauccccacgcaccggcacaucguggggaagcccugccccaagccgcaccgccucaaccacaugggcgucugcuccugcgggcuguacaagcaccccggcgugcccaccaaguggaagcggugaggacuagucccuguucccagagcccacuuuuuuuucuuuuuuugaaauaaaauagccugucuuucagaucucaaaggcucuuuucagagccaccaaaaaaaaaaaaaaaaaaaaaaaaaaaaaaaaaaaaaaaaaaaaaaaaaaaaaaaaaaaaaaaaaaaaaaaaaaaaaaaaaaaaaaaaaaaaaaaaaaaaa

SEQ ID NO: 28359 - RNA, 1745 nt, Artificial Sequence
  mRNA product Design a-1 (hSL-A100) comprising derived and/or modified sequence from LASV(803213;Clade II)__AAF86703__GPCmut5 (opt1)
aggagagucccgcagucggcguccagcggcucugcuuguucgugugugugucguugcaggccuuauucaagcuuaccaugggccagaucaucaccuucuuccaggaggugccccacgucaucgaggaggugaugaacaucgugcugaucgcccucagccugcuggccauccucaaggggaucuacaacgucgcgaccugcggccuguucgggcugaucuccuuccuccugcugugcggccgcagcugcuccgugacguacaaggggguguacgagcuccagacccuggagcugaacauggccaaccucaacaugaccaugccgcugagcugcaccaagaacaacucccaccacuacaucauggucggcaacgagacgggccuggagcucacccugaccaacaccagcaucaucaaccacaaguucugcaaccuguccgacgcccacaagaagaaccucuacgaccacgcccugaugagcaucaucuccacguuccaccugagcauccccaacuucaaccaguacgaggccauguccugcgacuucaacgggggcaagaucagcgugcaguacaaccucucccacagcuucgcgguggacgccgccaaccacugcgggaccaucgccaacggcguccugcagaccuucaugcggauggcguggggcggguccuacaucgcccuggacagcggcugcgggaacugggacugcaucaugaccuccuaccaguaccucaucauccagaacacgaccugggaggaccacugccaguucagccgccccucccccaucggcuaccuggggcugcucagccagcggacccgcgacaucuacaucagccggcgccugcugggcaccuucacguggacccucuccgacagcgagggcaacgaggcccccgggggcuacugccugacccgguggaugcugaucgaggccgagcucaagugcuucgggaacaccgccguggcgaagugcaacgagaagcacgacgaggaguucugcgacaugcugcgccuguucgacuucaacaagcaggccaucaagcggcucaagacgccggcccagauguccauccagcugaucaacaaggccgugaacgcccugaucaacgaccagcucaucaugaagaaccaccuccgcgacaucaugugcauccccuacugcaacuacagccgguacugguaccugaaccacaccgucaccggcaagaccucccugccccgcugcuggcuggugagcaacggguccuaccugaacgagacgcacuucagcgacgacaucgagcagcaggcggacaacaugaucaccgagaugcuccagaaggaguacauggaccggcagggcaagaccccgcugggccugguggaccuguucgucuucuccaccagcuucuaccucaucuccaucuuccugcaccuggugaagauccccacgcaccgccacaucguggggaagcccugccccaagccgcaccggcucaaccacaugggcaucugcagcugcgggcuguacaagcaccccggcguccccgugaaguggaagcgcugaggacuagucccuguucccagagcccacuuuuuuuucuuuuuuugaaauaaaauagccugucuuucagaucucaaaggcucuuuucagagccaccaaaaaaaaaaaaaaaaaaaaaaaaaaaaaaaaaaaaaaaaaaaaaaaaaaaaaaaaaaaaaaaaaaaaaaaaaaaaaaaaaaaaaaaaaaaaaaaaaaaaa

SEQ ID NO: 28360 - RNA, 1745 nt, Artificial Sequence
  mRNA product Design a-1 (hSL-A100) comprising derived and/or modified sequence from LASV(GA391;Clade III)__CAA36645__GPCmut5 (opt1)
aggagagucccgcagucggcguccagcggcucugcuuguucgugugugugucguugcaggccuuauucaagcuuaccaugggccagaucgugaccuucuuccaggaggucccccacgugaucgaggaggugaugaacaucguccugaucgcccucagcauccuggccauccugaaggggcucuacaacguggcgaccugcggccugaucgggcuggugacguuccuccugcuguccggccgcagcugcucccucaucuacaaggggaccuacgagcugcagacccuggagcucaacauggagacccugaacaugacgaugccgcugagcugcaccaagaacaacucccaccacuacauccgggucggcaacgagaccggccucgagcugacccugacgaacaccagcauccucaaccacaaguucugcaaccuguccgacgcccacaagcgcaaccuguacgaccacagccucauguccaucaucagcaccuuccaccuguccauccccaacuucaaccaguacgaggccaugagcugcgacuucaacgggggcaagaucaccgugcaguacaaccugucccacagcuucgccguggacgccgcggggcacugcggcacgcucgccaacgggguccugcagaccuucaugcggauggccuggggcggcuccuacaucgcccuggacagcgggugcggcaacugggacugcaucaugaccuccuaccaguaccucaucauccagaacaccacgugggacgaccacugccaguucagccgccccucccccaucggguaccugggccugcucagccagcggacccgcgacaucuacaucagccggcgccugcugggcaccuucaccuggacgcucuccgacagcgaggggaacgagaccccgggcggguacugccugacccgguggaugcugaucgaggcggagcucaagugcuucggcaacaccgccguggccaagugcaacgagaagcacgacgaggaguucugcgacaugcugcgccuguucgacuucaacaagcaggccauccggcgccucaagacgcccgcccagauguccauccagcugaucaacaaggcggugaacgcccugaucaacgaccagcucaucaugaagaaccaccuccgggacaucaugugcauccccuacugcaacuacagccgcuacugguaccugaaccacaccuccaccgggaagaccagccugccccggugcuggcugaucuccaacggcagcuaccugaacgagacgaaguucuccgacgacaucgagcagcaggccgacaacaugaucaccgagaugcugcagaaggaguacaucgaccgccagggcaagaccccgcucgggcuggucgaccuguucguguucagcaccuccuucuaccucaucagcaucuuccugcaccuggugaagauccccacgcaccggcacaucgucggcaagcccugccccaagccgcaccgccucaaccacauggggaucugcuccugcggccuguacaagcagcccggggugcccgugcgguggaagcgcugaggacuagucccuguucccagagcccacuuuuuuuucuuuuuuugaaauaaaauagccugucuuucagaucucaaaggcucuuuucagagccaccaaaaaaaaaaaaaaaaaaaaaaaaaaaaaaaaaaaaaaaaaaaaaaaaaaaaaaaaaaaaaaaaaaaaaaaaaaaaaaaaaaaaaaaaaaaaaaaaaaaaa

SEQ ID NO: 28361 - RNA, 1748 nt, Artificial Sequence
  mRNA product Design a-1 (hSL-A100) comprising derived and/or modified sequence from LASV(AV;Clade V)__CCA30314__GPCmut5 (opt1)
aggagagucccgcagucggcguccagcggcucugcuuguucgugugugugucguugcaggccuuauucaagcuuaccaugggccagaucgugaccuucuuccaggaggucccccacgugaucgaggaggugaugaacaucguccugaucgcccucagcauccuggccgugcugaaggggcucuacaacaucgcgaccugcggccugaucgggcugaucacguuccuccugcugugcggccgcuccugcagcuccaaccucuacaaggggguguacgagcugcagagccuggaccucaacauggagacccugaacaugaccaugccgcuguccugcaccaagaacaacagccaccacuacauccgggucggcaacgacacgggccucgagcugacccugaccaacaccuccauccucaaccacaaguucugcaaccugagcgacgcccacaagaaggaccuguacgaccacgcccucauguccaucaucagcacguuccaccuguccauccccaacuucaaccaguacgaggccaugagcugcgacuucaacgggggcaagaucuccgugcaguacaaccugagccacuccuacgccaucgacgcggccaaccacugcgggaccguggccaacggcauccuccagaccuucaugcgcauggccuggggcgggagcuacaucgcgcuggacuccggcugcgggaacugggacugcaucaugaccagcuaccaguaccugaucauccagaacacgaccugggagaaccacugccaguucucccggcccagccccaucggcuaccucgggcugcugagccagcgcacccgggacaucuacaucucccgccggcuccugggcaccuucacguggacccugagcgacuccgagggcaacgccacccccgggggcuacugccucacccgcuggaugcugaucgaggccgagcugaagugcuucgggaacacggccgucgccaagugcaacgagaagcacgacgaggaguucugcgacaugcuccggcuguucgacuucaacaagcaggcgaucagccgccugaaguccccggcccagaugagcauccagcucaucaacaaggccgugaacgcccugaucaacgaccagcugaucaugaagaaccaccuccgggacaucaugugcauccccuacugcaacuacuccaaguacugguaccugaaccacaccaucaccggcaagaccagccugcccaagugcuggcucguguccaacgggagcuaccugaacgagacgcacuucuccgacgacaucgagcagcaggccgacaacaugaucaccgagaugcugcagaaggaguacauggagcgccagggcaagaccccgcugggccucgucgaccuguucguguucagcaccuccuucuaccugaucagcaucuuccuccggcuggugaagauccccacgcaccgccacaucgucgggaagcccugccccaagccgcaccggcugaaccacaugggcaucugcuccugcgggcucuacaagcagcccggcgugcccgugcgcuggaagcggugaggacuagucccuguucccagagcccacuuuuuuuucuuuuuuugaaauaaaauagccugucuuucagaucucaaaggcucuuuucagagccaccaaaaaaaaaaaaaaaaaaaaaaaaaaaaaaaaaaaaaaaaaaaaaaaaaaaaaaaaaaaaaaaaaaaaaaaaaaaaaaaaaaaaaaaaaaaaaaaaaaaaa

SEQ ID NO: 28362 - RNA, 1745 nt, Artificial Sequence
  mRNA product Design a-1 (hSL-A100) comprising derived and/or modified sequence from LASV(Togo/2016/7082;Clade VI)__AMR44577__GPCmut5 (opt1)
aggagagucccgcagucggcguccagcggcucugcuuguucgugugugugucguugcaggccuuauucaagcuuaccaugggccagaucaucaccuucuuccaggaggugccccacgucaucgaggaggugaugaacaucgugcugaucgcccucagccugcuggccauccucaagggggucuacaacguggcgaccugcggcaucaucgggcuggugacguuccuguuccucugcggccgcuccugcagccugaucuacaagggguccuacgagcugcagacccucgagcugaacauggagacccugaacaugaccaugccgcucagcugcacgaagaacuccagccaccacuacauccgggucggcaacgagaccggccuggagcugacccucaccaacacguccaucaucaaccacaaguucugcaaccugagcgacgcccacaagcgcaaccuguacgaccacgcccucauguccauccugagcaccuuccaccuguccauccccaacuucaaccaguacgaggccaugagcugcgacuucaacgggggcaagaucuccgugcaguacaaccucagccacgccuacgcgguggacgccgccgagcacugcgggaccgucgccaacggcgugcugcagaccuucaugcggauggcguggggcggguccuacaucgcccuggacagcggcugcgggaacugggacugcaucaugacguccuaccaguaccucaucauccagaacaccaccugggaggaccacugccaguucagccgccccucccccaucggcuaccuggggcugcucagccagcggacccgcgacaucuacaucagccggcgccugcugggcacguucaccuggacccucuccgacagcgagggcaacgagacccccgggggcuacugccugacgcgguggaugcugaucgaggccgagcucaagugcuucgggaacaccgccguggccaagugcaacgagaagcacgacgaggaguucugcgacaugcugcgccuguucgacuucaacaagcaggcgauccagcggcucaaguccccggcccagaugagcauccagcugaucaacaaggccgucaacgcccugaucaacgaccagcucaucaugaagaaccaccuccgcgacaugaugugcauccccuacugcaacuacuccaaguacugguaccugaaccacaccagcuccggccggaccagccugcccaagugcuggcugguguccaacgggagcuaccugaacgagacgcacuucuccgacgacaucgagcagcaggccgacaacaugaucaccgagaugcuccagaaggaguacaucgaccgccagggcaagaccccgcugggccugguggaccuguucgucuucagcaccuccuucuaccucaucagcaucuuccugcaccugaucaagauccccacgcaccggcacaucguggggaagcccugccccaagccgcaccgccucaaccacaugggcaucugcuccugcgggcuguacaagcagcccggcgugcccacccgguggaagcgcugaggacuagucccuguucccagagcccacuuuuuuuucuuuuuuugaaauaaaauagccugucuuucagaucucaaaggcucuuuucagagccaccaaaaaaaaaaaaaaaaaaaaaaaaaaaaaaaaaaaaaaaaaaaaaaaaaaaaaaaaaaaaaaaaaaaaaaaaaaaaaaaaaaaaaaaaaaaaaaaaaaaaa

SEQ ID NO: 28363 - RNA, 1745 nt, Artificial Sequence
  mRNA product Design a-1 (hSL-A100) comprising derived and/or modified sequence from LASV(KAK-428;Clade n.d. (VII))__ANH09740__GPCmut5 (opt1)
aggagagucccgcagucggcguccagcggcucugcuuguucgugugugugucguugcaggccuuauucaagcuuaccaugggccagaucgugaccuucuuccaggaggucccccacgugaucgaggaggugaugaacaucguccugaucgcccucagccugcuggccauccucaaggggcuguacaacuucgcgaccugcggcgugaucgggcugaucacguuccuccugcugugcggccgcuccugcagcgccaccuacaaggggcaguacgagcuccagacccuggagcugaacauggagucccucaacaugaccaugccgcugagcugcacgaagaacaacucccaccacuacauccgggccggcaacaacaccggccuggagcucacccugaccaacacgagcaucaucucccacaaguucugcaaccugagcgacgcccacaagaagaaccucuacgaccacacccugauguccaucaucaccaccuuccaccugagcauccccaacuucaaccaguacgaggccauguccugcgacuucaacgggggcaagaucagcauccaguacaaccucucccacagcuacgcgggggacgccgcccagcacugcggcacgguggccaacgggguccugcagaccuucaugcgcauggcguggggcggcuccuaccuggcccucgacagcgggugccggggcugggacugcaucaucuccagcuaccaguaccugaucauccagaacaccaccugggacgaccacugccaguucucccgccccagccccaucggguaccugggcuucgugagccagaagacgcgggacaucuacaucucccgccggcuccugggcaccuucaccuggacccugagcgacuccgaggggcacgacaugccgggcggguacugccucacgcgcuggaugcugaucgaggccgaccugaagugcuucggcaacaccgccguggccaagugcaacgagaagcacgacgaggaguucugcgacauguggcggcuguucgacuucaacaagcaggcgauccagcgccugaaggcccccgcccagaugaacauccagcugaucaacaaggccgucaacgcccucaucaacgaccagcugaugaugaagaaccaccuccgggacaucaugugcauccccuacugcaacuacagcaaguucugguaccucaacaacaccaccacggggcgcaccucccugccccggugcuggcugaucagcaacggcuccuaccucaacgagacccacuucagcgacgacaucgagcagcaggcggacaacaugaucaccgagaugcugcagaaggaguacauggaccgccagggcaagacgccgcuggggcucguggaccuguucguguucuccaccagcuucuaccugaucaccaucuuccugcaccucgucaagauccccacccaccggcacaucgugggcaagcccugccccaagccgcaccgccugaaccacauggggaucugcuccugcggccuguacaagcagcccggggugcccguccgguggaagcgcugaggacuagucccuguucccagagcccacuuuuuuuucuuuuuuugaaauaaaauagccugucuuucagaucucaaaggcucuuuucagagccaccaaaaaaaaaaaaaaaaaaaaaaaaaaaaaaaaaaaaaaaaaaaaaaaaaaaaaaaaaaaaaaaaaaaaaaaaaaaaaaaaaaaaaaaaaaaaaaaaaaaaa

SEQ ID NO: 28364 - RNA, 1745 nt, Artificial Sequence; identical to SEQ ID NO: 28358
  mRNA product Design a-1 (hSL-A100) comprising derived and/or modified sequence from LASV(Pinneo-NIG-1969;Clade I)__AIT17836__GPCmut5 (opt1)

SEQ ID NO: 28365 - RNA, 1745 nt, Artificial Sequence
  mRNA product Design a-1 (hSL-A100) comprising derived and/or modified sequence from LASV(ISTH0009-NIG-2011;Clade II)__AIT17404__GPCmut5 (opt1)
aggagagucccgcagucggcguccagcggcucugcuuguucgugugugugucguugcaggccuuauucaagcuuaccaugggccagaucaucaccuucuuccaggaggugccccacgucaucgaggaggugaugaacaucgugcugaucgcccucagccugcuggccauccucaaggggaucuacaacgucgcgaccugcggccuguucgggcugguguccuuccuccugcugugcggccgcagcugcuccacgaccuacaaggggguguacgagcuccagacccuggagcuggacauggccagccucaacaugaccaugccgcuguccugcacgaagaacaacagccaccacuacaucauggucggcaacgagaccggccuggagcucacccugaccaacacguccaucaucaaccacaaguucugcaaccugagcgacgcccacaagaagaaccucuacgaccacgcccugauguccaucaucagcaccuuccaccuguccauccccaacuucaaccaguacgaggccaugagcugcgacuucaacgggggcaagaucuccgugcaguacaaccucagccacgcguacgccguggacgccgccaaccacugcgggaccaucgcgaacggcguccugcagaccuucaugcggauggccuggggcggguccuacaucgcccuggacagcggcugcggguccugggacugcaucaugacgagcuaccaguaccucaucauccagaacaccaccugggaggaccacugccaguucucccgccccagccccaucggcuaccuggggcugcucagccagcggacccgcgacaucuacaucucccggcgccugcugggcacguucaccuggacccucagcgacuccgagggcaacgagacccccgggggcuacugccugacgcgguggaugcugaucgaggccgagcucaagugcuucgggaacaccgccguggcgaagugcaacgagaagcacgacgaggaguucugcgacaugcugcgccuguucgacuucaacaagcaggccauccggcgccucaagaccccggcccagaugagcauccagcugaucaacaaggccgugaacgcccugaucaacgaccagcucaucaugaagaaccaccuccgggacaucaugugcauccccuacugcaacuacuccaaguacugguaccugaaccacaccgucacgggcaagaccagccugccccgcugcuggcugguguccaacgggagcuaccugaacgagacccacuucuccgacgacaucgagcagcaggcggacaacaugaucaccgagcuccugcagaaggaguacauggaccggcagggcaagacgccgcugggccugguggaccucuucgucuucagcaccuccuucuaccugaucagcaucuuccugcaccucaucaagauccccacccaccgccacaucaccgggaagcccugccccaagccgcaccggcugaaccacaugggcaucugcuccugcgggcuguacaagcaccccggcgugcccgugaaguggaagcgcugaggacuagucccuguucccagagcccacuuuuuuuucuuuuuuugaaauaaaauagccugucuuucagaucucaaaggcucuuuucagagccaccaaaaaaaaaaaaaaaaaaaaaaaaaaaaaaaaaaaaaaaaaaaaaaaaaaaaaaaaaaaaaaaaaaaaaaaaaaaaaaaaaaaaaaaaaaaaaaaaaaaaa

SEQ ID NO: 28366 - RNA, 1745 nt, Artificial Sequence
  mRNA product Design a-1 (hSL-A100) comprising derived and/or modified sequence from LASV(ISTH2010-NIG-2012;Clade II)__AIT17482__GPCmut5 (opt1)
aggagagucccgcagucggcguccagcggcucugcuuguucgugugugugucguugcaggccuuauucaagcuuaccaugggccagaucaucaccuucuuccaggaggugccccacgucaucgaggaggugaugaacaucgugcugaucgcccucagccugcuggccauccucaaggggaucuacaacgucgcgaccugcggccuguucgggcugguguccuuccuccugcugugcggccgcagcugcuccacgaccuacaaggggguguacgagcuccagacccuggagcuggacauggccagccucaacaugaccaugccgcuguccugcacgaagaacaacagccaccacuacaucauggucggcaacgagaccggccuggagcucacccugaccaacacguccaucaucaaccacaaguucugcaaccugagcgacgcccacaagaagaaccucuacgaccacgcccugauguccaucaucagcaccuuccaccuguccauccccaacuucaaccaguacgaggccaugagcugcgacuucaacgggggcaagaucuccgugcaguacaaccucagccacgcguacgccguggacgccgccaaccacugcgggaccaucgcgaacggcguccugcagaccuucaugcggauggccuggggcggguccuacaucgcccuggacagcggcugcggguccugggacugcaucaugacgagcuaccaguaccucaucauccagaacaucaccugggaggaccacugccaguucucccgccccagccccaucggcuaccuggggcugcucagccagcggacccgcgacaucuacaucucccggcgccugcugggcaccuucacguggacccucagcgacuccgagggcaacgagacccccgggggcuacugccugacccgguggaugcugaucgaggccgagcucaagugcuucgggaacacggccguggcgaagugcaacgagaagcacgacgaggaguucugcgacaugcugcgccuguucgacuucaacaagcaggccauccggcgccucaagaccccggcccagaugagcauccagcugaucaacaaggccgugaacgcccugaucaacgaccagcucaucaugaagaaccaccuccgggacaucaugugcauccccuacugcaacuacuccaaguacugguaccugaaccacaccgucaccggcaagacgagccugccccgcugcuggcugguguccaacgggagcuaccugaacgagacccacuucuccgacgacaucgagcagcaggcggacaacaugaucaccgagcuccugcagaaggaguacaucgaccggcagggcaagaccccgcugggccugguggaccucuucgucuucagcacguccuucuaccugaucagcaucuuccugcaccucgugaagauccccacccaccgccacguggucgggaagcccugccccaagccgcaccggcugaaccacaugggcaucugcuccugcgggcuguacaagcaccccggcgugcccgugaaguggaagcgcugaggacuagucccuguucccagagcccacuuuuuuuucuuuuuuugaaauaaaauagccugucuuucagaucucaaaggcucuuuucagagccaccaaaaaaaaaaaaaaaaaaaaaaaaaaaaaaaaaaaaaaaaaaaaaaaaaaaaaaaaaaaaaaaaaaaaaaaaaaaaaaaaaaaaaaaaaaaaaaaaaaaaa

SEQ ID NO: 28367 - RNA, 1745 nt, Artificial Sequence
  mRNA product Design a-1 (hSL-A100) comprising derived and/or modified sequence from LASV(Lassa virus/H.sapiens-wt/NGA/2015/ISTH_0543;Clade II)__AVO03639__GPCmut5 (opt1)
aggagagucccgcagucggcguccagcggcucugcuuguucgugugugugucguugcaggccuuauucaagcuuaccaugggccagaucaucaccuucuuccaggaggugccccacgucaucgaggaggugaugaacaucgugcugaucgcccucagccugcuggccauccucaaggggaucuacaacgucgcgaccugcggccuguucgggcugguguccuuccuccugcugugcggccgcagcugcuccacgaccuacaaggggguguacgagcuccagacccuggagcuggacauggccaaccucaacaugaccaugccgcugagcugcacgaagaacaacucccaccacuacaucauggucggcaacgagaccggccuggagcucacccugaccaacacgagcaucaucaaccacaaguucugcaaccuguccgacgcccacaagaagaaccucuacgaccacgcccugaugagcaucaucuccaccuuccaccugagcauccccaacuucaaccaguacgaggccauguccugcgacuucaacgggggcaagaucagcgugcaguacaaccucucccacaccuacgcgguggacgccgccaaccacugcgggaccaucgccaacggcguccugcagacguucaugcggauggcguggggcgggagcuacaucgcccuggacuccggcugcgggagcugggacugcaucaugaccuccuaccaguaccucgugauccagaacaccaccugggaggaccacugccaguucagccgccccucccccaucggcuaccuggggcugcucagccagcggacgcgcgacaucuacaucagccggcgccugcugggcaccuucaccuggacccucuccgacagcgagggcaacgagacgcccgggggcuacugccugacccgguggaugcugaucgaggccgagcucaagugcuucgggaacaccgccguggccaagugcaacgagaagcacgacgaggaguucugcgacaugcugcgccuguucgacuucaacaagcaggcgauccggcgccucaagaccccggcccagauguccauccagcugaucaacaaggccgucaacgcccugaucaacgaccagcucaucaugaagaaccaccuccgggacaucaugugcauccccuacugcaacuacagcaaguacugguaccugaaccacacggugaccggcaagaccucccugccccgcugcuggcuggugagcaacggguccuaccugaacgagacccacuucagcgacgacaucgagcagcaggccgacaacaugaucacggagcuccugcagaaggaguacaucgaccggcagggcaagaccccgcugggccuggucgaccucuucguguucuccaccagcuucuaccugaucuccaucuuccugcaccucgugaagauccccacccaccgccacaucacggggaagcccugccccaagccgcaccggcugaaccacaugggcaucugcagcugcgggcuguacaagcaccccggcguccccgugaaguggaagcgcugaggacuagucccuguucccagagcccacuuuuuuuucuuuuuuugaaauaaaauagccugucuuucagaucucaaaggcucuuuucagagccaccaaaaaaaaaaaaaaaaaaaaaaaaaaaaaaaaaaaaaaaaaaaaaaaaaaaaaaaaaaaaaaaaaaaaaaaaaaaaaaaaaaaaaaaaaaaaaaaaaaaaa

SEQ ID NO: 28368 - RNA, 1745 nt, Artificial Sequence
  mRNA product Design a-1 (hSL-A100) comprising derived and/or modified sequence from LASV(Lassa virus/H.sapiens-wt/NGA/2016/ISTH_0009;Clade II)__AVO03571__GPCmut5 (opt1)
aggagagucccgcagucggcguccagcggcucugcuuguucgugugugugucguugcaggccuuauucaagcuuaccaugggccagaucaucaccuucuuccaggaggugccccacgucaucgaggaggugaugaacaucgugcugaucgcccucagccugcuggccauccucaaggggaucuacaacgucgcgaccugcggccugcuggggcucguguccuuccugcugcucugcggccgcagcugcuccacgaccuacaaggggguguacgagcugcagacccuggagcucgacauggccagccugaacaugaccaugccgcuguccugcacgaagaacaacagccaccacuacaucauggucggcaacgagaccggccucgagcugacccugaccaacacguccaucaucaaccacaaguucugcaaccucagcgacgcccacaagaagaaccuguacgaccacgcccugauguccaucaucagcaccuuccaccucuccauccccaacuucaaccaguacgaggccaugagcugcgacuucaacgggggccggaucuccgugcaguacaaccugagccacuccuacgcgguggacgccgccaaccacugcgggaccaucgccaacggcguccugcagaccuucaugcgcauggcguggggcgggagcuacaucgcccucgacuccggcugcgggagcugggacugcaucaugacguccuaccaguaccugaucauccagaacaccaccugggaggaccacugccaguucagccggcccagccccaucggcuaccuggggcuccugucccagcgcacccgggacaucuacaucagccgccggcugcucggcacguucaccuggacccuguccgacagcgagggcaacgagacccccgggggcuacugccugacgcgcuggaugcucaucgaggccgagcugaagugcuucgggaacaccgccguggccaagugcaacgagaagcacgacgaggaguucugcgacaugcugcggcuguucgacuucaacaagcaggcgauccgccggcugaagaccccggcccagauguccauccagcugaucaacaaggccgugaacgcccucaucaacgaccagcugaucaugaagaaccaccuccgcgacaucaugugcauccccuacugcaacuacagcaaguacugguaccucaaccacaccgucacgggcaagaccucccugccccggugcuggcuggugagcaacggguccuaccucaacgagacccacuucagcgacgacaucgagcagcaggccgacaacaugaucaccgagcugcugcagaaggaguacaucgaccgccagggcaagacgccgcugggccucguggaccuguucgucuucuccaccagcuucuaccugaucuccaucuuccuccaccuggugaagauccccacccaccggcacaucaccgggaagcccugccccaagccgcaccgccugaaccacaugggcaucugcagcugcgggcucuacaaccaccccggcgugcccgucaaguggaagcggugaggacuagucccuguucccagagcccacuuuuuuuucuuuuuuugaaauaaaauagccugucuuucagaucucaaaggcucuuuucagagccaccaaaaaaaaaaaaaaaaaaaaaaaaaaaaaaaaaaaaaaaaaaaaaaaaaaaaaaaaaaaaaaaaaaaaaaaaaaaaaaaaaaaaaaaaaaaaaaaaaaaaa

SEQ ID NO: 28369 - RNA, 1745 nt, Artificial Sequence
  mRNA product Design a-1 (hSL-A100) comprising derived and/or modified sequence from LASV(Lassa virus/H.sapiens-wt/NGA/2016/ISTH_0017;Clade II)__AVO03567__GPCmut5 (opt1)
aggagagucccgcagucggcguccagcggcucugcuuguucgugugugugucguugcaggccuuauucaagcuuaccaugggccagaucaucaccuucuuccaggaggugccccacgucaucgaggaggugaugaacaucgugcugaucgcccucagccugcuggccauccucaaggggaucuacaacgucgcgaccugcggccuguucgggcugguguccuuccuccugcugugcggccgcagcugcuccacgaccuacaaggggguguacgagcuccagacccuggagcuggacauggccagccucaacaugaccaugccgcuguccugcacgaagaacaacagccaccacuacaucauggucggcaacgagaccggccuggagcucacccugaccaacacguccaucaucaaccacaaguucugcaaccugagcgacgcccacaagaagaaccucuacgaccacgcccugauguccaucaucagcaccuuccaccuguccauccccaacuucaaccaguacgaggccaugagcugcgacuucaacgggggcaagaucuccgugcaguacaaccucagccacaccuacgcgaucgacgccgccaaccacugcgggaccaucgccaacggcgugcugcagacguucaugcggauggcguggggcggguccuacaucgcccuggacagcggcugcggguccugggacugcaucaugaccagcuaccaguaccucaucauccagaacaccaccugggaggaccacugccaguucucccgccccagccccaucggcuaccuggggcugcucagccagcggacgcgcgacaucuacaucucccggcgccugcugggcaccuucaccuggacccucagcgacuccgagggcaacgagacgcccgggggcuacugccugacccgguggaugcugaucgaggccgagcucaagugcuucgggaacaccgccgucgccaagugcaacgagaagcacgacgaggaguucugcgacaugcugcgccuguucgacuucaacaagcaggcgauccggcgccucaagaccccggcccagaugagcauccagcugaucaacaaggccgugaacgcccugaucaacgaccagcucaucaugaagaaccaccuccgggacaucaugugcauccccuacugcaacuacuccaaguacugguaccugaaccacacggugaccggcaagaccagccugccccgcugcuggcuggucuccaacgggagcuaccugaacgagacccacuucuccgacgacaucgagcagcaggccgacaacaugaucacggagcuccugcagaaggaguacauggaccggcagggcaagaccccgcugggccugguggaccucuucguguucagcaccuccuucuaccugaucagcaucuuccugcaccucguccgcauccccacccaccggcacgugaucgggaagcccugccccaagccgcaccgccugaaccacaugggcaucugcuccugcgggcuguacaagcaccccggcgugcccgucaaguggaagcggugaggacuagucccuguucccagagcccacuuuuuuuucuuuuuuugaaauaaaauagccugucuuucagaucucaaaggcucuuuucagagccaccaaaaaaaaaaaaaaaaaaaaaaaaaaaaaaaaaaaaaaaaaaaaaaaaaaaaaaaaaaaaaaaaaaaaaaaaaaaaaaaaaaaaaaaaaaaaaaaaaaaaa

SEQ ID NO: 28370 - RNA, 1745 nt, Artificial Sequence
  mRNA product Design a-1 (hSL-A100) comprising derived and/or modified sequence from LASV(Lassa virus/H.sapiens-wt/NGA/2018/ISTH_0959;Clade II)__AVV65099__GPCmut5 (opt1)
aggagagucccgcagucggcguccagcggcucugcuuguucgugugugugucguugcaggccuuauucaagcuuaccaugggccagaucaucaccuucuuccaggaggugccccacgucaucgaggaggugaugaacaucgugcugaucgcccucagccugcuggccauccucaaggggaucuacaacgucgugaccugcggccuguucgggcugguguccuuccuccugcugugcggccgcagcugcuccacgaccuacaagggggucuacgagcuccagacccuggagcuggacauggcgagccucaacaugaccaugccgcuguccugcacgaagaacaacagccaccacuacaucauggugggcaacgagaccggccuggagcucacccugaccaacacguccaucaucaaccacaaguucugcaaccugagcgacgcccacaagaagaaccucuacgaccacgcccugauguccaucaucagcaccuuccaccuguccauccccaacuucaaccaguacgaggccaugagcugcgacuucaacgggggcaagaucuccgugcaguacaaccucagccacgccuacgcgaucgacgccgccaaccacugcgggaccaucgccaacggcguccugcagaccuucaugcggauggcguggggcggguccuacaucgcccuggacagcggcugcggguccugggacugcaucaugacgagcuaccaguaccucaucauccagaacaccaccugggaggaccacugccaguucucccgccccagccccaucggcuaccuggggcugcucagccagcggacccgcgacaucuacaucucccggcgccugcugggcacguucaccuggacccucagcgacuccgagggcaacgagacccccgggggcuacugccugacgcgguggaugcugaucgaggccgagcucaagugcuucgggaacaccgccguggccaagugcaacgagaagcacgacgaggaguucugcgacaugcugcgccuguucgacuucaacaagcaggcgauccggcgccucaagaccccggcccagaugagcauccagcugaucaacaaggccgugaacgcccugaucaacgaccagcucaucaugaagaaccaccuccgggacaucaugugcauccccuacugcaacuacuccaaguacugguaccugaaccacaccgucacgggcaagaccagccugccccgcugcuggcugguguccaacgggagcuaccugaacgagacccacuucuccgacgacaucgagcagcaggccgacaacaugaucaccgagcuccugcagaaggaguacaucgaccggcagggcaagacgccgcugggccugguggaccucuucgucuucagcaccuccuucuaccugaucagcaucuuccugcaccucgugaagauccccacccaccgccacgugaucgggaagcccugccccaagccgcaccggcugaaccacaugggcaucugcuccugcgggcuguacaagcaccccggcguccccgugaaguggaagcgcugaggacuagucccuguucccagagcccacuuuuuuuucuuuuuuugaaauaaaauagccugucuuucagaucucaaaggcucuuuucagagccaccaaaaaaaaaaaaaaaaaaaaaaaaaaaaaaaaaaaaaaaaaaaaaaaaaaaaaaaaaaaaaaaaaaaaaaaaaaaaaaaaaaaaaaaaaaaaaaaaaaaaa

SEQ ID NO: 28371 - RNA, 1745 nt, Artificial Sequence
  mRNA product Design a-1 (hSL-A100) comprising derived and/or modified sequence from LASV(LASV003-NIG-2008;Clade II)__AIT17580__GPCmut5 (opt1)
aggagagucccgcagucggcguccagcggcucugcuuguucgugugugugucguugcaggccuuauucaagcuuaccaugggccagaucaucaccuucuuccaggaggugccccacgucaucgaggaggugaugaacaucgugcugaucgcccucagccugcuggccauccucaaggggaucuacaacgucgcgaccugcggccuguucgggcugguguccuuccuccugcugugcggccgcagcugcuccacgaccuacaaggggguguacgagcuccagacccuggagcuggacauggccagccucaacaugaccaugccgcuguccugcacgaagaacaacagccaccacuacaucauggucggcaacgagaccggccuggagcucacccugaccaacacguccaucaucaaccacaaguucugcaaccugagcgacgcccacaagaagaaccucuacgaccacgcccugauguccaucaucagcaccuuccaccuguccauccccaacuucaaccaguacgaggccaugagcugcgacuucaacgggggcaagaucuccgugcaguacaaccucagccacaccuacgcgguggacgccgccaaccacugcgggaccaucgccaacggcguccugcagacguucaugcggauggcguggggcggguccuacaucgcccuggacagcggcugcggguccugggacugcaucaugaccagcuaccaguaccucaucauccagaacaccaccugggaggaccacugccaguucucccgccccagccccaucggcuaccuggggcugcucagccagcggacgcgcgacaucuacaucucccggcgccugcugggcaccuucaccuggacccucagcgacuccgagagcaacgagacgccgggcggguacugccugacccgguggaugcugaucgaggccgagcucaagugcuucggcaacaccgccguggccaagugcaacgagaagcacgacgaggaguucugcgacaugcugcgccuguucgacuucaacaagcaggcgauccggcgccucaaggcccccgcccagauguccauccagcugaucaacaaggccgugaacgcccugaucaacgaccagcucaucaugaagaaccaccuccgggacaucaugugcauccccuacugcaacuacagcaaguacugguaccugaaccacaccgucacggggcgcaccucccugccccggugcuggcuggugagcaacggcuccuaccugaacgagacccacuucagcgacgacaucgagcagcaggcggacaacaugaucaccgagcuccugcagaaggaguacauggaccgccaggggaagacgccgcugggccugguggaccucuucgucuucuccaccagcuucuaccugaucuccaucuuccugcaccucgugaagauccccacccaccggcacgugaucggcaagcccugccccaagccgcaccgccugaaccacauggggaucugcagcugcggccuguacaagcaccccgggguccccgugaaguggaagcggugaggacuagucccuguucccagagcccacuuuuuuuucuuuuuuugaaauaaaauagccugucuuucagaucucaaaggcucuuuucagagccaccaaaaaaaaaaaaaaaaaaaaaaaaaaaaaaaaaaaaaaaaaaaaaaaaaaaaaaaaaaaaaaaaaaaaaaaaaaaaaaaaaaaaaaaaaaaaaaaaaaaaa

SEQ ID NO: 28372 - RNA, 1745 nt, Artificial Sequence
  mRNA product Design a-1 (hSL-A100) comprising derived and/or modified sequence from LASV(LASV035-NIG-2009;Clade II)__AIT17588__GPCmut5 (opt1)
aggagagucccgcagucggcguccagcggcucugcuuguucgugugugugucguugcaggccuuauucaagcuuaccaugggccagaucaucaccuucuuccaggaggugccccacgucaucgaggaggugaugaacaucgugcugaucgcccucagccugcuggccauccucaaggggaucuacaacgucgcgaccugcggccuguucgggcugguguccuuccuccugcugugcggccgcagcugcuccacgaccuacaaggggguguacgagcuccagacccuggagcuggacauggccagccucaacaugaccaugccgcuguccugcacgaagaacaacagccaccacuacaucauggucggcaacgagaccggccuggagcucacccugaccaacacguccaucaucaaccacaaguucugcaaccugagcgacgcccacaagaagaaccucuacgaccacgcccugauguccaucaucagcaccuuccaccuguccauccccaacuucaaccaguacgaggccaugagcugcgacuucaacgggggcaagaucuccgugcaguacaaccucagccacgcguacgccguggacgccgccaaccacugcgggaccaucgcgaacggcguccugcagaccuucaugcggauggccuggggcggguccuacaucgcccuggacagcggcugcggguccugggacugcaucaugacgagcuaccaguaccucaucauccagaacaccaccugggaggaccacugccaguucucccgccccagccccaucggcuaccuggggcugcucagccagcggacccgcgacaucuacaucucccggcgccugcugggcacguucaccuggacccucagcgacuccgagggcaacgagacccccgggggcuacugccugacgcgguggaugcugaucgaggccgagcucaagugcuucgggaacaccgccguggcgaagugcaacgagaagcacgacgaggaguucugcgacaugcugcgccuguucgacuucaacaagcaggccauccggcgccucaaggccccggcccagaugagcauccagcugaucaacaaggccgugaacgcgcugaucaacgaccagcucaucaugaagaaccaccuccgggacaucaugugcauccccuacugcaacuacuccaaguacugguaccugaaccacaccgucaccggcaagacgagccugccccgcugcuggcugguguccaacgggagcuaccugaacgagacccacuucuccgacgacaucgagcagcaggccgacaacaugaucaccgagcuccugcagaaggaguacaucgaccggcagggcaagaccccgcugggccugguggaccucuucgucuucagcacguccuucuaccugaucagcaucuuccugcaccucgugaagauccccacccaccgccacgugaucgggaagcccugccccaagccgcaccggcugaaccacaugggcaucugcuccugcgggcuguacaagcaccccggcguccccgugaaguggaagcgcugaggacuagucccuguucccagagcccacuuuuuuuucuuuuuuugaaauaaaauagccugucuuucagaucucaaaggcucuuuucagagccaccaaaaaaaaaaaaaaaaaaaaaaaaaaaaaaaaaaaaaaaaaaaaaaaaaaaaaaaaaaaaaaaaaaaaaaaaaaaaaaaaaaaaaaaaaaaaaaaaaaaaa

SEQ ID NO: 28373 - RNA, 1745 nt, Artificial Sequence
  mRNA product Design a-1 (hSL-A100) comprising derived and/or modified sequence from LASV(LASV1000-NIG-2009;Clade II)__AIT17782__GPCmut5 (opt1)
aggagagucccgcagucggcguccagcggcucugcuuguucgugugugugucguugcaggccuuauucaagcuuaccaugggccagaucaucaccuucuuccaggaggugccccacgucaucgaggaggugaugaacaucgugcugaucgcccucagccugcuggccauccucaaggggaucuacaacgucgcgaccugcggccuguucgggcugguguccuuccuccugcugugcggccgcagcugcuccacgaccuacaaggggguguacgagcuccagacccuggagcuggacauggccagccucaacaugaccaugccgcuguccugcacgaagaacaacagccaccacuacaucauggucggcaacgagaccggccuggagcucacccugaccaacacguccaucaucaaccacaaguucugcaaccugagcgacgcccacaagaagaaccucuacgaccacgcccugauguccaucaucagcaccuuccaccuguccauccccaacuucaaccaguacgaggccaugagcugcgacuucaacgggggcaagaucuccgugcaguacaaccucagccacaccuacgcgguggacgccgccaaccacugcgggaccaucgccaacggcguccugcagacguucaugcggauggcguggggcggguccuacaucgcccuggacagcggcugcggguccugggacugcaucaugaccagcuaccaguaccucaucauccagaacaccaccugggaggaccacugccaguucucccgccccagccccaucggcuaccuggggcugcucagccagcggacgcgcgacaucuacaucucccggcgccugcugggcaccuucaccuggacccucagcgacuccgagggcaacgagacgcccgggggcuacugccugacccgguggaugcugaucgaggccgagcucaagugcuucgggaacaccgccguggccaagugcaacgagaagcacgacgaggaguucugcgacaugcugcgccuguucgacuucaacaagcaggcgaucaagcggcucaagaccccggcccagaugagcauccagcugaucaacaaggccgugaacgcccugaucaacgaccagcucaucaugaagaaccaccuccgcgacaucaugugcauccccuacugcaacuacuccaaguacugguaccugaaccacacggucaccggcaagaccagccugccccggugcuggcugguguccaacgggagcuaccugaacgagacccacuucuccgacgacaucgagcagcaggccgacaacaugaucacggagcuccugcagaaggaguacaucgaccgccagggcaagaccccgcugggccugguggaccucuucgucuucagcaccuccuucuaccugaucagcaucuuccugcaccucgugaagauccccacccaccggcacguggucgggaagcccugccccaagccgcaccgccugaaccacaugggcaucugcuccugcgggcuguacaagcaccccggcgugcccgugaaguggaagcggugaggacuagucccuguucccagagcccacuuuuuuuucuuuuuuugaaauaaaauagccugucuuucagaucucaaaggcucuuuucagagccaccaaaaaaaaaaaaaaaaaaaaaaaaaaaaaaaaaaaaaaaaaaaaaaaaaaaaaaaaaaaaaaaaaaaaaaaaaaaaaaaaaaaaaaaaaaaaaaaaaaaaa

SEQ ID NO: 28374 - RNA, 1745 nt, Artificial Sequence
  mRNA product Design a-1 (hSL-A100) comprising derived and/or modified sequence from LASV(LASV221-NIG-2010;Clade II)__AIT17624__GPCmut5 (opt1)
aggagagucccgcagucggcguccagcggcucugcuuguucgugugugugucguugcaggccuuauucaagcuuaccaugggccagaucaucaccuucuuccaggaggugccccacgucaucgaggaggugaugaacaucgugcugaucgcccucagccugcuggccauccucaaggggaucuacaacgucgcgaccugcggccuguucgggcugguguccuuccuccugcugugcggccgcagcugcuccacgaccuacaaggggguguacgagcuccagacccuggagcuggacauggccagccucaacaugaccaugccgcuguccugcacgaagaacaacagccaccacuacaucauggucggcaacgagaccggccuggagcucacccugaccaacacguccaucaucaaccacaaguucugcaaccugagcgacgcccacaagaagaaccucuacgaccacgcccugauguccaucaucagcaccuuccaccuguccauccccaacuucaaccaguacgaggccaugagcugcgacuucaacgggggcaagaucuccgugcaguacaaccucagccacaccuacgcgaucgacgccgccaaccacugcgggaccaucgccaacggcgugcugcagacguucaugcggauggcguggggcggguccuacaucgcccuggacagcggcugcggguccugggacugcaucaugaccagcuaccaguaccucaucauccagaacaccaccugggaggaccacugccaguucucccgccccagccccaucggcuaccuggggcugcucagccagcggacgcgcgacaucuacaucucccggcgccugcugggcaccuucaccuggacccucagcgacuccgagggcaacgagacgcccgggggcuacugccugacccgguggaugcugaucgaggccgagcucaagugcuucgggaacaccgccgucgccaagugcaacgagaagcacgacgaggaguucugcgacaugcugcgccuguucgacuucaacaagcaggcgauccggcgccucaagaccccggcccagaugagcauccagcugaucaacaaggccgugaacgcccugaucaacgaccagcucaucaugaagaaccaccuccgggacaucaugugcauccccuacugcaacuacuccaaguacugguaccugaaccacacggugaccggcaagaccagccugccccgcugcuggcuggucuccaacgggagcuaccugaacgagacccacuucuccgacgacaucgagcagcaggccgacaacaugaucacggagaugcuccagaaggaguacauggaccggcagggcaagaccccgcugggccugguggaccuguucguguucagcaccuccuucuaccucaucagcaucuuccugcaccuggucaagauccccacccaccgccacgugaucgggaagcccugccccaagccgcaccggcucaaccacaugggcaucugcuccugcgggcuguacaagcaccccggcgugcccgucaaguggaagcgcugaggacuagucccuguucccagagcccacuuuuuuuucuuuuuuugaaauaaaauagccugucuuucagaucucaaaggcucuuuucagagccaccaaaaaaaaaaaaaaaaaaaaaaaaaaaaaaaaaaaaaaaaaaaaaaaaaaaaaaaaaaaaaaaaaaaaaaaaaaaaaaaaaaaaaaaaaaaaaaaaaaaaa

SEQ ID NO: 28375 - RNA, 1745 nt, Artificial Sequence
  mRNA product Design a-1 (hSL-A100) comprising derived and/or modified sequence from LASV(LASV237-NIG-2010;Clade II)__AIT17638__GPCmut5 (opt1)
aggagagucccgcagucggcguccagcggcucugcuuguucgugugugugucguugcaggccuuauucaagcuuaccaugggccagaucaucaccuucuuccaggaggugccccacgucaucgaggaggugaugaacaucgugcugaucgcccucagccugcuggccauccucaaggggaucuacaacgucgcgaccugcggccuguucgggcugguguccuuccuccugcugugcggccgcagcugcuccacgaccuacaaggggguguacgagcuccagacccuggagcuggacauggccagccucaacaugaccaugccgcuguccugcacgaagaacaacagccaccacuacaucauggucggcaacgagaccggccuggagcucacccugaccaacacguccaucaucaaccacaaguucugcaaccugagcgacgcccacaagaaggaccucuacgaccacgcccugauguccaucaucagcaccuuccaccuguccauccccaacuucaaccaguacgaggccaugagcugcgacuucaacgggggcaagaucuccgugcaguacaaccucagccacaccuacgcgguggacgccgccaaccacugcgggaccaucgccaacggcguccugcagacguucaugcggauggcguggggcggguccuacaucgcccuggacagcggcugcggguccugggacugcaucaugaccagcuaccaguaccucaucauccagaacaccaccugggaggaccacugccaguucucccgccccagccccaucggcuaccuggggcugcucagccagcggacgcgcgacaucuacaucucccggcgccugcugggcaccuucaccuggacccucagcgacuccgagggcaacgagacgcccgggggcuacugccugacccgguggaugcugaucgaggccgagcucaagugcuucgggaacaccgccguggccaagugcaacgagaagcacgacgaggaguucugcgacaugcugcgccuguucgacuucaacaagcaggcgauccggcgccucaagaccccggcccagaugagcauccagcugaucaacaaggccgugaacgcccugaucaacgaccagcucaucaugaagaaccaccuccgggacaucaugugcauccccuacugcaacuacuccaaguacugguaccugaaccacacggucaccggcaagaccagccugccccgcugcuggcugguguccaacgggagcuaccugaacgagacccacuucuccgacgacaucgagcagcaggccgacaacaugaucacggagcuccugcagaaggaguacauggaccggcagggcaagaccccgcugggccugguggaccucuucgucuucagcaccuccuucuaccugaucagcaucuuccugcaccucaucaagauccccacccaccgccacaucacggggaagcccugccccaagccgcaccggcugaaccacaugggcaucugcuccugcgggcuguacaagcaccccggcgugcccgugaaguggaagcgcugaggacuagucccuguucccagagcccacuuuuuuuucuuuuuuugaaauaaaauagccugucuuucagaucucaaaggcucuuuucagagccaccaaaaaaaaaaaaaaaaaaaaaaaaaaaaaaaaaaaaaaaaaaaaaaaaaaaaaaaaaaaaaaaaaaaaaaaaaaaaaaaaaaaaaaaaaaaaaaaaaaaaa

SEQ ID NO: 28376 - RNA, 1745 nt, Artificial Sequence
  mRNA product Design a-1 (hSL-A100) comprising derived and/or modified sequence from LASV(LASV253-NIG-2011;Clade II)__AIT17670__GPCmut5 (opt1)
aggagagucccgcagucggcguccagcggcucugcuuguucgugugugugucguugcaggccuuauucaagcuuaccaugggccagaucaucaccuucuuccaggaggugccccacgucaucgaggaggugaugaacaucgugcugaucgcccucagccugcuggccauccucaaggggaucuacaacgucgcgaccugcggccuguucgggcugguguccuuccuccugcugugcggccgcagcugcuccacgaccuacaaggggguguacgagcuccagacccuggagcuggacauggccagccucaacaugaccaugccgcuguccugcacgaagaacaacagccaccacuacaucauggucggcaacgagaccggccuggagcucacccugaccaacacguccaucaucaaccacaaguucugcaaccugagcgacgcccacaagaagaaccucuacgaccacgcccugauguccaucaucagcaccuuccaccuguccauccccaacuucaaccaguacgaggccaugagcugcgacuucaacgggggcaagaucuccgugcaguacaaccucagccacaccuacgcgguggacgccgccaaccacugcgggaccaucgccaacggcguccugcagacguucaugcggauggcguggggcggguccuacaucgcccuggacagcggcugcggguccugggacugcaucaugaccagcuaccaguaccucaucauccagaacaccaccugggaggaccacugccaguucucccgccccagccccaucggcuaccuggggcugcucagccagcggacgcgcgacaucuacaucucccggcgccugcugggcaccuucaccuggacccucagcgacuccgagggcaacgagacgcccgggggcuacugccugacccgguggaugcugaucgaggccgagcucaagugcuucgggaacaccgccguggccaagugcaacgagaagcacgacgaggaguucugcgacaugcugcgccuguucgacuucaacaagcaggcgauccggcgccucaaggccccggcccagaugagcauccagcugaucaacaaggccgugaacgcccugaucaacgaccagcucaucaugaagaaccaccuccgggacaucaugugcauccccuacugcaacuacuccaaguacugguaccugaaccacaccgucacgggccgcaccagccugccccggugcuggcugguguccaacgggagcuaccugaacgagacccacuucuccgacgacaucgagcagcaggcggacaacaugaucaccgagcuccugcagaaggaguacaucgaccgccagggcaagacgccgcugggccugguggaccucuucgucuucagcaccuccuucuaccugaucagcaucuuccugcaccucgugaagauccccacccaccggcacaucaucgggaagcccugccccaagccgcaccgccugaaccacaugggcaucugcuccugcgggcuguacaagcaccccggcgugcccgucaaguggaagcggugaggacuagucccuguucccagagcccacuuuuuuuucuuuuuuugaaauaaaauagccugucuuucagaucucaaaggcucuuuucagagccaccaaaaaaaaaaaaaaaaaaaaaaaaaaaaaaaaaaaaaaaaaaaaaaaaaaaaaaaaaaaaaaaaaaaaaaaaaaaaaaaaaaaaaaaaaaaaaaaaaaaaa

SEQ ID NO: 28377 - RNA, 1745 nt, Artificial Sequence
  mRNA product Design a-1 (hSL-A100) comprising derived and/or modified sequence from LASV(LASV254-NIG-2011;Clade II)__AIT17674__GPCmut5 (opt1)
aggagagucccgcagucggcguccagcggcucugcuuguucgugugugugucguugcaggccuuauucaagcuuaccaugggccagaucaucaccuucuuccaggaggugccccacgucaucgaggaggugaugaacaucgugcugaucgcccucagccugcuggccauccucaaggggaucuacaacgucgcgaccugcggccuguucgggcugguguccuuccuccugcugugcggccgcagcugcuccacgaccuacaaggggguguacgagcuccagacccuggagcuggacaugaccaaccucaacaugacgaugccgcugagcugcaccaagaacaacucccaccacuacaucauggucggcaacgagaccggccuggagcucacccugacgaacaccagcaucaucaaccacaaguucugcaaccuguccgacgcccacaagaagaaccucuacaaccacgcccugaugagcaucaucuccaccuuccaccugagcauccccaacuucaaccaguacgaggccauguccugcgacuucaacgggggcaagaucagcgugcaguacaaccucucccacagcuacgccguggacgcggccaaccacugcgggaccaucgccaacggcguccugcagacguucaugcggauggccuggggcggguccuacaucgcgcuggacagcggcugcgggaacugggacugcaucaugaccuccuaccaguaccucaucauccagaacaccaccugggaggaccacugccaguucagccgccccucccccaucggcuaccuggggcugcucagccagcggacgcgcgacaucuacaucagccggcgccugcugggcaccuucaccuggacccucuccgacagcgagggcaacgagacgcccgggggcuacugccugacccgguggaugcugaucgaggccgagcucaagugcuucgggaacaccgccguggccaagugcaacgagaagcacgacgaggaguucugcgacaugcugcgccuguucgacuucaacaagcaggccauccggcgccucaagaccccggcgcaggccaacauccagcugaucaacaaggccgugaacgcccugaucaacgaccagcucaucaugaagaaccaccuccgggacaucaugugcauccccuacugcaacuacuccaaguacugguaccugaaccacacggucaccggcaagaccagccugccccgcugcuggcugguguccaacgggagcuaccugaacgagacccacuucuccgacgacaucgagcagcaggccgacaacaugaucacggagcuccugcagaaggaguacauggaccggcagggcaagaccccgcugggccugguggaccucuucgucuucagcaccuccuucuaccugaucagcaucuuccugcaccucgugaagauccccacccaccgccacgugaucgggaagcccugccccaagccgcaccggcugaaccacaugggcaucugcuccugcgggcuguacaagcaccccggcguccccgugaaguggaagcgcugaggacuagucccuguucccagagcccacuuuuuuuucuuuuuuugaaauaaaauagccugucuuucagaucucaaaggcucuuuucagagccaccaaaaaaaaaaaaaaaaaaaaaaaaaaaaaaaaaaaaaaaaaaaaaaaaaaaaaaaaaaaaaaaaaaaaaaaaaaaaaaaaaaaaaaaaaaaaaaaaaaaaa

SEQ ID NO: 28378 - RNA, 1745 nt, Artificial Sequence
  mRNA product Design a-1 (hSL-A100) comprising derived and/or modified sequence from LASV(Nig08-A19;Clade III)__ADU56618__GPCmut5 (opt1)
aggagagucccgcagucggcguccagcggcucugcuuguucgugugugugucguugcaggccuuauucaagcuuaccaugggccagaucgugaccuucuuccaggaggucccccacgugaucgaggaggugaugaacaucguccugaucgcccucagcauccuggccauccugaaggggcucuacaacaucgcgaccugcggccugaucgggcuggugacguuccuccugcuguccggccgcagcugcuccaugaccuacaaggggguguacgagcuccagacccuggagcugaacaugaacacccucaacaugacgaugccgcugagcugcaccaagaacaacucccaccacuacaucauggucggcaacgagaccggccuggagcucacccugacgaacaccagccugcuccaccacaaguucugcaaccuguccgacgcccacaagaagaaccuguacgaccacacccucaugagcaucaucuccaccuuccaccugagcauccccaacuucaaccaguacgaggccauguccugcgacuucaacgggggcaagaucacggugcaguacaaccugagccacuccuacgccaucgacgccgcgaaccacugcgggaccguggccaacggcguccuccagaccuucaugcggauggccuggggcgggagcuacaucgcccuggacuccggcugcgggaagugggacugcaucaugaccagcuaccaguaccugaucauccagaacacgaccugggaggaccacugccaguucucccgccccagccccaucggcuaccucgggcugcugucccagcggacccgcgacaucuacaucagccggcgccuccugggcaccuucacguggacccugagcgacuccgagggcaacgagacccccgggggcuacugccucacccgguggaugcugaucgaggcggagcugaagugcuucgggaacacggccguggccaagugcaacgagaagcacgacgaggaguucugcgacaugcuccgccuguucgacuucaacaagcaggccauccggcgccugaaggccccggcgcagaugagcauccagcucaucaacaaggccgugaacgcccugaucaacgaccagcugaucaugaagaaccaccuccgggacaucaugugcauccccuacugcaacuacuccaaguacugguaccugaaccacaccagcaccggccgcaccucccugccccggugcuggcucgucagcaacggguccuaccugaacgagacgcacuucagcgacgacaucgagcagcaggccgacaacaugaucaccgagaugcugcagaaggaguaccuggaccgccagggcaagaccccgcucggccugguggaccuguucguguucuccaccagcuucuaccucaucuccaucuuccugcaccuggucaagauccccacgcaccggcacaucguggggaagcccugccccaagccgcaccgccucaaccacaugggcaucugcagcugcgggcuguacaagcagcccggcgugcccguccgguggaagcgcugaggacuagucccuguucccagagcccacuuuuuuuucuuuuuuugaaauaaaauagccugucuuucagaucucaaaggcucuuuucagagccaccaaaaaaaaaaaaaaaaaaaaaaaaaaaaaaaaaaaaaaaaaaaaaaaaaaaaaaaaaaaaaaaaaaaaaaaaaaaaaaaaaaaaaaaaaaaaaaaaaaaaa

SEQ ID NO: 28379 - RNA, 1748 nt, Artificial Sequence
  mRNA product Design a-1 (hSL-A100) comprising derived and/or modified sequence from LASV(G1180-SLE-2010;Clade IV)__AIT17168__GPCmut5 (opt1)
aggagagucccgcagucggcguccagcggcucugcuuguucgugugugugucguugcaggccuuauucaagcuuaccaugggccagaucgugaccuucuuccaggaggucccccacgugaucgaggaggugaugaacaucguccugaucgcccucagcauccuggccgugcugaaggggcucuacaacuucgcgaccugcggccugguggggcugcucacguuccugcugcucugcggccgcuccugcaccgccagccgguacaagggggucuacgagcugcagacccuggagcucaacauggagacccugaacaugacgaugccgcuguccugcaccaagaacaacagccaccacuacaucauggugggcaacgagaccggccucgagcugacccugacgaacaccuccaucaucaaccacaaguucugcaaccucagcgacgcccacaagaagaaccuguacgaccacgcccugauguccaucaucagcaccuuccaccucuccauccccaacuucaaccaguacgaggccaugagcugcgacuucaacgggggcaagaucuccgugcaguacaaccugagccacuccuacgcgggggacgccgccaaccacugcggcaccgucgccaacggggugcugcagacguucaugcgcauggcguggggcggcagcuacaucgcccucgacuccgggugcggcagcugggacugcaucaugaccuccuaccaguaccugaucauccagaacaccaccugggaggaccacugccaguucagccggcccucccccaucggguaccugggccuccugagccagcgcacgcgggacaucuacaucagccgccggcugcucggcaccuucaccuggacccuguccgacagcgaggggaaggacacgccgggcggguacugccugacccgcuggaugcucaucgaggccgagcugaagugcuucggcaacaccgccguggccaagugcaacgagaagcacgacgaggaguucugcgacaugcugcggcuguucgacuucaacaagcaggcgauccagcgccugaaggcccccgcccagauguccauccagcugaucaacaaggccgucaacgcccucaucaacgaccagcugaucaugaagaaccaccuccgggacaucaugugcauccccuacugcaacuacagcaaguacugguaccucaaccacaccacgaccgggaagaccucccugcccaagugcuggcuggugagcaacggcuccuaccucaacgagacccacuucagcgacgacaucgagcagcaggcggacaacaugaucacggagaugcugcagaaggaguacauggagcgccagggcaagaccccgcuggggcugguggaccucuucgucuucuccaccagcuucuaccugaucuccaucuuccugcaccucgugaagauccccacccaccggcacaucgugggcaagagcugccccaagccccaccgccugaaccacauggggaucugcuccugcggccuguacaagcagccggggguccccgugaaguggaagcggugaggacuagucccuguucccagagcccacuuuuuuuucuuuuuuugaaauaaaauagccugucuuucagaucucaaaggcucuuuucagagccaccaaaaaaaaaaaaaaaaaaaaaaaaaaaaaaaaaaaaaaaaaaaaaaaaaaaaaaaaaaaaaaaaaaaaaaaaaaaaaaaaaaaaaaaaaaaaaaaaaaaaa

SEQ ID NO: 28380 - RNA, 1748 nt, Artificial Sequence
  mRNA product Design a-1 (hSL-A100) comprising derived and/or modified sequence from LASV(G1442-SLE-2011;Clade IV)__AIT17180__GPCmut5 (opt1)
aggagagucccgcagucggcguccagcggcucugcuuguucgugugugugucguugcaggccuuauucaagcuuaccaugggccagaucgugaccuucuuccaggaggucccccacgugaucgaggaggugaugaacaucguccugaucgcccucagcauccuggccgugcugaaggggcucuacaacguggcgaccugcggccugaucgggcuggucacguuccuccugcugugcggccgcuccugcaccaccacccucuacaaggggguguacgagcugcagacgcuggagcucaacauggagacccugaacaugaccaugccgcugagcugcaccaagaacaacucccaccacuacauccgggugggcaacgagacgggccucgagcugacccugaccaacaccagcaucaucaaccacaaguucugcaaccucuccgacgcccacaagaagaaccuguacgaccacgcccugaugagcaucaucuccacguuccaccucagcauccccaacuucaaccaguacgaggccauguccugcgacuucaacgggggcaagaucagcguccaguacaaccugucccacagcuacgccggggacgcggccaaccacugcggcaccguggccaacggggugcugcagaccuucaugcgcauggccuggggcggcuccuacaucgcgcucgacagcgggugcggcaacugggacugcaucaugaccuccuaccaguaccugaucauccagaacacgaccugggacgaccacugccaguucagccggcccucccccaucggguaccugggccuccugagccagcgcacccgggacgucuacaucucccgccggcugcucggcaccuucacguggacccugagcgacagcgaggggaaggacaccccgggcggguacugccugacccgcuggaugcucaucgaggccgagcugaagugcuucggcaacacggccguggccaagugcaacgagaagcacgacgaggaguucugcgacaugcugcggcuguucgacuucaacaagcaggccauccagcgccugaaggcgcccgcccagauguccauccagcugaucaacaaggccgugaacgcccucaucaacgaccagcugaucaugaagaaccaccuccgggacaucaugugcauccccuacugcaacuacagcaaguacugguaccucaacaacaccgccaccgggaagaccucccugcccaagugcuggcugaucagcaacggcuccuaccucaacgagacgcacuucagcgacgacaucgagcaggaggcggacaacaugaucaccgagaugcugcagaaggaguacauggagcgccagggcaagaccccgcuggggcuggucgaccucuucguguucuccaccagcuucuaccugaucuccaucuuccugcaccucgugaagauccccacgcaccggcacaucgucggcaagagcugccccaagccccaccgccugaaccacauggggaucugcuccugcggccuguacaagcagccgggggugcccgugcgguggaagcgcugaggacuagucccuguucccagagcccacuuuuuuuucuuuuuuugaaauaaaauagccugucuuucagaucucaaaggcucuuuucagagccaccaaaaaaaaaaaaaaaaaaaaaaaaaaaaaaaaaaaaaaaaaaaaaaaaaaaaaaaaaaaaaaaaaaaaaaaaaaaaaaaaaaaaaaaaaaaaaaaaaaaaa

SEQ ID NO: 28381 - RNA, 1748 nt, Artificial Sequence
  mRNA product Design a-1 (hSL-A100) comprising derived and/or modified sequence from LASV(G3010-SLE-2013;Clade IV)__AIT17344__GPCmut5 (opt1)
aggagagucccgcagucggcguccagcggcucugcuuguucgugugugugucguugcaggccuuauucaagcuuaccaugggccagaucgugaccuucuuccaggaggucccccacgugaucgaggaggugaugaacaucguccugaucgcccucagcauccuggccgugcugaaggggcucuacaacuucgcgaccugcggccugguggggcuggucacguuccuccugcugugcggccgcuccugcaccaccagccucuacaaggggguguacgagcugcagacccuggagcucaacauggagacgcugaacaugaccaugccgcuguccugcaccaagaacaacagccaccacuacaucauggugggcaacgagaccggccucgagcugacgcugaccaacaccuccaucaucaaccacaaguucugcaaccucagcgacgcccacaagaagaaccuguacaaccacgcccugauguccaucaucagcaccuuccaccucuccauccccaacuucaaccaguacgaggccaugagcugcgacuucaacgggggcaagaucuccguccaguacaaccugagccacuccuacgccggggacgcggccagccacugcggcacgguggccaacggggugcugcagaccuucaugcggauggccuggggcggcuccuacaucgcgcucgacagcgggugcggcaagugggacugcaucaugaccuccuaccaguaccugaucauccagaacaccacgugggaggaccacugccaguucagccgccccucccccaucggguaccugggccuccugagccagcggacccgcgacaucuacaucagccggcgccugcucggcaccuucaccuggacgcuguccgacagcgaggggaaggacaccccgggcggguacugccugacccgguggaugcucaucgaggccgagcugaagugcuucggcaacaccgccgucgccaagugcaacgagaagcacgacgaggaguucugcgacaugcugcgccucuucgacuucaacaagcaggccauccagcggcugaagacgcccgcgcagauguccauccagcugaucaacaaggccgugaacgcccucaucaacgaccagcugaucaugaagaaccaccuccgcgacaucaugugcauccccuacugcaacuacagcaaguacugguaccugaaccacaccaccaccgggaagacgucccugcccaagugcuggcuggugagcaacggcuccuaccucaacgagacccacuucagcgacgacaucgagcagcaggccgacaacaugaucaccgagaugcugcagaaggaguacauggagcggcagggcaagaccccgcuggggcuggucgaccucuucguguucuccacgagcuucuaccugaucuccaucuuccugcaccucgugaagauccccacccaccgccacaucgucggcaagagcugccccaagccccaccggcugaaccacauggggaucugcuccugcggccuguacaagcagccgggggugcccgugcgcuggaagcggugaggacuagucccuguucccagagcccacuuuuuuuucuuuuuuugaaauaaaauagccugucuuucagaucucaaaggcucuuuucagagccaccaaaaaaaaaaaaaaaaaaaaaaaaaaaaaaaaaaaaaaaaaaaaaaaaaaaaaaaaaaaaaaaaaaaaaaaaaaaaaaaaaaaaaaaaaaaaaaaaaaaaa

SEQ ID NO: 28382 - RNA, 1748 nt, Artificial Sequence
  mRNA product Design a-1 (hSL-A100) comprising derived and/or modified sequence from LASV(G502-SLE-2009;Clade IV)__AIT17126__GPCmut5 (opt1)
aggagagucccgcagucggcguccagcggcucugcuuguucgugugugugucguugcaggccuuauucaagcuuaccaugggccagaucgugaccuucuuccaggaggucccccacgugaucgaggaggugaugaacaucguccugaucgcccucagcauccuggccgugcugaaggggcucuacaacuucgcgaccugcggccugguggggcugcucacguuccugcugcucugcggccgcuccugcaccaccgggcuguacaagggcgucuacgagcugcagacccucgagcugaacauggagacgcugaacaugaccaugccgcucagcugcaccaagaacaacucccaccacuacaucauggugggcaacgagaccgggcuggagcugacgcucaccaacaccagcaucaucaaccacaaguucugcaaccuguccgacgcccacaagaagaaccuguacgaccacgcccucaugagcaucaucuccaccuuccaccugagcauccccaacuucaaccaguacgaggccauguccugcgacuucaacggcgggaagaucagcgugcaguacaaccugucccacagcuacgccggcgacgcggccgaccacugcgggacggucgccaacggcgugcuccagaccuucaugcggauggccuggggcggguccuacaucgcgcuggacagcggcugcgggcgcugggacugcaucaugaccuccuaccaguaccugaucauccagaacaccacgugggaggaccacugccaguucagccggcccucccccaucggcuaccucggccugcugagccagcgcacccgggacaucuacaucucccgccggcuccuggggaccuucaccuggacgcugagcgacagcgagggcaaggacacccccgggggcuacugccucacccgcuggaugcugaucgaggccgagcugaagugcuucgggaacaccgccguggccaagugcaacgagaagcacgacgaggaguucugcgacaugcuccggcuguucgacuucaacaagcaggccauccagcgccugaaggcgccggcccagauguccauccagcucaucaacaaggccgucaacgcccugaucaacgaccagcuggugaugaagaaccaccuccgggacaucaugugcauccccuacugcaacuacagccgcuacugguaccugaaccacacgaccaccggccggaccucccugcccaagugcuggcucgugagcaacggcuccuaccugaacgagacgcacuucagcgacgacaucgagcagcaggccgacaacaugaucaccgagaugcugcagaaggaguacauggagcgccaggggaagaccccgcugggccucgucgaccuguucguguucuccaccagcuucuaccugaucuccaucuuccuccaccuggugaagauccccacgcaccggcacaucgucggcaagagcugccccaagccccaccgccugaaccacauggggaucugcuccugcgggcucuacaagcagccgggcgugcccgugaaguggaagcggugaggacuagucccuguucccagagcccacuuuuuuuucuuuuuuugaaauaaaauagccugucuuucagaucucaaaggcucuuuucagagccaccaaaaaaaaaaaaaaaaaaaaaaaaaaaaaaaaaaaaaaaaaaaaaaaaaaaaaaaaaaaaaaaaaaaaaaaaaaaaaaaaaaaaaaaaaaaaaaaaaaaaa

SEQ ID NO: 28383 - RNA, 1748 nt, Artificial Sequence
  mRNA product Design a-1 (hSL-A100) comprising derived and/or modified sequence from LASV(G733-SLE-2010;Clade IV)__AIT17154__GPCmut5 (opt1)
aggagagucccgcagucggcguccagcggcucugcuuguucgugugugugucguugcaggccuuauucaagcuuaccaugggccagaucgugaccuucuuccaggaggucccccacgugaucgaggaggugaugaacaucguccugaucgcccucagcauccuggccgugcugaaggggcucuacaacuucgcgaccugcggcaucguggggcuggucuccuuccugcuccugugcggccgcagcugcacgaccucccuguacaaggggguguacgagcuccagacccuggagcugaacauggagacccucaacaugacgaugccgcugagcugcaccaagaacaacucccaccacuacaucauggugggcaacgagaccggccuggagcucacccugacgaacaccagcaucaucaaccacaaguucugcaaccuguccgacgcccacaagaagaaccucuacgaccacgcccugaugagcaucaucuccaccuuccaccugagcauccccaacuucaaccaguacgaggccauguccugcgacuucaacgggggcaagaucagcguccaguacaaccucucccacagcuacgccggggacgcggccaaccacugcggcaccaucgccaacggggugcugcagacguucaugcggauggccuggggcggcuccuacaucgcgcuggacagcgggugcgaccgcugggacugcaucaugaccuccuaccaguaccucaucauccagaacaccaccugggaggaccacugccaguucagccggcccucccccaucggcuaccuggggcugcucagccagcgcacgcgggacaucuacaucagccgccggcugcugggcaccuucaccuggacccucuccgacagcgagggcaaggacacgcccgggggcuacugccugacccgcuggaugcugaucgaggccgagcucaagugcuucgggaacaccgccguggccaagugcaacgagaagcacgacgaggaguucugcgacaugcugcggcuguucgacuucaacaagcaggccauccagcgccucaaggcgccggcccagauguccauccagcugaucaacaaggccgucaacgcccugaucaacgaccagcucaucaugaagaaccaccuccgggacaucaugugcauccccuacugcaacuacagcaaguacugguaccugaaccacaccacgaccggcaagaccucccugcccaagugcuggcuggugagcaacggguccuaccugaacgagacccacuucagcgacgacaucgagcagcaggccgacaacaugaucacggagaugcuccagaaggaguacauggagcgccagggcaagaccccgcugggccugguggaccuguucgucuucuccaccagcuucuaccucaucuccaucuuccugcaccuggugaagauccccacccaccggcacguggucggcaagagcugccccaagccccaccgccucaaccacauggggaucugcuccugcgggcuguacggccagccgggggugcccgugaaguggaagcggugaggacuagucccuguucccagagcccacuuuuuuuucuuuuuuugaaauaaaauagccugucuuucagaucucaaaggcucuuuucagagccaccaaaaaaaaaaaaaaaaaaaaaaaaaaaaaaaaaaaaaaaaaaaaaaaaaaaaaaaaaaaaaaaaaaaaaaaaaaaaaaaaaaaaaaaaaaaaaaaaaaaaa

SEQ ID NO: 28384 - RNA, 1748 nt, Artificial Sequence
  mRNA product Design a-1 (hSL-A100) comprising derived and/or modified sequence from MOPV/LASV reassortant(IGS-1;Clade IV)__AFY05576__GPCmut5 (opt1)
aggagagucccgcagucggcguccagcggcucugcuuguucgugugugugucguugcaggccuuauucaagcuuaccaugggccagaucgugaccuucuuccaggaggucccccacgugaucgaggaggugaugaacaucguccugaucgcccucagcgugcuggccgugcugaaggggcucuacaacuucgcgaccugcggccuggucgggcuggugacguuccuccugcugugcggccgcuccugcaccaccagccucuacaaggggguguacgagcugcagacccuggagcucaacauggagacgcugaacaugaccaugccgcuguccugcaccaagaacaacagccaccacuacaucauggucggcaacgagaccggccucgagcugacgcugaccaacaccuccaucaucaaccacaaguucugcaaccucagcgacgcccacaagaagaaccuguacgaccacgcccugauguccaucaucagcaccuuccaccucuccauccccaacuucaaccaguacgaggccaugagcugcgacuucaacgggggcaagaucuccgugcaguacaaccugagccacuccuacgccggggacgcggccaaccacugcggcacgguggccaacgggguccugcagaccuucaugcggauggccuggggcggcagcuacaucgcgcucgacuccgggugcggcaacugggacugcaucaugaccagcuaccaguaccugaucauccagaacaccacgugggaggaccacugccaguucucccgccccagccccaucggguaccugggccuccugucccagcggacccgcgacaucuacaucagccggcgccugcucggcaccuucaccuggacgcugagcgacuccgagggggaggacaccccgggcggguacugccugacccgguggaugcucaucgaggccgagcugaagugcuucggcaacaccgccguggccaagugcaacgagaagcacgacgaggaguucugcgacaugcugcgccucuucgacuucaacaagcaggccauccagcggcugaaggcgcccgcccagaugagcauccagcugaucaacaaggccgugaacgcccucaucaacgaccagcugaucaugaagaaccaccuccgcgacaucaugugcauccccuacugcaacuacuccaaguacugguaccugaaccacacgaccaccgggcggaccagccugcccaagugcuggcuggucuccaacggcagcuaccucaacgagacgcacuucuccgacgacaucgagcagcaggccgacaacaugaucaccgagaugcugcagaaggaguacauggagcgccagggcaagaccccgcuggggcugguggaccucuucguguucagcaccuccuucuaccugaucagcaucuuccugcaccucgucaagauccccacgcaccggcacaucgugggcaaguccugccccaagccccaccgccugaaccacauggggaucugcagcugcggccuguacaagcagccgggggugcccgucaaguggaagcggugaggacuagucccuguucccagagcccacuuuuuuuucuuuuuuugaaauaaaauagccugucuuucagaucucaaaggcucuuuucagagccaccaaaaaaaaaaaaaaaaaaaaaaaaaaaaaaaaaaaaaaaaaaaaaaaaaaaaaaaaaaaaaaaaaaaaaaaaaaaaaaaaaaaaaaaaaaaaaaaaaaaaa

SEQ ID NO: 28385 - RNA, 1748 nt, Artificial Sequence
  mRNA product Design a-1 (hSL-A100) comprising derived and/or modified sequence from LASV(LM765-SLE-2012;Clade IV)__AIT17814__GPCmut5 (opt1)
aggagagucccgcagucggcguccagcggcucugcuuguucgugugugugucguugcaggccuuauucaagcuuaccaugggccagaucgugaccuucuuccaggaggucccccacgugaucgaggaggugaugaacaucguccugaucgcccucagcauccuggccgugcugaaggggcucuacaacuucgcgaccugcggccugguggggcuggucacguuccuccugcugugcggccgcuccugcaccaccagccucuacaaggggguguacgagcugcagacccuggagcucaacauggagacgcugaacaugaccaugccgcuguccugcaccaagaacaacagccaccacuacaucauggugggcaacgagaccggccucgagcugacgcugaccaacaccuccaucaucgaccacaaguucugcaaccucagcgacgcccaccggaagaaccuguacgaccacgcccugauguccaucaucagcaccuuccaccucuccauccccaacuucaaccaguacgaggccaugagcugcgacuucaacgggggcaagaucuccguccaguacaaccugagccacuccuacgccaaggacgcggccgaccacugcgggacgguggccaacggcgugcugcagaccuucaugcgcauggccuggggcgggagcuacaucgcgcucgacuccggcugcgggcggugggacugcaucaugaccagcuaccaguaccugaucauccagaacaccacgugggaggaccacugccaguucucccgccccagccccaucggcuaccuggggcuccugucccagcggacccgcgacaucuacaucagccggcgccugcucggcaccuucaccuggacgcugagcgacuccgagggcaaggacacccccgggggcuacugccugacccgguggaugcucaucgaggccgagcugaagugcuucgggaacaccgccgucgccaagugcaacgagaagcacgacgaggaguucugcgacaugcugcgccucuucgacuucaacaagcaggccauccagcggcugaaggcgccggcccagaugagcauccagcugaucaacaaggccgugaacgcccucaucaacgaccagcugaucaugaagaaccaccuccgcgacaucaugugcauccccuacugcaacuacuccaaguacugguaccugaaccacacgaccaccggcaagaccagccugcccaagugcuggcugguguccaacgggagcuaccucaacgagacgcacuucuccgacgacaucgagcagcaggccgacaacaugaucaccgagaugcugcagaaggaguacauggagcggcagggcaagaccccgcugggccuggucgaccucuucguguucagcaccuccuucuaccugaucagcaucuuccugcaccucgugaagauccccacgcaccgccacaucgucgggaagcccugccccaagccgcaccggcugaaccacaugggcaucugcuccugcgggcuguacaagcagcccggcgugcccgugaaguggaagcgcugaggacuagucccuguucccagagcccacuuuuuuuucuuuuuuugaaauaaaauagccugucuuucagaucucaaaggcucuuuucagagccaccaaaaaaaaaaaaaaaaaaaaaaaaaaaaaaaaaaaaaaaaaaaaaaaaaaaaaaaaaaaaaaaaaaaaaaaaaaaaaaaaaaaaaaaaaaaaaaaaaaaaa

SEQ ID NO: 28386 - RNA, 1748 nt, Artificial Sequence
  mRNA product Design a-1 (hSL-A100) comprising derived and/or modified sequence from LASV(LM776-SLE-2012;Clade IV)__AIT17824__GPCmut5 (opt1)
aggagagucccgcagucggcguccagcggcucugcuuguucgugugugugucguugcaggccuuauucaagcuuaccaugggccagaucgugaccuucuuccaggaggucccccacgugaucgaggaggugaugaacaucguccugaucgcccucagcauccuggccgugcugaaggggcucuacaacuucgcgaccugcggccugguggggcuggucacguuccuccugcugugcggccgcuccugcaccaccagcguguacaaggggguguacgagcuccagacccuggagcugaacauggagacgcucaacaugaccaugccgcuguccugcaccaagaacaacagccaccacuacaucauggucggcaacgagaccggccuggagcucacgcugaccaacaccuccaucaucaaccacaaguucugcaaccugagcgacgcccacaagaagaaccucuacgaccacgcccugauguccaucaucagcaccuuccaccuguccauccccaacuucaaccaguacgaggccaugagcugcgacuucaacgggggcaagaucuccgugcaguacaaccucagccacuccuacgccggggacgcggccaaccacugcggcacgguggccaacgggguccugcagaccuucaugcggauggccuggggcggcagcuacaucgcgcuggacuccgggugcggcaagugggacugcaucaugaccagcuaccaguaccucaucauccagaacaccacgugggaggaccacugccaguucucccgccccagccccaucggguaccugggccugcucucccagcggacccgcgacaucuacaucagccggcgccugcugggcaccuucaccuggacgcucagcgacuccgaggggaaggacaccccgggcggguacugccugacccgguggaugcugaucgaggccgagcucaagugcuucggcaacaccgccguggccaagugcaacgagaagcacgacgaggaguucugcgacaugcugcgccuguucgacuucaacaagcaggccauccagcggcucaaggcgcccgcccagaugagcauccagcugaucaacaaggccgugaacgcccugaucaacgaccagcucaucaugaagaaccaccuccgcgacaucaugugcauccccuacugcaacuacuccaaguacugguaccugaaccacacgaccaccgggaagaccagccugcccaagugcuggcuggucuccaacggcagcuaccugaacgagacgcacuucuccgacgacaucgagcagcaggccgacaacaugaucaccgagaugcuccagaaggaguacauggagcggcagggcaagaccccgcuggggcugguggaccuguucguguucagcaccuccuucuaccucaucagcaucuuccugcaccuggucaagauccccacgcaccgccacaucgugggcaaguccugccccaagccccaccggcucaaccacauggggaucugcagcugcggccuguacaagcagccgggggugcccguccgcuggaagcggugaggacuagucccuguucccagagcccacuuuuuuuucuuuuuuugaaauaaaauagccugucuuucagaucucaaaggcucuuuucagagccaccaaaaaaaaaaaaaaaaaaaaaaaaaaaaaaaaaaaaaaaaaaaaaaaaaaaaaaaaaaaaaaaaaaaaaaaaaaaaaaaaaaaaaaaaaaaaaaaaaaaaa

SEQ ID NO: 28387 - RNA, 1748 nt, Artificial Sequence
  mRNA product Design a-1 (hSL-A100) comprising derived and/or modified sequence from LASV(Mad39;Clade IV)__ANH09722__GPCmut5 (opt1)
aggagagucccgcagucggcguccagcggcucugcuuguucgugugugugucguugcaggccuuauucaagcuuaccaugggccagaucgugaccuucuuccaggaggucccccacgugaucgaggaggugaugaacaucguccugaucgcccucagcauccuggccgugcugaaggggcucuacaacguggcgaccugcggccugaucgggcuggucacguuccuccugcugugcggccgcuccugcaccaccacccucuacaaggggguguacgagcugcaggcccuggagcucaacauggagacgcugaacaugaccaugccgcugagcugcaccaagaacaacucccaccacuacauccgggugggcaacgagaccggccucgagcugacgcugaccaacaccagccucaucaaccacaaguucugcaaccuguccgacgcccacaagaagaaccuguacgaccacgcccucaugagcaucaucuccaccuuccaccugagcauccccaacuucaaccaguacgaggccauguccugcgacuucaacgacgggaagaucagcguccaguacaaccugucccacacguacgcgggcgacaccgccaaccacugcgggaccguggccaacggcgugcuccagaccuucaugcgcauggccuggggcgggagcuacaucgcgcuggacuccggcugcgggggcugggacugcaucaugacgagcuaccaguaccugaucauccagaacaccaccugggaggaccacugccaguucucccggcccagccccaucggguaccucggccugcugucccagcgcacccgggacaucuacaucagccgccggcuccugggcacguucaccuggacccuguccgacagcgaggggaaggacaccccgggcggguacugccucacgcgcuggaugcugaucgaggccgagcugaagugcuucggcaacaccgccgucgccaagugcaacgagaagcacgacgaggaguucugcgacaugcuccggcuguucgacuucaacaagcaggccauccagcgccugaaggcgcccgcccagaugagcauccagcucaucaacaaggccgugaacgcccugaucaacgaccagcugaucaugaagaaccaccuccgggacaucaugugcauccccuacugcaacuacuccaaguacugguaccugaaccacaccgugaccgggaagacgagccugcccaagugcuggcucgucuccaacggcagcuaccugaacgagacccacuucuccgacgacaucgagcagcaggccgacaacaugaucaccgagaugcugcagaaggaguacauggagcgccagggcaagaccccgcuggggcucguggaccuguucguguucagcacguccuucuaccugaucagcaucuuccuccaccuggucaagauccccacccaccggcacguggugggcaagcccugccccaagccgcaccgccugaaccacauggggaucugcuccugcggcuucuacaagcagcccgggguccccgugcgguggaagcgcugaggacuagucccuguucccagagcccacuuuuuuuucuuuuuuugaaauaaaauagccugucuuucagaucucaaaggcucuuuucagagccaccaaaaaaaaaaaaaaaaaaaaaaaaaaaaaaaaaaaaaaaaaaaaaaaaaaaaaaaaaaaaaaaaaaaaaaaaaaaaaaaaaaaaaaaaaaaaaaaaaaaaa

SEQ ID NO: 28388 - RNA, 1748 nt, Artificial Sequence
  mRNA product Design a-1 (hSL-A100) comprising derived and/or modified sequence from LASV(Z0947-SLE-2011;Clade IV)__AIT17840__GPCmut5 (opt1)
aggagagucccgcagucggcguccagcggcucugcuuguucgugugugugucguugcaggccuuauucaagcuuaccaugggccagaucgugaccuucuuccaggaggucccccacgugaucgaggaggugaugaacaucguccugaucgcccucagcauccuggccgugcugaaggggcucuacaacuucgcgaccugcggccugguggggcuggucacguuccuccugcugugcggccgcuccugcaccaucagccucuacaaggggguguacgagcugcagacccuggagcucaacauggagacccugaacaugacgaugccgcuguccugcaccaagaacaacagccaccacuacaucauggugggcaacgagaccggccucgagcugacccugacgaacaccuccaucaucaaccacaaguucugcaaccucagcgacgcccacaagaagaaccuguacgaccacgcccugauguccaucaucagcaccuuccaccucuccauccccaacuucaaccaguacgaggccaugagcugcgacuucaacgggggcaagaucuccguccaguacaaccugagccacuccuacgccggggacgcggccaaccacugcggcaccguggccaacggggugcugcagacguucaugcggauggccuggggcggcagcuacaucgcgcucgacuccgggugcgaccgcugggacugcaucaugaccagcuaccaguaccugaucauccagaacaccaccugggaggaccacugccaguucucccggcccagccccaucggcuaccuggggcuccugucccagcgcacgcgggacaucuacaucagccgccggcugcucggcaccuucaccuggacccugagcgacuccgagggcaaggacacgcccgggggcuacugccugacccgcuggaugcucaucgaggccgagcugaagugcuucgggaacaccgccgucgccaagugcaacgagaagcacgacgaggaguucugcgacaugcugcggcuguucgacuucaacaagcaggccauccagcgccugaaggcgccggcccagaugagcauccagcugaucaacaaggccgugaacgcccucaucaacgaccagcugaucaugaagaaccaccuccgggacaucaugugcauccccuacugcaacuacuccaaguacugguaccucaaccacaccacgaccggcaagaccagccugcccaagugcuggcugguguccaacgggagcuaccucaacgagacccacuucuccgacgacaucgagcagcaggccgacaacaugaucacggagaugcugcagaaggaguacauggagcgccagggcaagaccccgcugggccuggucgaccucuucguguucagcaccuccuucuaccugaucagcaucuuccugcaccucgugaagauccccacccaccggcacaucgucgggaagcccugccccaagccgcaccgccugaaccacaugggcaucugcuccugcgggcuguacaagcagcccggcgugcccgugaaguggaagcggugaggacuagucccuguucccagagcccacuuuuuuuucuuuuuuugaaauaaaauagccugucuuucagaucucaaaggcucuuuucagagccaccaaaaaaaaaaaaaaaaaaaaaaaaaaaaaaaaaaaaaaaaaaaaaaaaaaaaaaaaaaaaaaaaaaaaaaaaaaaaaaaaaaaaaaaaaaaaaaaaaaaaa

SEQ ID NO: 28389 - RNA, 1748 nt, Artificial Sequence
  mRNA product Design a-1 (hSL-A100) comprising derived and/or modified sequence from LASV(Josiah;Clade IV)__NP_694870__GPCmut5 (opt4)
aggagagucccgcagucggcguccagcggcucugcuuguucgugugugugucguugcaggccuuauucaagcuuaccaugggccagaucgugaccuucuuccaggaggugccccacgugaucgaggaggugaugaacaucgugcugaucgcccugagcgugcuggccgugcugaagggccuguacaacuucgccaccugcggccuggugggccuggugaccuuccugcugcugugcggcagaagcugcaccaccagccuguacaagggcguguacgagcugcagacccuggagcugaacauggagacccugaacaugaccaugccccugagcugcaccaagaacaacagccaccacuacaucauggugggcaacgagaccggccuggagcugacccugaccaacaccagcaucaucaaccacaaguucugcaaccugagcgacgcccacaagaagaaccuguacgaccacgcccugaugagcaucaucagcaccuuccaccugagcauccccaacuucaaccaguacgaggccaugagcugcgacuucaacggcggcaagaucagcgugcaguacaaccugagccacagcuacgccggcgacgccgccaaccacugcggcaccguggccaacggcgugcugcagaccuucaugagaauggccuggggcggcagcuacaucgcccuggacagcggcugcggcaacugggacugcaucaugaccagcuaccaguaccugaucauccagaacaccaccugggaggaccacugccaguucagcagacccagccccaucggcuaccugggccugcugagccagagaaccagagacaucuacaucagcagaagacugcugggcaccuucaccuggacccugagcgacagcgagggcaaggacacccccggcggcuacugccugaccagauggaugcugaucgaggccgagcugaagugcuucggcaacaccgccguggccaagugcaacgagaagcacgacgaggaguucugcgacaugcugagacuguucgacuucaacaagcaggccauccagagacugaaggcccccgcccagaugagcauccagcugaucaacaaggccgugaacgcccugaucaacgaccagcugaucaugaagaaccaccugagagacaucaugugcauccccuacugcaacuacagcaaguacugguaccugaaccacaccaccaccggcagaaccagccugcccaagugcuggcuggugagcaacggcagcuaccugaacgagacccacuucagcgacgacaucgagcagcaggccgacaacaugaucaccgagaugcugcagaaggaguacauggagagacagggcaagaccccccugggccugguggaccuguucguguucagcaccagcuucuaccugaucagcaucuuccugcaccuggugaagauccccacccacagacacaucgugggcaagagcugccccaagccccacagacugaaccacaugggcaucugcagcugcggccuguacaagcagcccggcgugcccgugaaguggaagagaugaggacuagucccuguucccagagcccacuuuuuuuucuuuuuuugaaauaaaauagccugucuuucagaucucaaaggcucuuuucagagccaccaaaaaaaaaaaaaaaaaaaaaaaaaaaaaaaaaaaaaaaaaaaaaaaaaaaaaaaaaaaaaaaaaaaaaaaaaaaaaaaaaaaaaaaaaaaaaaaaaaaaa

SEQ ID NO: 28390 - RNA, 1745 nt, Artificial Sequence
  mRNA product Design a-1 (hSL-A100) comprising derived and/or modified sequence from LASV(LP;Clade I)__AAF86701__GPCmut5 (opt4)
aggagagucccgcagucggcguccagcggcucugcuuguucgugugugugucguugcaggccuuauucaagcuuaccaugggccagaucaucaccuucuuccaggaggugccccacgugaucgaggaggugaugaacaucgugcugaucgcccugagccugcuggccauccugaagggccuguacaacaucgccaccugcggcaucaucggccugguggccuuccuguuccugugcggcaagagcugcagccugacccugaagggcggcuacgagcugcagacccuggagcugaacauggagacccugaacaugaccaugccccugagcugcaccaagaacagcagccaccacuacaucagagugggcaacgagaccggccuggagcugacccugaccaacaccagcaucaucaaccacaaguucugcaaccugagcgacgcccacaagaagaaccuguacgaccacgcccugaugagcaucaucagcaccuuccaccugagcauccccaacuucaaccaguacgaggccaugagcugcgacuucaacggcggcaagaucagcgugcaguacaaccugagccacagcuacgccggcgacgccgccgagcacugcggcaccguggccaacggcgugcugcagaccuucaugagaauggccuggggcggcagauacaucgcccuggacagcggcugcggcaacugggacugcaucaugaccagcuaccaguaccugaucauccagaacaccaccugggaggaccacugccaguucagcagacccagccccaucggcuaccugggccugcugagccagagaaccagagacaucuacaucagcagaagacugcugggcaccuucaccuggacccugagcgacagcgagggcaacgagacccccggcggcuacugccugaccagauggaugcugaucgaggccgagcugaagugcuucggcaacaccgccguggccaagugcaacgagaagcacgacgaggaguucugcgacaugcugagacuguucgacuucaacaagcaggccaucagaagacugaaggcccccgcccagaugagcauccagcugaucaacaaggccgugaacgcccugaucaacgaccagcugaucaugaagaaccaccugagagacaucaugugcauccccuacugcaacuacagcaaguacugguaccugaaccacaccagcagcggcagaaccagccugcccaagugcuggcugaucagcaacggcagcuaccugaacgagacccaguucagcgacgacaucgagcagcaggccgacaacaugaucaccgagaugcugcagaaggaguacaucgagagacagggcaagaccccccugggccugguggacaucuucaucuucagcaccagcuucuaccugaucagcaucuuccugcaccugaucaagauccccacccacagacacaucgugggcaagcccugccccaagccccacagacugaaccacaugggcgugugcagcugcggccuguacaagcaccccggcgugcccaccaaguggaagagaugaggacuagucccuguucccagagcccacuuuuuuuucuuuuuuugaaauaaaauagccugucuuucagaucucaaaggcucuuuucagagccaccaaaaaaaaaaaaaaaaaaaaaaaaaaaaaaaaaaaaaaaaaaaaaaaaaaaaaaaaaaaaaaaaaaaaaaaaaaaaaaaaaaaaaaaaaaaaaaaaaaaaa

SEQ ID NO: 28391 - RNA, 1745 nt, Artificial Sequence
  mRNA product Design a-1 (hSL-A100) comprising derived and/or modified sequence from LASV(803213;Clade II)__AAF86703__GPCmut5 (opt4)
aggagagucccgcagucggcguccagcggcucugcuuguucgugugugugucguugcaggccuuauucaagcuuaccaugggccagaucaucaccuucuuccaggaggugccccacgugaucgaggaggugaugaacaucgugcugaucgcccugagccugcuggccauccugaagggcaucuacaacguggccaccugcggccuguucggccugaucagcuuccugcugcugugcggcagaagcugcagcgugaccuacaagggcguguacgagcugcagacccuggagcugaacauggccaaccugaacaugaccaugccccugagcugcaccaagaacaacagccaccacuacaucauggugggcaacgagaccggccuggagcugacccugaccaacaccagcaucaucaaccacaaguucugcaaccugagcgacgcccacaagaagaaccuguacgaccacgcccugaugagcaucaucagcaccuuccaccugagcauccccaacuucaaccaguacgaggccaugagcugcgacuucaacggcggcaagaucagcgugcaguacaaccugagccacagcuucgccguggacgccgccaaccacugcggcaccaucgccaacggcgugcugcagaccuucaugagaauggccuggggcggcagcuacaucgcccuggacagcggcugcggcaacugggacugcaucaugaccagcuaccaguaccugaucauccagaacaccaccugggaggaccacugccaguucagcagacccagccccaucggcuaccugggccugcugagccagagaaccagagacaucuacaucagcagaagacugcugggcaccuucaccuggacccugagcgacagcgagggcaacgaggcccccggcggcuacugccugaccagauggaugcugaucgaggccgagcugaagugcuucggcaacaccgccguggccaagugcaacgagaagcacgacgaggaguucugcgacaugcugagacuguucgacuucaacaagcaggccaucaagagacugaagacccccgcccagaugagcauccagcugaucaacaaggccgugaacgcccugaucaacgaccagcugaucaugaagaaccaccugagagacaucaugugcauccccuacugcaacuacagcagauacugguaccugaaccacaccgugaccggcaagaccagccugcccagaugcuggcuggugagcaacggcagcuaccugaacgagacccacuucagcgacgacaucgagcagcaggccgacaacaugaucaccgagaugcugcagaaggaguacauggacagacagggcaagaccccccugggccugguggaccuguucguguucagcaccagcuucuaccugaucagcaucuuccugcaccuggugaagauccccacccacagacacaucgugggcaagcccugccccaagccccacagacugaaccacaugggcaucugcagcugcggccuguacaagcaccccggcgugcccgugaaguggaagagaugaggacuagucccuguucccagagcccacuuuuuuuucuuuuuuugaaauaaaauagccugucuuucagaucucaaaggcucuuuucagagccaccaaaaaaaaaaaaaaaaaaaaaaaaaaaaaaaaaaaaaaaaaaaaaaaaaaaaaaaaaaaaaaaaaaaaaaaaaaaaaaaaaaaaaaaaaaaaaaaaaaaaa

SEQ ID NO: 28392 - RNA, 1745 nt, Artificial Sequence
  mRNA product Design a-1 (hSL-A100) comprising derived and/or modified sequence from LASV(GA391;Clade III)__CAA36645__GPCmut5 (opt4)
aggagagucccgcagucggcguccagcggcucugcuuguucgugugugugucguugcaggccuuauucaagcuuaccaugggccagaucgugaccuucuuccaggaggugccccacgugaucgaggaggugaugaacaucgugcugaucgcccugagcauccuggccauccugaagggccuguacaacguggccaccugcggccugaucggccuggugaccuuccugcugcugagcggcagaagcugcagccugaucuacaagggcaccuacgagcugcagacccuggagcugaacauggagacccugaacaugaccaugccccugagcugcaccaagaacaacagccaccacuacaucagagugggcaacgagaccggccuggagcugacccugaccaacaccagcauccugaaccacaaguucugcaaccugagcgacgcccacaagagaaaccuguacgaccacagccugaugagcaucaucagcaccuuccaccugagcauccccaacuucaaccaguacgaggccaugagcugcgacuucaacggcggcaagaucaccgugcaguacaaccugagccacagcuucgccguggacgccgccggccacugcggcacccuggccaacggcgugcugcagaccuucaugagaauggccuggggcggcagcuacaucgcccuggacagcggcugcggcaacugggacugcaucaugaccagcuaccaguaccugaucauccagaacaccaccugggacgaccacugccaguucagcagacccagccccaucggcuaccugggccugcugagccagagaaccagagacaucuacaucagcagaagacugcugggcaccuucaccuggacccugagcgacagcgagggcaacgagacccccggcggcuacugccugaccagauggaugcugaucgaggccgagcugaagugcuucggcaacaccgccguggccaagugcaacgagaagcacgacgaggaguucugcgacaugcugagacuguucgacuucaacaagcaggccaucagaagacugaagacccccgcccagaugagcauccagcugaucaacaaggccgugaacgcccugaucaacgaccagcugaucaugaagaaccaccugagagacaucaugugcauccccuacugcaacuacagcagauacugguaccugaaccacaccagcaccggcaagaccagccugcccagaugcuggcugaucagcaacggcagcuaccugaacgagaccaaguucagcgacgacaucgagcagcaggccgacaacaugaucaccgagaugcugcagaaggaguacaucgacagacagggcaagaccccccugggccugguggaccuguucguguucagcaccagcuucuaccugaucagcaucuuccugcaccuggugaagauccccacccacagacacaucgugggcaagcccugccccaagccccacagacugaaccacaugggcaucugcagcugcggccuguacaagcagcccggcgugcccgugagauggaagagaugaggacuagucccuguucccagagcccacuuuuuuuucuuuuuuugaaauaaaauagccugucuuucagaucucaaaggcucuuuucagagccaccaaaaaaaaaaaaaaaaaaaaaaaaaaaaaaaaaaaaaaaaaaaaaaaaaaaaaaaaaaaaaaaaaaaaaaaaaaaaaaaaaaaaaaaaaaaaaaaaaaaaa

SEQ ID NO: 28393 - RNA, 1748 nt, Artificial Sequence
  mRNA product Design a-1 (hSL-A100) comprising derived and/or modified sequence from LASV(AV;Clade V)__CCA30314__GPCmut5 (opt4)
aggagagucccgcagucggcguccagcggcucugcuuguucgugugugugucguugcaggccuuauucaagcuuaccaugggccagaucgugaccuucuuccaggaggugccccacgugaucgaggaggugaugaacaucgugcugaucgcccugagcauccuggccgugcugaagggccuguacaacaucgccaccugcggccugaucggccugaucaccuuccugcugcugugcggcagaagcugcagcagcaaccuguacaagggcguguacgagcugcagagccuggaccugaacauggagacccugaacaugaccaugccccugagcugcaccaagaacaacagccaccacuacaucagagugggcaacgacaccggccuggagcugacccugaccaacaccagcauccugaaccacaaguucugcaaccugagcgacgcccacaagaaggaccuguacgaccacgcccugaugagcaucaucagcaccuuccaccugagcauccccaacuucaaccaguacgaggccaugagcugcgacuucaacggcggcaagaucagcgugcaguacaaccugagccacagcuacgccaucgacgccgccaaccacugcggcaccguggccaacggcauccugcagaccuucaugagaauggccuggggcggcagcuacaucgcccuggacagcggcugcggcaacugggacugcaucaugaccagcuaccaguaccugaucauccagaacaccaccugggagaaccacugccaguucagcagacccagccccaucggcuaccugggccugcugagccagagaaccagagacaucuacaucagcagaagacugcugggcaccuucaccuggacccugagcgacagcgagggcaacgccacccccggcggcuacugccugaccagauggaugcugaucgaggccgagcugaagugcuucggcaacaccgccguggccaagugcaacgagaagcacgacgaggaguucugcgacaugcugagacuguucgacuucaacaagcaggccaucagcagacugaagagccccgcccagaugagcauccagcugaucaacaaggccgugaacgcccugaucaacgaccagcugaucaugaagaaccaccugagagacaucaugugcauccccuacugcaacuacagcaaguacugguaccugaaccacaccaucaccggcaagaccagccugcccaagugcuggcuggugagcaacggcagcuaccugaacgagacccacuucagcgacgacaucgagcagcaggccgacaacaugaucaccgagaugcugcagaaggaguacauggagagacagggcaagaccccccugggccugguggaccuguucguguucagcaccagcuucuaccugaucagcaucuuccugagacuggugaagauccccacccacagacacaucgugggcaagcccugccccaagccccacagacugaaccacaugggcaucugcagcugcggccuguacaagcagcccggcgugcccgugagauggaagagaugaggacuagucccuguucccagagcccacuuuuuuuucuuuuuuugaaauaaaauagccugucuuucagaucucaaaggcucuuuucagagccaccaaaaaaaaaaaaaaaaaaaaaaaaaaaaaaaaaaaaaaaaaaaaaaaaaaaaaaaaaaaaaaaaaaaaaaaaaaaaaaaaaaaaaaaaaaaaaaaaaaaaa

SEQ ID NO: 28394 - RNA, 1745 nt, Artificial Sequence
  mRNA product Design a-1 (hSL-A100) comprising derived and/or modified sequence from LASV(Togo/2016/7082;Clade VI)__AMR44577__GPCmut5 (opt4)
aggagagucccgcagucggcguccagcggcucugcuuguucgugugugugucguugcaggccuuauucaagcuuaccaugggccagaucaucaccuucuuccaggaggugccccacgugaucgaggaggugaugaacaucgugcugaucgcccugagccugcuggccauccugaagggcguguacaacguggccaccugcggcaucaucggccuggugaccuuccuguuccugugcggcagaagcugcagccugaucuacaagggcagcuacgagcugcagacccuggagcugaacauggagacccugaacaugaccaugccccugagcugcaccaagaacagcagccaccacuacaucagagugggcaacgagaccggccuggagcugacccugaccaacaccagcaucaucaaccacaaguucugcaaccugagcgacgcccacaagagaaaccuguacgaccacgcccugaugagcauccugagcaccuuccaccugagcauccccaacuucaaccaguacgaggccaugagcugcgacuucaacggcggcaagaucagcgugcaguacaaccugagccacgccuacgccguggacgccgccgagcacugcggcaccguggccaacggcgugcugcagaccuucaugagaauggccuggggcggcagcuacaucgcccuggacagcggcugcggcaacugggacugcaucaugaccagcuaccaguaccugaucauccagaacaccaccugggaggaccacugccaguucagcagacccagccccaucggcuaccugggccugcugagccagagaaccagagacaucuacaucagcagaagacugcugggcaccuucaccuggacccugagcgacagcgagggcaacgagacccccggcggcuacugccugaccagauggaugcugaucgaggccgagcugaagugcuucggcaacaccgccguggccaagugcaacgagaagcacgacgaggaguucugcgacaugcugagacuguucgacuucaacaagcaggccauccagagacugaagagccccgcccagaugagcauccagcugaucaacaaggccgugaacgcccugaucaacgaccagcugaucaugaagaaccaccugagagacaugaugugcauccccuacugcaacuacagcaaguacugguaccugaaccacaccagcagcggcagaaccagccugcccaagugcuggcuggugagcaacggcagcuaccugaacgagacccacuucagcgacgacaucgagcagcaggccgacaacaugaucaccgagaugcugcagaaggaguacaucgacagacagggcaagaccccccugggccugguggaccuguucguguucagcaccagcuucuaccugaucagcaucuuccugcaccugaucaagauccccacccacagacacaucgugggcaagcccugccccaagccccacagacugaaccacaugggcaucugcagcugcggccuguacaagcagcccggcgugcccaccagauggaagagaugaggacuagucccuguucccagagcccacuuuuuuuucuuuuuuugaaauaaaauagccugucuuucagaucucaaaggcucuuuucagagccaccaaaaaaaaaaaaaaaaaaaaaaaaaaaaaaaaaaaaaaaaaaaaaaaaaaaaaaaaaaaaaaaaaaaaaaaaaaaaaaaaaaaaaaaaaaaaaaaaaaaaa

SEQ ID NO: 28395 - RNA, 1745 nt, Artificial Sequence
  mRNA product Design a-1 (hSL-A100) comprising derived and/or modified sequence from LASV(KAK-428;Clade n.d. (VII))__ANH09740__GPCmut5 (opt4)
aggagagucccgcagucggcguccagcggcucugcuuguucgugugugugucguugcaggccuuauucaagcuuaccaugggccagaucgugaccuucuuccaggaggugccccacgugaucgaggaggugaugaacaucgugcugaucgcccugagccugcuggccauccugaagggccuguacaacuucgccaccugcggcgugaucggccugaucaccuuccugcugcugugcggcagaagcugcagcgccaccuacaagggccaguacgagcugcagacccuggagcugaacauggagagccugaacaugaccaugccccugagcugcaccaagaacaacagccaccacuacaucagagccggcaacaacaccggccuggagcugacccugaccaacaccagcaucaucagccacaaguucugcaaccugagcgacgcccacaagaagaaccuguacgaccacacccugaugagcaucaucaccaccuuccaccugagcauccccaacuucaaccaguacgaggccaugagcugcgacuucaacggcggcaagaucagcauccaguacaaccugagccacagcuacgccggcgacgccgcccagcacugcggcaccguggccaacggcgugcugcagaccuucaugagaauggccuggggcggcagcuaccuggcccuggacagcggcugcagaggcugggacugcaucaucagcagcuaccaguaccugaucauccagaacaccaccugggacgaccacugccaguucagcagacccagccccaucggcuaccugggcuucgugagccagaagaccagagacaucuacaucagcagaagacugcugggcaccuucaccuggacccugagcgacagcgagggccacgacaugcccggcggcuacugccugaccagauggaugcugaucgaggccgaccugaagugcuucggcaacaccgccguggccaagugcaacgagaagcacgacgaggaguucugcgacauguggagacuguucgacuucaacaagcaggccauccagagacugaaggcccccgcccagaugaacauccagcugaucaacaaggccgugaacgcccugaucaacgaccagcugaugaugaagaaccaccugagagacaucaugugcauccccuacugcaacuacagcaaguucugguaccugaacaacaccaccaccggcagaaccagccugcccagaugcuggcugaucagcaacggcagcuaccugaacgagacccacuucagcgacgacaucgagcagcaggccgacaacaugaucaccgagaugcugcagaaggaguacauggacagacagggcaagaccccccugggccugguggaccuguucguguucagcaccagcuucuaccugaucaccaucuuccugcaccuggugaagauccccacccacagacacaucgugggcaagcccugccccaagccccacagacugaaccacaugggcaucugcagcugcggccuguacaagcagcccggcgugcccgugagauggaagagaugaggacuagucccuguucccagagcccacuuuuuuuucuuuuuuugaaauaaaauagccugucuuucagaucucaaaggcucuuuucagagccaccaaaaaaaaaaaaaaaaaaaaaaaaaaaaaaaaaaaaaaaaaaaaaaaaaaaaaaaaaaaaaaaaaaaaaaaaaaaaaaaaaaaaaaaaaaaaaaaaaaaaa

SEQ ID NO: 28396 - RNA, 1745 nt, Artificial Sequence; identical to SEQ ID NO: 28390
  mRNA product Design a-1 (hSL-A100) comprising derived and/or modified sequence from LASV(Pinneo-NIG-1969;Clade I)__AIT17836__GPCmut5 (opt4)

SEQ ID NO: 28397 - RNA, 1745 nt, Artificial Sequence
  mRNA product Design a-1 (hSL-A100) comprising derived and/or modified sequence from LASV(ISTH0009-NIG-2011;Clade II)__AIT17404__GPCmut5 (opt4)
aggagagucccgcagucggcguccagcggcucugcuuguucgugugugugucguugcaggccuuauucaagcuuaccaugggccagaucaucaccuucuuccaggaggugccccacgugaucgaggaggugaugaacaucgugcugaucgcccugagccugcuggccauccugaagggcaucuacaacguggccaccugcggccuguucggccuggugagcuuccugcugcugugcggcagaagcugcagcaccaccuacaagggcguguacgagcugcagacccuggagcuggacauggccagccugaacaugaccaugccccugagcugcaccaagaacaacagccaccacuacaucauggugggcaacgagaccggccuggagcugacccugaccaacaccagcaucaucaaccacaaguucugcaaccugagcgacgcccacaagaagaaccuguacgaccacgcccugaugagcaucaucagcaccuuccaccugagcauccccaacuucaaccaguacgaggccaugagcugcgacuucaacggcggcaagaucagcgugcaguacaaccugagccacgccuacgccguggacgccgccaaccacugcggcaccaucgccaacggcgugcugcagaccuucaugagaauggccuggggcggcagcuacaucgcccuggacagcggcugcggcagcugggacugcaucaugaccagcuaccaguaccugaucauccagaacaccaccugggaggaccacugccaguucagcagacccagccccaucggcuaccugggccugcugagccagagaaccagagacaucuacaucagcagaagacugcugggcaccuucaccuggacccugagcgacagcgagggcaacgagacccccggcggcuacugccugaccagauggaugcugaucgaggccgagcugaagugcuucggcaacaccgccguggccaagugcaacgagaagcacgacgaggaguucugcgacaugcugagacuguucgacuucaacaagcaggccaucagaagacugaagacccccgcccagaugagcauccagcugaucaacaaggccgugaacgcccugaucaacgaccagcugaucaugaagaaccaccugagagacaucaugugcauccccuacugcaacuacagcaaguacugguaccugaaccacaccgugaccggcaagaccagccugcccagaugcuggcuggugagcaacggcagcuaccugaacgagacccacuucagcgacgacaucgagcagcaggccgacaacaugaucaccgagcugcugcagaaggaguacauggacagacagggcaagaccccccugggccugguggaccuguucguguucagcaccagcuucuaccugaucagcaucuuccugcaccugaucaagauccccacccacagacacaucaccggcaagcccugccccaagccccacagacugaaccacaugggcaucugcagcugcggccuguacaagcaccccggcgugcccgugaaguggaagagaugaggacuagucccuguucccagagcccacuuuuuuuucuuuuuuugaaauaaaauagccugucuuucagaucucaaaggcucuuuucagagccaccaaaaaaaaaaaaaaaaaaaaaaaaaaaaaaaaaaaaaaaaaaaaaaaaaaaaaaaaaaaaaaaaaaaaaaaaaaaaaaaaaaaaaaaaaaaaaaaaaaaaa

SEQ ID NO: 28398 - RNA, 1745 nt, Artificial Sequence
  mRNA product Design a-1 (hSL-A100) comprising derived and/or modified sequence from LASV(ISTH2010-NIG-2012;Clade II)__AIT17482__GPCmut5 (opt4)
aggagagucccgcagucggcguccagcggcucugcuuguucgugugugugucguugcaggccuuauucaagcuuaccaugggccagaucaucaccuucuuccaggaggugccccacgugaucgaggaggugaugaacaucgugcugaucgcccugagccugcuggccauccugaagggcaucuacaacguggccaccugcggccuguucggccuggugagcuuccugcugcugugcggcagaagcugcagcaccaccuacaagggcguguacgagcugcagacccuggagcuggacauggccagccugaacaugaccaugccccugagcugcaccaagaacaacagccaccacuacaucauggugggcaacgagaccggccuggagcugacccugaccaacaccagcaucaucaaccacaaguucugcaaccugagcgacgcccacaagaagaaccuguacgaccacgcccugaugagcaucaucagcaccuuccaccugagcauccccaacuucaaccaguacgaggccaugagcugcgacuucaacggcggcaagaucagcgugcaguacaaccugagccacgccuacgccguggacgccgccaaccacugcggcaccaucgccaacggcgugcugcagaccuucaugagaauggccuggggcggcagcuacaucgcccuggacagcggcugcggcagcugggacugcaucaugaccagcuaccaguaccugaucauccagaacaucaccugggaggaccacugccaguucagcagacccagccccaucggcuaccugggccugcugagccagagaaccagagacaucuacaucagcagaagacugcugggcaccuucaccuggacccugagcgacagcgagggcaacgagacccccggcggcuacugccugaccagauggaugcugaucgaggccgagcugaagugcuucggcaacaccgccguggccaagugcaacgagaagcacgacgaggaguucugcgacaugcugagacuguucgacuucaacaagcaggccaucagaagacugaagacccccgcccagaugagcauccagcugaucaacaaggccgugaacgcccugaucaacgaccagcugaucaugaagaaccaccugagagacaucaugugcauccccuacugcaacuacagcaaguacugguaccugaaccacaccgugaccggcaagaccagccugcccagaugcuggcuggugagcaacggcagcuaccugaacgagacccacuucagcgacgacaucgagcagcaggccgacaacaugaucaccgagcugcugcagaaggaguacaucgacagacagggcaagaccccccugggccugguggaccuguucguguucagcaccagcuucuaccugaucagcaucuuccugcaccuggugaagauccccacccacagacacguggugggcaagcccugccccaagccccacagacugaaccacaugggcaucugcagcugcggccuguacaagcaccccggcgugcccgugaaguggaagagaugaggacuagucccuguucccagagcccacuuuuuuuucuuuuuuugaaauaaaauagccugucuuucagaucucaaaggcucuuuucagagccaccaaaaaaaaaaaaaaaaaaaaaaaaaaaaaaaaaaaaaaaaaaaaaaaaaaaaaaaaaaaaaaaaaaaaaaaaaaaaaaaaaaaaaaaaaaaaaaaaaaaaa

SEQ ID NO: 28399 - RNA, 1745 nt, Artificial Sequence
  mRNA product Design a-1 (hSL-A100) comprising derived and/or modified sequence from LASV(Lassa virus/H.sapiens-wt/NGA/2015/ISTH_0543;Clade II)__AVO03639__GPCmut5 (opt4)
aggagagucccgcagucggcguccagcggcucugcuuguucgugugugugucguugcaggccuuauucaagcuuaccaugggccagaucaucaccuucuuccaggaggugccccacgugaucgaggaggugaugaacaucgugcugaucgcccugagccugcuggccauccugaagggcaucuacaacguggccaccugcggccuguucggccuggugagcuuccugcugcugugcggcagaagcugcagcaccaccuacaagggcguguacgagcugcagacccuggagcuggacauggccaaccugaacaugaccaugccccugagcugcaccaagaacaacagccaccacuacaucauggugggcaacgagaccggccuggagcugacccugaccaacaccagcaucaucaaccacaaguucugcaaccugagcgacgcccacaagaagaaccuguacgaccacgcccugaugagcaucaucagcaccuuccaccugagcauccccaacuucaaccaguacgaggccaugagcugcgacuucaacggcggcaagaucagcgugcaguacaaccugagccacaccuacgccguggacgccgccaaccacugcggcaccaucgccaacggcgugcugcagaccuucaugagaauggccuggggcggcagcuacaucgcccuggacagcggcugcggcagcugggacugcaucaugaccagcuaccaguaccuggugauccagaacaccaccugggaggaccacugccaguucagcagacccagccccaucggcuaccugggccugcugagccagagaaccagagacaucuacaucagcagaagacugcugggcaccuucaccuggacccugagcgacagcgagggcaacgagacccccggcggcuacugccugaccagauggaugcugaucgaggccgagcugaagugcuucggcaacaccgccguggccaagugcaacgagaagcacgacgaggaguucugcgacaugcugagacuguucgacuucaacaagcaggccaucagaagacugaagacccccgcccagaugagcauccagcugaucaacaaggccgugaacgcccugaucaacgaccagcugaucaugaagaaccaccugagagacaucaugugcauccccuacugcaacuacagcaaguacugguaccugaaccacaccgugaccggcaagaccagccugcccagaugcuggcuggugagcaacggcagcuaccugaacgagacccacuucagcgacgacaucgagcagcaggccgacaacaugaucaccgagcugcugcagaaggaguacaucgacagacagggcaagaccccccugggccugguggaccuguucguguucagcaccagcuucuaccugaucagcaucuuccugcaccuggugaagauccccacccacagacacaucaccggcaagcccugccccaagccccacagacugaaccacaugggcaucugcagcugcggccuguacaagcaccccggcgugcccgugaaguggaagagaugaggacuagucccuguucccagagcccacuuuuuuuucuuuuuuugaaauaaaauagccugucuuucagaucucaaaggcucuuuucagagccaccaaaaaaaaaaaaaaaaaaaaaaaaaaaaaaaaaaaaaaaaaaaaaaaaaaaaaaaaaaaaaaaaaaaaaaaaaaaaaaaaaaaaaaaaaaaaaaaaaaaaa

SEQ ID NO: 28400 - RNA, 1745 nt, Artificial Sequence
  mRNA product Design a-1 (hSL-A100) comprising derived and/or modified sequence from LASV(Lassa virus/H.sapiens-wt/NGA/2016/ISTH_0009;Clade II)__AVO03571__GPCmut5 (opt4)
aggagagucccgcagucggcguccagcggcucugcuuguucgugugugugucguugcaggccuuauucaagcuuaccaugggccagaucaucaccuucuuccaggaggugccccacgugaucgaggaggugaugaacaucgugcugaucgcccugagccugcuggccauccugaagggcaucuacaacguggccaccugcggccugcugggccuggugagcuuccugcugcugugcggcagaagcugcagcaccaccuacaagggcguguacgagcugcagacccuggagcuggacauggccagccugaacaugaccaugccccugagcugcaccaagaacaacagccaccacuacaucauggugggcaacgagaccggccuggagcugacccugaccaacaccagcaucaucaaccacaaguucugcaaccugagcgacgcccacaagaagaaccuguacgaccacgcccugaugagcaucaucagcaccuuccaccugagcauccccaacuucaaccaguacgaggccaugagcugcgacuucaacggcggcagaaucagcgugcaguacaaccugagccacagcuacgccguggacgccgccaaccacugcggcaccaucgccaacggcgugcugcagaccuucaugagaauggccuggggcggcagcuacaucgcccuggacagcggcugcggcagcugggacugcaucaugaccagcuaccaguaccugaucauccagaacaccaccugggaggaccacugccaguucagcagacccagccccaucggcuaccugggccugcugagccagagaaccagagacaucuacaucagcagaagacugcugggcaccuucaccuggacccugagcgacagcgagggcaacgagacccccggcggcuacugccugaccagauggaugcugaucgaggccgagcugaagugcuucggcaacaccgccguggccaagugcaacgagaagcacgacgaggaguucugcgacaugcugagacuguucgacuucaacaagcaggccaucagaagacugaagacccccgcccagaugagcauccagcugaucaacaaggccgugaacgcccugaucaacgaccagcugaucaugaagaaccaccugagagacaucaugugcauccccuacugcaacuacagcaaguacugguaccugaaccacaccgugaccggcaagaccagccugcccagaugcuggcuggugagcaacggcagcuaccugaacgagacccacuucagcgacgacaucgagcagcaggccgacaacaugaucaccgagcugcugcagaaggaguacaucgacagacagggcaagaccccccugggccugguggaccuguucguguucagcaccagcuucuaccugaucagcaucuuccugcaccuggugaagauccccacccacagacacaucaccggcaagcccugccccaagccccacagacugaaccacaugggcaucugcagcugcggccuguacaaccaccccggcgugcccgugaaguggaagagaugaggacuagucccuguucccagagcccacuuuuuuuucuuuuuuugaaauaaaauagccugucuuucagaucucaaaggcucuuuucagagccaccaaaaaaaaaaaaaaaaaaaaaaaaaaaaaaaaaaaaaaaaaaaaaaaaaaaaaaaaaaaaaaaaaaaaaaaaaaaaaaaaaaaaaaaaaaaaaaaaaaaaa

SEQ ID NO: 28401 - RNA, 1745 nt, Artificial Sequence
  mRNA product Design a-1 (hSL-A100) comprising derived and/or modified sequence from LASV(Lassa virus/H.sapiens-wt/NGA/2016/ISTH_0017;Clade II)__AVO03567__GPCmut5 (opt4)
aggagagucccgcagucggcguccagcggcucugcuuguucgugugugugucguugcaggccuuauucaagcuuaccaugggccagaucaucaccuucuuccaggaggugccccacgugaucgaggaggugaugaacaucgugcugaucgcccugagccugcuggccauccugaagggcaucuacaacguggccaccugcggccuguucggccuggugagcuuccugcugcugugcggcagaagcugcagcaccaccuacaagggcguguacgagcugcagacccuggagcuggacauggccagccugaacaugaccaugccccugagcugcaccaagaacaacagccaccacuacaucauggugggcaacgagaccggccuggagcugacccugaccaacaccagcaucaucaaccacaaguucugcaaccugagcgacgcccacaagaagaaccuguacgaccacgcccugaugagcaucaucagcaccuuccaccugagcauccccaacuucaaccaguacgaggccaugagcugcgacuucaacggcggcaagaucagcgugcaguacaaccugagccacaccuacgccaucgacgccgccaaccacugcggcaccaucgccaacggcgugcugcagaccuucaugagaauggccuggggcggcagcuacaucgcccuggacagcggcugcggcagcugggacugcaucaugaccagcuaccaguaccugaucauccagaacaccaccugggaggaccacugccaguucagcagacccagccccaucggcuaccugggccugcugagccagagaaccagagacaucuacaucagcagaagacugcugggcaccuucaccuggacccugagcgacagcgagggcaacgagacccccggcggcuacugccugaccagauggaugcugaucgaggccgagcugaagugcuucggcaacaccgccguggccaagugcaacgagaagcacgacgaggaguucugcgacaugcugagacuguucgacuucaacaagcaggccaucagaagacugaagacccccgcccagaugagcauccagcugaucaacaaggccgugaacgcccugaucaacgaccagcugaucaugaagaaccaccugagagacaucaugugcauccccuacugcaacuacagcaaguacugguaccugaaccacaccgugaccggcaagaccagccugcccagaugcuggcuggugagcaacggcagcuaccugaacgagacccacuucagcgacgacaucgagcagcaggccgacaacaugaucaccgagcugcugcagaaggaguacauggacagacagggcaagaccccccugggccugguggaccuguucguguucagcaccagcuucuaccugaucagcaucuuccugcaccuggugagaauccccacccacagacacgugaucggcaagcccugccccaagccccacagacugaaccacaugggcaucugcagcugcggccuguacaagcaccccggcgugcccgugaaguggaagagaugaggacuagucccuguucccagagcccacuuuuuuuucuuuuuuugaaauaaaauagccugucuuucagaucucaaaggcucuuuucagagccaccaaaaaaaaaaaaaaaaaaaaaaaaaaaaaaaaaaaaaaaaaaaaaaaaaaaaaaaaaaaaaaaaaaaaaaaaaaaaaaaaaaaaaaaaaaaaaaaaaaaaa

SEQ ID NO: 28402 - RNA, 1745 nt, Artificial Sequence
  mRNA product Design a-1 (hSL-A100) comprising derived and/or modified sequence from LASV(Lassa virus/H.sapiens-wt/NGA/2018/ISTH_0959;Clade II)__AVV65099__GPCmut5 (opt4)
aggagagucccgcagucggcguccagcggcucugcuuguucgugugugugucguugcaggccuuauucaagcuuaccaugggccagaucaucaccuucuuccaggaggugccccacgugaucgaggaggugaugaacaucgugcugaucgcccugagccugcuggccauccugaagggcaucuacaacguggugaccugcggccuguucggccuggugagcuuccugcugcugugcggcagaagcugcagcaccaccuacaagggcguguacgagcugcagacccuggagcuggacauggccagccugaacaugaccaugccccugagcugcaccaagaacaacagccaccacuacaucauggugggcaacgagaccggccuggagcugacccugaccaacaccagcaucaucaaccacaaguucugcaaccugagcgacgcccacaagaagaaccuguacgaccacgcccugaugagcaucaucagcaccuuccaccugagcauccccaacuucaaccaguacgaggccaugagcugcgacuucaacggcggcaagaucagcgugcaguacaaccugagccacgccuacgccaucgacgccgccaaccacugcggcaccaucgccaacggcgugcugcagaccuucaugagaauggccuggggcggcagcuacaucgcccuggacagcggcugcggcagcugggacugcaucaugaccagcuaccaguaccugaucauccagaacaccaccugggaggaccacugccaguucagcagacccagccccaucggcuaccugggccugcugagccagagaaccagagacaucuacaucagcagaagacugcugggcaccuucaccuggacccugagcgacagcgagggcaacgagacccccggcggcuacugccugaccagauggaugcugaucgaggccgagcugaagugcuucggcaacaccgccguggccaagugcaacgagaagcacgacgaggaguucugcgacaugcugagacuguucgacuucaacaagcaggccaucagaagacugaagacccccgcccagaugagcauccagcugaucaacaaggccgugaacgcccugaucaacgaccagcugaucaugaagaaccaccugagagacaucaugugcauccccuacugcaacuacagcaaguacugguaccugaaccacaccgugaccggcaagaccagccugcccagaugcuggcuggugagcaacggcagcuaccugaacgagacccacuucagcgacgacaucgagcagcaggccgacaacaugaucaccgagcugcugcagaaggaguacaucgacagacagggcaagaccccccugggccugguggaccuguucguguucagcaccagcuucuaccugaucagcaucuuccugcaccuggugaagauccccacccacagacacgugaucggcaagcccugccccaagccccacagacugaaccacaugggcaucugcagcugcggccuguacaagcaccccggcgugcccgugaaguggaagagaugaggacuagucccuguucccagagcccacuuuuuuuucuuuuuuugaaauaaaauagccugucuuucagaucucaaaggcucuuuucagagccaccaaaaaaaaaaaaaaaaaaaaaaaaaaaaaaaaaaaaaaaaaaaaaaaaaaaaaaaaaaaaaaaaaaaaaaaaaaaaaaaaaaaaaaaaaaaaaaaaaaaaa

SEQ ID NO: 28403 - RNA, 1745 nt, Artificial Sequence
  mRNA product Design a-1 (hSL-A100) comprising derived and/or modified sequence from LASV(LASV003-NIG-2008;Clade II)__AIT17580__GPCmut5 (opt4)
aggagagucccgcagucggcguccagcggcucugcuuguucgugugugugucguugcaggccuuauucaagcuuaccaugggccagaucaucaccuucuuccaggaggugccccacgugaucgaggaggugaugaacaucgugcugaucgcccugagccugcuggccauccugaagggcaucuacaacguggccaccugcggccuguucggccuggugagcuuccugcugcugugcggcagaagcugcagcaccaccuacaagggcguguacgagcugcagacccuggagcuggacauggccagccugaacaugaccaugccccugagcugcaccaagaacaacagccaccacuacaucauggugggcaacgagaccggccuggagcugacccugaccaacaccagcaucaucaaccacaaguucugcaaccugagcgacgcccacaagaagaaccuguacgaccacgcccugaugagcaucaucagcaccuuccaccugagcauccccaacuucaaccaguacgaggccaugagcugcgacuucaacggcggcaagaucagcgugcaguacaaccugagccacaccuacgccguggacgccgccaaccacugcggcaccaucgccaacggcgugcugcagaccuucaugagaauggccuggggcggcagcuacaucgcccuggacagcggcugcggcagcugggacugcaucaugaccagcuaccaguaccugaucauccagaacaccaccugggaggaccacugccaguucagcagacccagccccaucggcuaccugggccugcugagccagagaaccagagacaucuacaucagcagaagacugcugggcaccuucaccuggacccugagcgacagcgagagcaacgagacccccggcggcuacugccugaccagauggaugcugaucgaggccgagcugaagugcuucggcaacaccgccguggccaagugcaacgagaagcacgacgaggaguucugcgacaugcugagacuguucgacuucaacaagcaggccaucagaagacugaaggcccccgcccagaugagcauccagcugaucaacaaggccgugaacgcccugaucaacgaccagcugaucaugaagaaccaccugagagacaucaugugcauccccuacugcaacuacagcaaguacugguaccugaaccacaccgugaccggcagaaccagccugcccagaugcuggcuggugagcaacggcagcuaccugaacgagacccacuucagcgacgacaucgagcagcaggccgacaacaugaucaccgagcugcugcagaaggaguacauggacagacagggcaagaccccccugggccugguggaccuguucguguucagcaccagcuucuaccugaucagcaucuuccugcaccuggugaagauccccacccacagacacgugaucggcaagcccugccccaagccccacagacugaaccacaugggcaucugcagcugcggccuguacaagcaccccggcgugcccgugaaguggaagagaugaggacuagucccuguucccagagcccacuuuuuuuucuuuuuuugaaauaaaauagccugucuuucagaucucaaaggcucuuuucagagccaccaaaaaaaaaaaaaaaaaaaaaaaaaaaaaaaaaaaaaaaaaaaaaaaaaaaaaaaaaaaaaaaaaaaaaaaaaaaaaaaaaaaaaaaaaaaaaaaaaaaaa

SEQ ID NO: 28404 - RNA, 1745 nt, Artificial Sequence
  mRNA product Design a-1 (hSL-A100) comprising derived and/or modified sequence from LASV(LASV035-NIG-2009;Clade II)__AIT17588__GPCmut5 (opt4)
aggagagucccgcagucggcguccagcggcucugcuuguucgugugugugucguugcaggccuuauucaagcuuaccaugggccagaucaucaccuucuuccaggaggugccccacgugaucgaggaggugaugaacaucgugcugaucgcccugagccugcuggccauccugaagggcaucuacaacguggccaccugcggccuguucggccuggugagcuuccugcugcugugcggcagaagcugcagcaccaccuacaagggcguguacgagcugcagacccuggagcuggacauggccagccugaacaugaccaugccccugagcugcaccaagaacaacagccaccacuacaucauggugggcaacgagaccggccuggagcugacccugaccaacaccagcaucaucaaccacaaguucugcaaccugagcgacgcccacaagaagaaccuguacgaccacgcccugaugagcaucaucagcaccuuccaccugagcauccccaacuucaaccaguacgaggccaugagcugcgacuucaacggcggcaagaucagcgugcaguacaaccugagccacgccuacgccguggacgccgccaaccacugcggcaccaucgccaacggcgugcugcagaccuucaugagaauggccuggggcggcagcuacaucgcccuggacagcggcugcggcagcugggacugcaucaugaccagcuaccaguaccugaucauccagaacaccaccugggaggaccacugccaguucagcagacccagccccaucggcuaccugggccugcugagccagagaaccagagacaucuacaucagcagaagacugcugggcaccuucaccuggacccugagcgacagcgagggcaacgagacccccggcggcuacugccugaccagauggaugcugaucgaggccgagcugaagugcuucggcaacaccgccguggccaagugcaacgagaagcacgacgaggaguucugcgacaugcugagacuguucgacuucaacaagcaggccaucagaagacugaaggcccccgcccagaugagcauccagcugaucaacaaggccgugaacgcccugaucaacgaccagcugaucaugaagaaccaccugagagacaucaugugcauccccuacugcaacuacagcaaguacugguaccugaaccacaccgugaccggcaagaccagccugcccagaugcuggcuggugagcaacggcagcuaccugaacgagacccacuucagcgacgacaucgagcagcaggccgacaacaugaucaccgagcugcugcagaaggaguacaucgacagacagggcaagaccccccugggccugguggaccuguucguguucagcaccagcuucuaccugaucagcaucuuccugcaccuggugaagauccccacccacagacacgugaucggcaagcccugccccaagccccacagacugaaccacaugggcaucugcagcugcggccuguacaagcaccccggcgugcccgugaaguggaagagaugaggacuagucccuguucccagagcccacuuuuuuuucuuuuuuugaaauaaaauagccugucuuucagaucucaaaggcucuuuucagagccaccaaaaaaaaaaaaaaaaaaaaaaaaaaaaaaaaaaaaaaaaaaaaaaaaaaaaaaaaaaaaaaaaaaaaaaaaaaaaaaaaaaaaaaaaaaaaaaaaaaaaa

SEQ ID NO: 28405 - RNA, 1745 nt, Artificial Sequence
  mRNA product Design a-1 (hSL-A100) comprising derived and/or modified sequence from LASV(LASV1000-NIG-2009;Clade II)__AIT17782__GPCmut5 (opt4)
aggagagucccgcagucggcguccagcggcucugcuuguucgugugugugucguugcaggccuuauucaagcuuaccaugggccagaucaucaccuucuuccaggaggugccccacgugaucgaggaggugaugaacaucgugcugaucgcccugagccugcuggccauccugaagggcaucuacaacguggccaccugcggccuguucggccuggugagcuuccugcugcugugcggcagaagcugcagcaccaccuacaagggcguguacgagcugcagacccuggagcuggacauggccagccugaacaugaccaugccccugagcugcaccaagaacaacagccaccacuacaucauggugggcaacgagaccggccuggagcugacccugaccaacaccagcaucaucaaccacaaguucugcaaccugagcgacgcccacaagaagaaccuguacgaccacgcccugaugagcaucaucagcaccuuccaccugagcauccccaacuucaaccaguacgaggccaugagcugcgacuucaacggcggcaagaucagcgugcaguacaaccugagccacaccuacgccguggacgccgccaaccacugcggcaccaucgccaacggcgugcugcagaccuucaugagaauggccuggggcggcagcuacaucgcccuggacagcggcugcggcagcugggacugcaucaugaccagcuaccaguaccugaucauccagaacaccaccugggaggaccacugccaguucagcagacccagccccaucggcuaccugggccugcugagccagagaaccagagacaucuacaucagcagaagacugcugggcaccuucaccuggacccugagcgacagcgagggcaacgagacccccggcggcuacugccugaccagauggaugcugaucgaggccgagcugaagugcuucggcaacaccgccguggccaagugcaacgagaagcacgacgaggaguucugcgacaugcugagacuguucgacuucaacaagcaggccaucaagagacugaagacccccgcccagaugagcauccagcugaucaacaaggccgugaacgcccugaucaacgaccagcugaucaugaagaaccaccugagagacaucaugugcauccccuacugcaacuacagcaaguacugguaccugaaccacaccgugaccggcaagaccagccugcccagaugcuggcuggugagcaacggcagcuaccugaacgagacccacuucagcgacgacaucgagcagcaggccgacaacaugaucaccgagcugcugcagaaggaguacaucgacagacagggcaagaccccccugggccugguggaccuguucguguucagcaccagcuucuaccugaucagcaucuuccugcaccuggugaagauccccacccacagacacguggugggcaagcccugccccaagccccacagacugaaccacaugggcaucugcagcugcggccuguacaagcaccccggcgugcccgugaaguggaagagaugaggacuagucccuguucccagagcccacuuuuuuuucuuuuuuugaaauaaaauagccugucuuucagaucucaaaggcucuuuucagagccaccaaaaaaaaaaaaaaaaaaaaaaaaaaaaaaaaaaaaaaaaaaaaaaaaaaaaaaaaaaaaaaaaaaaaaaaaaaaaaaaaaaaaaaaaaaaaaaaaaaaaa

SEQ ID NO: 28406 - RNA, 1745 nt, Artificial Sequence
  mRNA product Design a-1 (hSL-A100) comprising derived and/or modified sequence from LASV(LASV221-NIG-2010;Clade II)__AIT17624__GPCmut5 (opt4)
aggagagucccgcagucggcguccagcggcucugcuuguucgugugugugucguugcaggccuuauucaagcuuaccaugggccagaucaucaccuucuuccaggaggugccccacgugaucgaggaggugaugaacaucgugcugaucgcccugagccugcuggccauccugaagggcaucuacaacguggccaccugcggccuguucggccuggugagcuuccugcugcugugcggcagaagcugcagcaccaccuacaagggcguguacgagcugcagacccuggagcuggacauggccagccugaacaugaccaugccccugagcugcaccaagaacaacagccaccacuacaucauggugggcaacgagaccggccuggagcugacccugaccaacaccagcaucaucaaccacaaguucugcaaccugagcgacgcccacaagaagaaccuguacgaccacgcccugaugagcaucaucagcaccuuccaccugagcauccccaacuucaaccaguacgaggccaugagcugcgacuucaacggcggcaagaucagcgugcaguacaaccugagccacaccuacgccaucgacgccgccaaccacugcggcaccaucgccaacggcgugcugcagaccuucaugagaauggccuggggcggcagcuacaucgcccuggacagcggcugcggcagcugggacugcaucaugaccagcuaccaguaccugaucauccagaacaccaccugggaggaccacugccaguucagcagacccagccccaucggcuaccugggccugcugagccagagaaccagagacaucuacaucagcagaagacugcugggcaccuucaccuggacccugagcgacagcgagggcaacgagacccccggcggcuacugccugaccagauggaugcugaucgaggccgagcugaagugcuucggcaacaccgccguggccaagugcaacgagaagcacgacgaggaguucugcgacaugcugagacuguucgacuucaacaagcaggccaucagaagacugaagacccccgcccagaugagcauccagcugaucaacaaggccgugaacgcccugaucaacgaccagcugaucaugaagaaccaccugagagacaucaugugcauccccuacugcaacuacagcaaguacugguaccugaaccacaccgugaccggcaagaccagccugcccagaugcuggcuggugagcaacggcagcuaccugaacgagacccacuucagcgacgacaucgagcagcaggccgacaacaugaucaccgagaugcugcagaaggaguacauggacagacagggcaagaccccccugggccugguggaccuguucguguucagcaccagcuucuaccugaucagcaucuuccugcaccuggugaagauccccacccacagacacgugaucggcaagcccugccccaagccccacagacugaaccacaugggcaucugcagcugcggccuguacaagcaccccggcgugcccgugaaguggaagagaugaggacuagucccuguucccagagcccacuuuuuuuucuuuuuuugaaauaaaauagccugucuuucagaucucaaaggcucuuuucagagccaccaaaaaaaaaaaaaaaaaaaaaaaaaaaaaaaaaaaaaaaaaaaaaaaaaaaaaaaaaaaaaaaaaaaaaaaaaaaaaaaaaaaaaaaaaaaaaaaaaaaaa

SEQ ID NO: 28407 - RNA, 1745 nt, Artificial Sequence
  mRNA product Design a-1 (hSL-A100) comprising derived and/or modified sequence from LASV(LASV237-NIG-2010;Clade II)__AIT17638__GPCmut5 (opt4)
aggagagucccgcagucggcguccagcggcucugcuuguucgugugugugucguugcaggccuuauucaagcuuaccaugggccagaucaucaccuucuuccaggaggugccccacgugaucgaggaggugaugaacaucgugcugaucgcccugagccugcuggccauccugaagggcaucuacaacguggccaccugcggccuguucggccuggugagcuuccugcugcugugcggcagaagcugcagcaccaccuacaagggcguguacgagcugcagacccuggagcuggacauggccagccugaacaugaccaugccccugagcugcaccaagaacaacagccaccacuacaucauggugggcaacgagaccggccuggagcugacccugaccaacaccagcaucaucaaccacaaguucugcaaccugagcgacgcccacaagaaggaccuguacgaccacgcccugaugagcaucaucagcaccuuccaccugagcauccccaacuucaaccaguacgaggccaugagcugcgacuucaacggcggcaagaucagcgugcaguacaaccugagccacaccuacgccguggacgccgccaaccacugcggcaccaucgccaacggcgugcugcagaccuucaugagaauggccuggggcggcagcuacaucgcccuggacagcggcugcggcagcugggacugcaucaugaccagcuaccaguaccugaucauccagaacaccaccugggaggaccacugccaguucagcagacccagccccaucggcuaccugggccugcugagccagagaaccagagacaucuacaucagcagaagacugcugggcaccuucaccuggacccugagcgacagcgagggcaacgagacccccggcggcuacugccugaccagauggaugcugaucgaggccgagcugaagugcuucggcaacaccgccguggccaagugcaacgagaagcacgacgaggaguucugcgacaugcugagacuguucgacuucaacaagcaggccaucagaagacugaagacccccgcccagaugagcauccagcugaucaacaaggccgugaacgcccugaucaacgaccagcugaucaugaagaaccaccugagagacaucaugugcauccccuacugcaacuacagcaaguacugguaccugaaccacaccgugaccggcaagaccagccugcccagaugcuggcuggugagcaacggcagcuaccugaacgagacccacuucagcgacgacaucgagcagcaggccgacaacaugaucaccgagcugcugcagaaggaguacauggacagacagggcaagaccccccugggccugguggaccuguucguguucagcaccagcuucuaccugaucagcaucuuccugcaccugaucaagauccccacccacagacacaucaccggcaagcccugccccaagccccacagacugaaccacaugggcaucugcagcugcggccuguacaagcaccccggcgugcccgugaaguggaagagaugaggacuagucccuguucccagagcccacuuuuuuuucuuuuuuugaaauaaaauagccugucuuucagaucucaaaggcucuuuucagagccaccaaaaaaaaaaaaaaaaaaaaaaaaaaaaaaaaaaaaaaaaaaaaaaaaaaaaaaaaaaaaaaaaaaaaaaaaaaaaaaaaaaaaaaaaaaaaaaaaaaaaa

SEQ ID NO: 28408 - RNA, 1745 nt, Artificial Sequence
  mRNA product Design a-1 (hSL-A100) comprising derived and/or modified sequence from LASV(LASV253-NIG-2011;Clade II)__AIT17670__GPCmut5 (opt4)
aggagagucccgcagucggcguccagcggcucugcuuguucgugugugugucguugcaggccuuauucaagcuuaccaugggccagaucaucaccuucuuccaggaggugccccacgugaucgaggaggugaugaacaucgugcugaucgcccugagccugcuggccauccugaagggcaucuacaacguggccaccugcggccuguucggccuggugagcuuccugcugcugugcggcagaagcugcagcaccaccuacaagggcguguacgagcugcagacccuggagcuggacauggccagccugaacaugaccaugccccugagcugcaccaagaacaacagccaccacuacaucauggugggcaacgagaccggccuggagcugacccugaccaacaccagcaucaucaaccacaaguucugcaaccugagcgacgcccacaagaagaaccuguacgaccacgcccugaugagcaucaucagcaccuuccaccugagcauccccaacuucaaccaguacgaggccaugagcugcgacuucaacggcggcaagaucagcgugcaguacaaccugagccacaccuacgccguggacgccgccaaccacugcggcaccaucgccaacggcgugcugcagaccuucaugagaauggccuggggcggcagcuacaucgcccuggacagcggcugcggcagcugggacugcaucaugaccagcuaccaguaccugaucauccagaacaccaccugggaggaccacugccaguucagcagacccagccccaucggcuaccugggccugcugagccagagaaccagagacaucuacaucagcagaagacugcugggcaccuucaccuggacccugagcgacagcgagggcaacgagacccccggcggcuacugccugaccagauggaugcugaucgaggccgagcugaagugcuucggcaacaccgccguggccaagugcaacgagaagcacgacgaggaguucugcgacaugcugagacuguucgacuucaacaagcaggccaucagaagacugaaggcccccgcccagaugagcauccagcugaucaacaaggccgugaacgcccugaucaacgaccagcugaucaugaagaaccaccugagagacaucaugugcauccccuacugcaacuacagcaaguacugguaccugaaccacaccgugaccggcagaaccagccugcccagaugcuggcuggugagcaacggcagcuaccugaacgagacccacuucagcgacgacaucgagcagcaggccgacaacaugaucaccgagcugcugcagaaggaguacaucgacagacagggcaagaccccccugggccugguggaccuguucguguucagcaccagcuucuaccugaucagcaucuuccugcaccuggugaagauccccacccacagacacaucaucggcaagcccugccccaagccccacagacugaaccacaugggcaucugcagcugcggccuguacaagcaccccggcgugcccgugaaguggaagagaugaggacuagucccuguucccagagcccacuuuuuuuucuuuuuuugaaauaaaauagccugucuuucagaucucaaaggcucuuuucagagccaccaaaaaaaaaaaaaaaaaaaaaaaaaaaaaaaaaaaaaaaaaaaaaaaaaaaaaaaaaaaaaaaaaaaaaaaaaaaaaaaaaaaaaaaaaaaaaaaaaaaaa

SEQ ID NO: 28409 - RNA, 1745 nt, Artificial Sequence
  mRNA product Design a-1 (hSL-A100) comprising derived and/or modified sequence from LASV(LASV254-NIG-2011;Clade II)__AIT17674__GPCmut5 (opt4)
aggagagucccgcagucggcguccagcggcucugcuuguucgugugugugucguugcaggccuuauucaagcuuaccaugggccagaucaucaccuucuuccaggaggugccccacgugaucgaggaggugaugaacaucgugcugaucgcccugagccugcuggccauccugaagggcaucuacaacguggccaccugcggccuguucggccuggugagcuuccugcugcugugcggcagaagcugcagcaccaccuacaagggcguguacgagcugcagacccuggagcuggacaugaccaaccugaacaugaccaugccccugagcugcaccaagaacaacagccaccacuacaucauggugggcaacgagaccggccuggagcugacccugaccaacaccagcaucaucaaccacaaguucugcaaccugagcgacgcccacaagaagaaccuguacaaccacgcccugaugagcaucaucagcaccuuccaccugagcauccccaacuucaaccaguacgaggccaugagcugcgacuucaacggcggcaagaucagcgugcaguacaaccugagccacagcuacgccguggacgccgccaaccacugcggcaccaucgccaacggcgugcugcagaccuucaugagaauggccuggggcggcagcuacaucgcccuggacagcggcugcggcaacugggacugcaucaugaccagcuaccaguaccugaucauccagaacaccaccugggaggaccacugccaguucagcagacccagccccaucggcuaccugggccugcugagccagagaaccagagacaucuacaucagcagaagacugcugggcaccuucaccuggacccugagcgacagcgagggcaacgagacccccggcggcuacugccugaccagauggaugcugaucgaggccgagcugaagugcuucggcaacaccgccguggccaagugcaacgagaagcacgacgaggaguucugcgacaugcugagacuguucgacuucaacaagcaggccaucagaagacugaagacccccgcccaggccaacauccagcugaucaacaaggccgugaacgcccugaucaacgaccagcugaucaugaagaaccaccugagagacaucaugugcauccccuacugcaacuacagcaaguacugguaccugaaccacaccgugaccggcaagaccagccugcccagaugcuggcuggugagcaacggcagcuaccugaacgagacccacuucagcgacgacaucgagcagcaggccgacaacaugaucaccgagcugcugcagaaggaguacauggacagacagggcaagaccccccugggccugguggaccuguucguguucagcaccagcuucuaccugaucagcaucuuccugcaccuggugaagauccccacccacagacacgugaucggcaagcccugccccaagccccacagacugaaccacaugggcaucugcagcugcggccuguacaagcaccccggcgugcccgugaaguggaagagaugaggacuagucccuguucccagagcccacuuuuuuuucuuuuuuugaaauaaaauagccugucuuucagaucucaaaggcucuuuucagagccaccaaaaaaaaaaaaaaaaaaaaaaaaaaaaaaaaaaaaaaaaaaaaaaaaaaaaaaaaaaaaaaaaaaaaaaaaaaaaaaaaaaaaaaaaaaaaaaaaaaaaa

SEQ ID NO: 28410 - RNA, 1745 nt, Artificial Sequence
  mRNA product Design a-1 (hSL-A100) comprising derived and/or modified sequence from LASV(Nig08-A19;Clade III)__ADU56618__GPCmut5 (opt4)
aggagagucccgcagucggcguccagcggcucugcuuguucgugugugugucguugcaggccuuauucaagcuuaccaugggccagaucgugaccuucuuccaggaggugccccacgugaucgaggaggugaugaacaucgugcugaucgcccugagcauccuggccauccugaagggccuguacaacaucgccaccugcggccugaucggccuggugaccuuccugcugcugagcggcagaagcugcagcaugaccuacaagggcguguacgagcugcagacccuggagcugaacaugaacacccugaacaugaccaugccccugagcugcaccaagaacaacagccaccacuacaucauggugggcaacgagaccggccuggagcugacccugaccaacaccagccugcugcaccacaaguucugcaaccugagcgacgcccacaagaagaaccuguacgaccacacccugaugagcaucaucagcaccuuccaccugagcauccccaacuucaaccaguacgaggccaugagcugcgacuucaacggcggcaagaucaccgugcaguacaaccugagccacagcuacgccaucgacgccgccaaccacugcggcaccguggccaacggcgugcugcagaccuucaugagaauggccuggggcggcagcuacaucgcccuggacagcggcugcggcaagugggacugcaucaugaccagcuaccaguaccugaucauccagaacaccaccugggaggaccacugccaguucagcagacccagccccaucggcuaccugggccugcugagccagagaaccagagacaucuacaucagcagaagacugcugggcaccuucaccuggacccugagcgacagcgagggcaacgagacccccggcggcuacugccugaccagauggaugcugaucgaggccgagcugaagugcuucggcaacaccgccguggccaagugcaacgagaagcacgacgaggaguucugcgacaugcugagacuguucgacuucaacaagcaggccaucagaagacugaaggcccccgcccagaugagcauccagcugaucaacaaggccgugaacgcccugaucaacgaccagcugaucaugaagaaccaccugagagacaucaugugcauccccuacugcaacuacagcaaguacugguaccugaaccacaccagcaccggcagaaccagccugcccagaugcuggcuggugagcaacggcagcuaccugaacgagacccacuucagcgacgacaucgagcagcaggccgacaacaugaucaccgagaugcugcagaaggaguaccuggacagacagggcaagaccccccugggccugguggaccuguucguguucagcaccagcuucuaccugaucagcaucuuccugcaccuggugaagauccccacccacagacacaucgugggcaagcccugccccaagccccacagacugaaccacaugggcaucugcagcugcggccuguacaagcagcccggcgugcccgugagauggaagagaugaggacuagucccuguucccagagcccacuuuuuuuucuuuuuuugaaauaaaauagccugucuuucagaucucaaaggcucuuuucagagccaccaaaaaaaaaaaaaaaaaaaaaaaaaaaaaaaaaaaaaaaaaaaaaaaaaaaaaaaaaaaaaaaaaaaaaaaaaaaaaaaaaaaaaaaaaaaaaaaaaaaaa

SEQ ID NO: 28411 - RNA, 1748 nt, Artificial Sequence
  mRNA product Design a-1 (hSL-A100) comprising derived and/or modified sequence from LASV(G1180-SLE-2010;Clade IV)__AIT17168__GPCmut5 (opt4)
aggagagucccgcagucggcguccagcggcucugcuuguucgugugugugucguugcaggccuuauucaagcuuaccaugggccagaucgugaccuucuuccaggaggugccccacgugaucgaggaggugaugaacaucgugcugaucgcccugagcauccuggccgugcugaagggccuguacaacuucgccaccugcggccuggugggccugcugaccuuccugcugcugugcggcagaagcugcaccgccagcagauacaagggcguguacgagcugcagacccuggagcugaacauggagacccugaacaugaccaugccccugagcugcaccaagaacaacagccaccacuacaucauggugggcaacgagaccggccuggagcugacccugaccaacaccagcaucaucaaccacaaguucugcaaccugagcgacgcccacaagaagaaccuguacgaccacgcccugaugagcaucaucagcaccuuccaccugagcauccccaacuucaaccaguacgaggccaugagcugcgacuucaacggcggcaagaucagcgugcaguacaaccugagccacagcuacgccggcgacgccgccaaccacugcggcaccguggccaacggcgugcugcagaccuucaugagaauggccuggggcggcagcuacaucgcccuggacagcggcugcggcagcugggacugcaucaugaccagcuaccaguaccugaucauccagaacaccaccugggaggaccacugccaguucagcagacccagccccaucggcuaccugggccugcugagccagagaaccagagacaucuacaucagcagaagacugcugggcaccuucaccuggacccugagcgacagcgagggcaaggacacccccggcggcuacugccugaccagauggaugcugaucgaggccgagcugaagugcuucggcaacaccgccguggccaagugcaacgagaagcacgacgaggaguucugcgacaugcugagacuguucgacuucaacaagcaggccauccagagacugaaggcccccgcccagaugagcauccagcugaucaacaaggccgugaacgcccugaucaacgaccagcugaucaugaagaaccaccugagagacaucaugugcauccccuacugcaacuacagcaaguacugguaccugaaccacaccaccaccggcaagaccagccugcccaagugcuggcuggugagcaacggcagcuaccugaacgagacccacuucagcgacgacaucgagcagcaggccgacaacaugaucaccgagaugcugcagaaggaguacauggagagacagggcaagaccccccugggccugguggaccuguucguguucagcaccagcuucuaccugaucagcaucuuccugcaccuggugaagauccccacccacagacacaucgugggcaagagcugccccaagccccacagacugaaccacaugggcaucugcagcugcggccuguacaagcagcccggcgugcccgugaaguggaagagaugaggacuagucccuguucccagagcccacuuuuuuuucuuuuuuugaaauaaaauagccugucuuucagaucucaaaggcucuuuucagagccaccaaaaaaaaaaaaaaaaaaaaaaaaaaaaaaaaaaaaaaaaaaaaaaaaaaaaaaaaaaaaaaaaaaaaaaaaaaaaaaaaaaaaaaaaaaaaaaaaaaaaa

SEQ ID NO: 28412 - RNA, 1748 nt, Artificial Sequence
  mRNA product Design a-1 (hSL-A100) comprising derived and/or modified sequence from LASV(G1442-SLE-2011;Clade IV)__AIT17180__GPCmut5 (opt4)
aggagagucccgcagucggcguccagcggcucugcuuguucgugugugugucguugcaggccuuauucaagcuuaccaugggccagaucgugaccuucuuccaggaggugccccacgugaucgaggaggugaugaacaucgugcugaucgcccugagcauccuggccgugcugaagggccuguacaacguggccaccugcggccugaucggccuggugaccuuccugcugcugugcggcagaagcugcaccaccacccuguacaagggcguguacgagcugcagacccuggagcugaacauggagacccugaacaugaccaugccccugagcugcaccaagaacaacagccaccacuacaucagagugggcaacgagaccggccuggagcugacccugaccaacaccagcaucaucaaccacaaguucugcaaccugagcgacgcccacaagaagaaccuguacgaccacgcccugaugagcaucaucagcaccuuccaccugagcauccccaacuucaaccaguacgaggccaugagcugcgacuucaacggcggcaagaucagcgugcaguacaaccugagccacagcuacgccggcgacgccgccaaccacugcggcaccguggccaacggcgugcugcagaccuucaugagaauggccuggggcggcagcuacaucgcccuggacagcggcugcggcaacugggacugcaucaugaccagcuaccaguaccugaucauccagaacaccaccugggacgaccacugccaguucagcagacccagccccaucggcuaccugggccugcugagccagagaaccagagacguguacaucagcagaagacugcugggcaccuucaccuggacccugagcgacagcgagggcaaggacacccccggcggcuacugccugaccagauggaugcugaucgaggccgagcugaagugcuucggcaacaccgccguggccaagugcaacgagaagcacgacgaggaguucugcgacaugcugagacuguucgacuucaacaagcaggccauccagagacugaaggcccccgcccagaugagcauccagcugaucaacaaggccgugaacgcccugaucaacgaccagcugaucaugaagaaccaccugagagacaucaugugcauccccuacugcaacuacagcaaguacugguaccugaacaacaccgccaccggcaagaccagccugcccaagugcuggcugaucagcaacggcagcuaccugaacgagacccacuucagcgacgacaucgagcaggaggccgacaacaugaucaccgagaugcugcagaaggaguacauggagagacagggcaagaccccccugggccugguggaccuguucguguucagcaccagcuucuaccugaucagcaucuuccugcaccuggugaagauccccacccacagacacaucgugggcaagagcugccccaagccccacagacugaaccacaugggcaucugcagcugcggccuguacaagcagcccggcgugcccgugagauggaagagaugaggacuagucccuguucccagagcccacuuuuuuuucuuuuuuugaaauaaaauagccugucuuucagaucucaaaggcucuuuucagagccaccaaaaaaaaaaaaaaaaaaaaaaaaaaaaaaaaaaaaaaaaaaaaaaaaaaaaaaaaaaaaaaaaaaaaaaaaaaaaaaaaaaaaaaaaaaaaaaaaaaaaa

SEQ ID NO: 28413 - RNA, 1748 nt, Artificial Sequence
  mRNA product Design a-1 (hSL-A100) comprising derived and/or modified sequence from LASV(G3010-SLE-2013;Clade IV)__AIT17344__GPCmut5 (opt4)
aggagagucccgcagucggcguccagcggcucugcuuguucgugugugugucguugcaggccuuauucaagcuuaccaugggccagaucgugaccuucuuccaggaggugccccacgugaucgaggaggugaugaacaucgugcugaucgcccugagcauccuggccgugcugaagggccuguacaacuucgccaccugcggccuggugggccuggugaccuuccugcugcugugcggcagaagcugcaccaccagccuguacaagggcguguacgagcugcagacccuggagcugaacauggagacccugaacaugaccaugccccugagcugcaccaagaacaacagccaccacuacaucauggugggcaacgagaccggccuggagcugacccugaccaacaccagcaucaucaaccacaaguucugcaaccugagcgacgcccacaagaagaaccuguacaaccacgcccugaugagcaucaucagcaccuuccaccugagcauccccaacuucaaccaguacgaggccaugagcugcgacuucaacggcggcaagaucagcgugcaguacaaccugagccacagcuacgccggcgacgccgccagccacugcggcaccguggccaacggcgugcugcagaccuucaugagaauggccuggggcggcagcuacaucgcccuggacagcggcugcggcaagugggacugcaucaugaccagcuaccaguaccugaucauccagaacaccaccugggaggaccacugccaguucagcagacccagccccaucggcuaccugggccugcugagccagagaaccagagacaucuacaucagcagaagacugcugggcaccuucaccuggacccugagcgacagcgagggcaaggacacccccggcggcuacugccugaccagauggaugcugaucgaggccgagcugaagugcuucggcaacaccgccguggccaagugcaacgagaagcacgacgaggaguucugcgacaugcugagacuguucgacuucaacaagcaggccauccagagacugaagacccccgcccagaugagcauccagcugaucaacaaggccgugaacgcccugaucaacgaccagcugaucaugaagaaccaccugagagacaucaugugcauccccuacugcaacuacagcaaguacugguaccugaaccacaccaccaccggcaagaccagccugcccaagugcuggcuggugagcaacggcagcuaccugaacgagacccacuucagcgacgacaucgagcagcaggccgacaacaugaucaccgagaugcugcagaaggaguacauggagagacagggcaagaccccccugggccugguggaccuguucguguucagcaccagcuucuaccugaucagcaucuuccugcaccuggugaagauccccacccacagacacaucgugggcaagagcugccccaagccccacagacugaaccacaugggcaucugcagcugcggccuguacaagcagcccggcgugcccgugagauggaagagaugaggacuagucccuguucccagagcccacuuuuuuuucuuuuuuugaaauaaaauagccugucuuucagaucucaaaggcucuuuucagagccaccaaaaaaaaaaaaaaaaaaaaaaaaaaaaaaaaaaaaaaaaaaaaaaaaaaaaaaaaaaaaaaaaaaaaaaaaaaaaaaaaaaaaaaaaaaaaaaaaaaaaa

SEQ ID NO: 28414 - RNA, 1748 nt, Artificial Sequence
  mRNA product Design a-1 (hSL-A100) comprising derived and/or modified sequence from LASV(G502-SLE-2009;Clade IV)__AIT17126__GPCmut5 (opt4)
aggagagucccgcagucggcguccagcggcucugcuuguucgugugugugucguugcaggccuuauucaagcuuaccaugggccagaucgugaccuucuuccaggaggugccccacgugaucgaggaggugaugaacaucgugcugaucgcccugagcauccuggccgugcugaagggccuguacaacuucgccaccugcggccuggugggccugcugaccuuccugcugcugugcggcagaagcugcaccaccggccuguacaagggcguguacgagcugcagacccuggagcugaacauggagacccugaacaugaccaugccccugagcugcaccaagaacaacagccaccacuacaucauggugggcaacgagaccggccuggagcugacccugaccaacaccagcaucaucaaccacaaguucugcaaccugagcgacgcccacaagaagaaccuguacgaccacgcccugaugagcaucaucagcaccuuccaccugagcauccccaacuucaaccaguacgaggccaugagcugcgacuucaacggcggcaagaucagcgugcaguacaaccugagccacagcuacgccggcgacgccgccgaccacugcggcaccguggccaacggcgugcugcagaccuucaugagaauggccuggggcggcagcuacaucgcccuggacagcggcugcggcagaugggacugcaucaugaccagcuaccaguaccugaucauccagaacaccaccugggaggaccacugccaguucagcagacccagccccaucggcuaccugggccugcugagccagagaaccagagacaucuacaucagcagaagacugcugggcaccuucaccuggacccugagcgacagcgagggcaaggacacccccggcggcuacugccugaccagauggaugcugaucgaggccgagcugaagugcuucggcaacaccgccguggccaagugcaacgagaagcacgacgaggaguucugcgacaugcugagacuguucgacuucaacaagcaggccauccagagacugaaggcccccgcccagaugagcauccagcugaucaacaaggccgugaacgcccugaucaacgaccagcuggugaugaagaaccaccugagagacaucaugugcauccccuacugcaacuacagcagauacugguaccugaaccacaccaccaccggcagaaccagccugcccaagugcuggcuggugagcaacggcagcuaccugaacgagacccacuucagcgacgacaucgagcagcaggccgacaacaugaucaccgagaugcugcagaaggaguacauggagagacagggcaagaccccccugggccugguggaccuguucguguucagcaccagcuucuaccugaucagcaucuuccugcaccuggugaagauccccacccacagacacaucgugggcaagagcugccccaagccccacagacugaaccacaugggcaucugcagcugcggccuguacaagcagcccggcgugcccgugaaguggaagagaugaggacuagucccuguucccagagcccacuuuuuuuucuuuuuuugaaauaaaauagccugucuuucagaucucaaaggcucuuuucagagccaccaaaaaaaaaaaaaaaaaaaaaaaaaaaaaaaaaaaaaaaaaaaaaaaaaaaaaaaaaaaaaaaaaaaaaaaaaaaaaaaaaaaaaaaaaaaaaaaaaaaaa

SEQ ID NO: 28415 - RNA, 1748 nt, Artificial Sequence
  mRNA product Design a-1 (hSL-A100) comprising derived and/or modified sequence from LASV(G733-SLE-2010;Clade IV)__AIT17154__GPCmut5 (opt4)
aggagagucccgcagucggcguccagcggcucugcuuguucgugugugugucguugcaggccuuauucaagcuuaccaugggccagaucgugaccuucuuccaggaggugccccacgugaucgaggaggugaugaacaucgugcugaucgcccugagcauccuggccgugcugaagggccuguacaacuucgccaccugcggcaucgugggccuggugagcuuccugcugcugugcggcagaagcugcaccaccagccuguacaagggcguguacgagcugcagacccuggagcugaacauggagacccugaacaugaccaugccccugagcugcaccaagaacaacagccaccacuacaucauggugggcaacgagaccggccuggagcugacccugaccaacaccagcaucaucaaccacaaguucugcaaccugagcgacgcccacaagaagaaccuguacgaccacgcccugaugagcaucaucagcaccuuccaccugagcauccccaacuucaaccaguacgaggccaugagcugcgacuucaacggcggcaagaucagcgugcaguacaaccugagccacagcuacgccggcgacgccgccaaccacugcggcaccaucgccaacggcgugcugcagaccuucaugagaauggccuggggcggcagcuacaucgcccuggacagcggcugcgacagaugggacugcaucaugaccagcuaccaguaccugaucauccagaacaccaccugggaggaccacugccaguucagcagacccagccccaucggcuaccugggccugcugagccagagaaccagagacaucuacaucagcagaagacugcugggcaccuucaccuggacccugagcgacagcgagggcaaggacacccccggcggcuacugccugaccagauggaugcugaucgaggccgagcugaagugcuucggcaacaccgccguggccaagugcaacgagaagcacgacgaggaguucugcgacaugcugagacuguucgacuucaacaagcaggccauccagagacugaaggcccccgcccagaugagcauccagcugaucaacaaggccgugaacgcccugaucaacgaccagcugaucaugaagaaccaccugagagacaucaugugcauccccuacugcaacuacagcaaguacugguaccugaaccacaccaccaccggcaagaccagccugcccaagugcuggcuggugagcaacggcagcuaccugaacgagacccacuucagcgacgacaucgagcagcaggccgacaacaugaucaccgagaugcugcagaaggaguacauggagagacagggcaagaccccccugggccugguggaccuguucguguucagcaccagcuucuaccugaucagcaucuuccugcaccuggugaagauccccacccacagacacguggugggcaagagcugccccaagccccacagacugaaccacaugggcaucugcagcugcggccuguacggccagcccggcgugcccgugaaguggaagagaugaggacuagucccuguucccagagcccacuuuuuuuucuuuuuuugaaauaaaauagccugucuuucagaucucaaaggcucuuuucagagccaccaaaaaaaaaaaaaaaaaaaaaaaaaaaaaaaaaaaaaaaaaaaaaaaaaaaaaaaaaaaaaaaaaaaaaaaaaaaaaaaaaaaaaaaaaaaaaaaaaaaaa

SEQ ID NO: 28416 - RNA, 1748 nt, Artificial Sequence
  mRNA product Design a-1 (hSL-A100) comprising derived and/or modified sequence from MOPV/LASV reassortant(IGS-1;Clade IV)__AFY05576__GPCmut5 (opt4)
aggagagucccgcagucggcguccagcggcucugcuuguucgugugugugucguugcaggccuuauucaagcuuaccaugggccagaucgugaccuucuuccaggaggugccccacgugaucgaggaggugaugaacaucgugcugaucgcccugagcgugcuggccgugcugaagggccuguacaacuucgccaccugcggccuggugggccuggugaccuuccugcugcugugcggcagaagcugcaccaccagccuguacaagggcguguacgagcugcagacccuggagcugaacauggagacccugaacaugaccaugccccugagcugcaccaagaacaacagccaccacuacaucauggugggcaacgagaccggccuggagcugacccugaccaacaccagcaucaucaaccacaaguucugcaaccugagcgacgcccacaagaagaaccuguacgaccacgcccugaugagcaucaucagcaccuuccaccugagcauccccaacuucaaccaguacgaggccaugagcugcgacuucaacggcggcaagaucagcgugcaguacaaccugagccacagcuacgccggcgacgccgccaaccacugcggcaccguggccaacggcgugcugcagaccuucaugagaauggccuggggcggcagcuacaucgcccuggacagcggcugcggcaacugggacugcaucaugaccagcuaccaguaccugaucauccagaacaccaccugggaggaccacugccaguucagcagacccagccccaucggcuaccugggccugcugagccagagaaccagagacaucuacaucagcagaagacugcugggcaccuucaccuggacccugagcgacagcgagggcgaggacacccccggcggcuacugccugaccagauggaugcugaucgaggccgagcugaagugcuucggcaacaccgccguggccaagugcaacgagaagcacgacgaggaguucugcgacaugcugagacuguucgacuucaacaagcaggccauccagagacugaaggcccccgcccagaugagcauccagcugaucaacaaggccgugaacgcccugaucaacgaccagcugaucaugaagaaccaccugagagacaucaugugcauccccuacugcaacuacagcaaguacugguaccugaaccacaccaccaccggcagaaccagccugcccaagugcuggcuggugagcaacggcagcuaccugaacgagacccacuucagcgacgacaucgagcagcaggccgacaacaugaucaccgagaugcugcagaaggaguacauggagagacagggcaagaccccccugggccugguggaccuguucguguucagcaccagcuucuaccugaucagcaucuuccugcaccuggugaagauccccacccacagacacaucgugggcaagagcugccccaagccccacagacugaaccacaugggcaucugcagcugcggccuguacaagcagcccggcgugcccgugaaguggaagagaugaggacuagucccuguucccagagcccacuuuuuuuucuuuuuuugaaauaaaauagccugucuuucagaucucaaaggcucuuuucagagccaccaaaaaaaaaaaaaaaaaaaaaaaaaaaaaaaaaaaaaaaaaaaaaaaaaaaaaaaaaaaaaaaaaaaaaaaaaaaaaaaaaaaaaaaaaaaaaaaaaaaaa

SEQ ID NO: 28417 - RNA, 1748 nt, Artificial Sequence
  mRNA product Design a-1 (hSL-A100) comprising derived and/or modified sequence from LASV(LM765-SLE-2012;Clade IV)__AIT17814__GPCmut5 (opt4)
aggagagucccgcagucggcguccagcggcucugcuuguucgugugugugucguugcaggccuuauucaagcuuaccaugggccagaucgugaccuucuuccaggaggugccccacgugaucgaggaggugaugaacaucgugcugaucgcccugagcauccuggccgugcugaagggccuguacaacuucgccaccugcggccuggugggccuggugaccuuccugcugcugugcggcagaagcugcaccaccagccuguacaagggcguguacgagcugcagacccuggagcugaacauggagacccugaacaugaccaugccccugagcugcaccaagaacaacagccaccacuacaucauggugggcaacgagaccggccuggagcugacccugaccaacaccagcaucaucgaccacaaguucugcaaccugagcgacgcccacagaaagaaccuguacgaccacgcccugaugagcaucaucagcaccuuccaccugagcauccccaacuucaaccaguacgaggccaugagcugcgacuucaacggcggcaagaucagcgugcaguacaaccugagccacagcuacgccaaggacgccgccgaccacugcggcaccguggccaacggcgugcugcagaccuucaugagaauggccuggggcggcagcuacaucgcccuggacagcggcugcggcagaugggacugcaucaugaccagcuaccaguaccugaucauccagaacaccaccugggaggaccacugccaguucagcagacccagccccaucggcuaccugggccugcugagccagagaaccagagacaucuacaucagcagaagacugcugggcaccuucaccuggacccugagcgacagcgagggcaaggacacccccggcggcuacugccugaccagauggaugcugaucgaggccgagcugaagugcuucggcaacaccgccguggccaagugcaacgagaagcacgacgaggaguucugcgacaugcugagacuguucgacuucaacaagcaggccauccagagacugaaggcccccgcccagaugagcauccagcugaucaacaaggccgugaacgcccugaucaacgaccagcugaucaugaagaaccaccugagagacaucaugugcauccccuacugcaacuacagcaaguacugguaccugaaccacaccaccaccggcaagaccagccugcccaagugcuggcuggugagcaacggcagcuaccugaacgagacccacuucagcgacgacaucgagcagcaggccgacaacaugaucaccgagaugcugcagaaggaguacauggagagacagggcaagaccccccugggccugguggaccuguucguguucagcaccagcuucuaccugaucagcaucuuccugcaccuggugaagauccccacccacagacacaucgugggcaagcccugccccaagccccacagacugaaccacaugggcaucugcagcugcggccuguacaagcagcccggcgugcccgugaaguggaagagaugaggacuagucccuguucccagagcccacuuuuuuuucuuuuuuugaaauaaaauagccugucuuucagaucucaaaggcucuuuucagagccaccaaaaaaaaaaaaaaaaaaaaaaaaaaaaaaaaaaaaaaaaaaaaaaaaaaaaaaaaaaaaaaaaaaaaaaaaaaaaaaaaaaaaaaaaaaaaaaaaaaaaa

SEQ ID NO: 28418 - RNA, 1748 nt, Artificial Sequence
  mRNA product Design a-1 (hSL-A100) comprising derived and/or modified sequence from LASV(LM776-SLE-2012;Clade IV)__AIT17824__GPCmut5 (opt4)
aggagagucccgcagucggcguccagcggcucugcuuguucgugugugugucguugcaggccuuauucaagcuuaccaugggccagaucgugaccuucuuccaggaggugccccacgugaucgaggaggugaugaacaucgugcugaucgcccugagcauccuggccgugcugaagggccuguacaacuucgccaccugcggccuggugggccuggugaccuuccugcugcugugcggcagaagcugcaccaccagcguguacaagggcguguacgagcugcagacccuggagcugaacauggagacccugaacaugaccaugccccugagcugcaccaagaacaacagccaccacuacaucauggugggcaacgagaccggccuggagcugacccugaccaacaccagcaucaucaaccacaaguucugcaaccugagcgacgcccacaagaagaaccuguacgaccacgcccugaugagcaucaucagcaccuuccaccugagcauccccaacuucaaccaguacgaggccaugagcugcgacuucaacggcggcaagaucagcgugcaguacaaccugagccacagcuacgccggcgacgccgccaaccacugcggcaccguggccaacggcgugcugcagaccuucaugagaauggccuggggcggcagcuacaucgcccuggacagcggcugcggcaagugggacugcaucaugaccagcuaccaguaccugaucauccagaacaccaccugggaggaccacugccaguucagcagacccagccccaucggcuaccugggccugcugagccagagaaccagagacaucuacaucagcagaagacugcugggcaccuucaccuggacccugagcgacagcgagggcaaggacacccccggcggcuacugccugaccagauggaugcugaucgaggccgagcugaagugcuucggcaacaccgccguggccaagugcaacgagaagcacgacgaggaguucugcgacaugcugagacuguucgacuucaacaagcaggccauccagagacugaaggcccccgcccagaugagcauccagcugaucaacaaggccgugaacgcccugaucaacgaccagcugaucaugaagaaccaccugagagacaucaugugcauccccuacugcaacuacagcaaguacugguaccugaaccacaccaccaccggcaagaccagccugcccaagugcuggcuggugagcaacggcagcuaccugaacgagacccacuucagcgacgacaucgagcagcaggccgacaacaugaucaccgagaugcugcagaaggaguacauggagagacagggcaagaccccccugggccugguggaccuguucguguucagcaccagcuucuaccugaucagcaucuuccugcaccuggugaagauccccacccacagacacaucgugggcaagagcugccccaagccccacagacugaaccacaugggcaucugcagcugcggccuguacaagcagcccggcgugcccgugagauggaagagaugaggacuagucccuguucccagagcccacuuuuuuuucuuuuuuugaaauaaaauagccugucuuucagaucucaaaggcucuuuucagagccaccaaaaaaaaaaaaaaaaaaaaaaaaaaaaaaaaaaaaaaaaaaaaaaaaaaaaaaaaaaaaaaaaaaaaaaaaaaaaaaaaaaaaaaaaaaaaaaaaaaaaa

SEQ ID NO: 28419 - RNA, 1748 nt, Artificial Sequence
  mRNA product Design a-1 (hSL-A100) comprising derived and/or modified sequence from LASV(Mad39;Clade IV)__ANH09722__GPCmut5 (opt4)
aggagagucccgcagucggcguccagcggcucugcuuguucgugugugugucguugcaggccuuauucaagcuuaccaugggccagaucgugaccuucuuccaggaggugccccacgugaucgaggaggugaugaacaucgugcugaucgcccugagcauccuggccgugcugaagggccuguacaacguggccaccugcggccugaucggccuggugaccuuccugcugcugugcggcagaagcugcaccaccacccuguacaagggcguguacgagcugcaggcccuggagcugaacauggagacccugaacaugaccaugccccugagcugcaccaagaacaacagccaccacuacaucagagugggcaacgagaccggccuggagcugacccugaccaacaccagccugaucaaccacaaguucugcaaccugagcgacgcccacaagaagaaccuguacgaccacgcccugaugagcaucaucagcaccuuccaccugagcauccccaacuucaaccaguacgaggccaugagcugcgacuucaacgacggcaagaucagcgugcaguacaaccugagccacaccuacgccggcgacaccgccaaccacugcggcaccguggccaacggcgugcugcagaccuucaugagaauggccuggggcggcagcuacaucgcccuggacagcggcugcggcggcugggacugcaucaugaccagcuaccaguaccugaucauccagaacaccaccugggaggaccacugccaguucagcagacccagccccaucggcuaccugggccugcugagccagagaaccagagacaucuacaucagcagaagacugcugggcaccuucaccuggacccugagcgacagcgagggcaaggacacccccggcggcuacugccugaccagauggaugcugaucgaggccgagcugaagugcuucggcaacaccgccguggccaagugcaacgagaagcacgacgaggaguucugcgacaugcugagacuguucgacuucaacaagcaggccauccagagacugaaggcccccgcccagaugagcauccagcugaucaacaaggccgugaacgcccugaucaacgaccagcugaucaugaagaaccaccugagagacaucaugugcauccccuacugcaacuacagcaaguacugguaccugaaccacaccgugaccggcaagaccagccugcccaagugcuggcuggugagcaacggcagcuaccugaacgagacccacuucagcgacgacaucgagcagcaggccgacaacaugaucaccgagaugcugcagaaggaguacauggagagacagggcaagaccccccugggccugguggaccuguucguguucagcaccagcuucuaccugaucagcaucuuccugcaccuggugaagauccccacccacagacacguggugggcaagcccugccccaagccccacagacugaaccacaugggcaucugcagcugcggcuucuacaagcagcccggcgugcccgugagauggaagagaugaggacuagucccuguucccagagcccacuuuuuuuucuuuuuuugaaauaaaauagccugucuuucagaucucaaaggcucuuuucagagccaccaaaaaaaaaaaaaaaaaaaaaaaaaaaaaaaaaaaaaaaaaaaaaaaaaaaaaaaaaaaaaaaaaaaaaaaaaaaaaaaaaaaaaaaaaaaaaaaaaaaaa

SEQ ID NO: 28420 - RNA, 1748 nt, Artificial Sequence
  mRNA product Design a-1 (hSL-A100) comprising derived and/or modified sequence from LASV(Z0947-SLE-2011;Clade IV)__AIT17840__GPCmut5 (opt4)
aggagagucccgcagucggcguccagcggcucugcuuguucgugugugugucguugcaggccuuauucaagcuuaccaugggccagaucgugaccuucuuccaggaggugccccacgugaucgaggaggugaugaacaucgugcugaucgcccugagcauccuggccgugcugaagggccuguacaacuucgccaccugcggccuggugggccuggugaccuuccugcugcugugcggcagaagcugcaccaucagccuguacaagggcguguacgagcugcagacccuggagcugaacauggagacccugaacaugaccaugccccugagcugcaccaagaacaacagccaccacuacaucauggugggcaacgagaccggccuggagcugacccugaccaacaccagcaucaucaaccacaaguucugcaaccugagcgacgcccacaagaagaaccuguacgaccacgcccugaugagcaucaucagcaccuuccaccugagcauccccaacuucaaccaguacgaggccaugagcugcgacuucaacggcggcaagaucagcgugcaguacaaccugagccacagcuacgccggcgacgccgccaaccacugcggcaccguggccaacggcgugcugcagaccuucaugagaauggccuggggcggcagcuacaucgcccuggacagcggcugcgacagaugggacugcaucaugaccagcuaccaguaccugaucauccagaacaccaccugggaggaccacugccaguucagcagacccagccccaucggcuaccugggccugcugagccagagaaccagagacaucuacaucagcagaagacugcugggcaccuucaccuggacccugagcgacagcgagggcaaggacacccccggcggcuacugccugaccagauggaugcugaucgaggccgagcugaagugcuucggcaacaccgccguggccaagugcaacgagaagcacgacgaggaguucugcgacaugcugagacuguucgacuucaacaagcaggccauccagagacugaaggcccccgcccagaugagcauccagcugaucaacaaggccgugaacgcccugaucaacgaccagcugaucaugaagaaccaccugagagacaucaugugcauccccuacugcaacuacagcaaguacugguaccugaaccacaccaccaccggcaagaccagccugcccaagugcuggcuggugagcaacggcagcuaccugaacgagacccacuucagcgacgacaucgagcagcaggccgacaacaugaucaccgagaugcugcagaaggaguacauggagagacagggcaagaccccccugggccugguggaccuguucguguucagcaccagcuucuaccugaucagcaucuuccugcaccuggugaagauccccacccacagacacaucgugggcaagcccugccccaagccccacagacugaaccacaugggcaucugcagcugcggccuguacaagcagcccggcgugcccgugaaguggaagagaugaggacuagucccuguucccagagcccacuuuuuuuucuuuuuuugaaauaaaauagccugucuuucagaucucaaaggcucuuuucagagccaccaaaaaaaaaaaaaaaaaaaaaaaaaaaaaaaaaaaaaaaaaaaaaaaaaaaaaaaaaaaaaaaaaaaaaaaaaaaaaaaaaaaaaaaaaaaaaaaaaaaaa

SEQ ID NO: 28421 - RNA, 1748 nt, Artificial Sequence
  mRNA product Design a-1 (hSL-A100) comprising derived and/or modified sequence from LASV(Josiah;Clade IV)__NP_694870__GPCmut5 (opt5)
aggagagucccgcagucggcguccagcggcucugcuuguucgugugugugucguugcaggccuuauucaagcuuaccaugggccagaucgugaccuucuuucaagaggucccccacguuauugaagaggugaugaacaucgugcugauugcccucagcguccuggcugugcuuaaggggcuguacaauuucgccacaugcggacucguuggccuggugacguuucuucugcucugugggagauccugcaccacaucucuguauaaaggagucuacgaacugcagacccucgagcugaacauggaaacacuuaauaugaccaugccucugagcuguacaaagaacaauucccaucacuauaucauggugggcaacgagaccgggcucgagcugacgcuuaccaauacaucuauuaucaaccauaaauucugcaaucugagcgacgcgcacaagaaaaaccucuacgaucaugcucugauguccaucauuucuaccuuucaccugagcaucccgaauuucaaccaguaugaagccauguccugugacuuuaauggaggcaagauuagcguucaguacaaccucucucacuccuaugccggcgaugcugccaaucauugcgggacaguggcuaacggaguccugcaaaccuucaugcggauggccuggggcgggagcuacaucgcgcuugacucuggauguggcaacugggauugcauuaugacguccuaccaguaucugaucauucagaauacaaccugggaggaccacugucaguuuagccgccccucuccuaucggguaccucggacugcuuucccaaagaacacgggauaucuauauuagccgcagacugcucggcaccuucaccuggacacuguccgacucugaaggcaaggauacgcccgggggauacugccugacccgguggaugcucaucgaggccgagcugaaauguuuuggcaacacagcuguggccaagugcaaugaaaaacaugacgaggaguucugcgauaugcuucgccuguuugacuucaacaagcaggcuauucagagacucaaagccccugcgcagaugagcauccaacugauuaauaaggccgugaacgcucuuaucaaugaucagcugaucaugaagaaccaccuccgggacauuauguguauccccuauugcaauuacuccaaauauugguaccugaaccacaccacaaccgggcgcacgagccugccuaaguguuggcucgucucuaauggauccuaccugaacgaaacacauuucagcgacgauauugaacagcaagccgacaauaugaucaccgagaugcuucagaaagaguauauggaaagacagggcaagaccccgcuggggcucguugaucuguuuguguucucuaccagcuuuuaccugauuuccaucuuccuucaccucgugaaaauccccacacaucggcacauugucggaaagucuugcccuaaaccccaucgccugaaccacaugggcaucuguagcugcggccuguauaagcagccuggggugcccguuaaguggaaaagaugaggacuagucccuguucccagagcccacuuuuuuuucuuuuuuugaaauaaaauagccugucuuucagaucucaaaggcucuuuucagagccaccaaaaaaaaaaaaaaaaaaaaaaaaaaaaaaaaaaaaaaaaaaaaaaaaaaaaaaaaaaaaaaaaaaaaaaaaaaaaaaaaaaaaaaaaaaaaaaaaaaaaa

SEQ ID NO: 28422 - RNA, 1745 nt, Artificial Sequence
  mRNA product Design a-1 (hSL-A100) comprising derived and/or modified sequence from LASV(LP;Clade I)__AAF86701__GPCmut5 (opt5)
aggagagucccgcagucggcguccagcggcucugcuuguucgugugugugucguugcaggccuuauucaagcuuaccaugggccagaucauuaccuucuuucaagaggugccccacgucaucgaagagguuaugaacauugugcugaucgcccucagccugcuugcuauucugaaggggcucuacaauaucgccacaugcggaaucauuggccugguggcguuccuuuuucugugugggaaauccugcucucucacgcugaagggaggcuaugaacugcagacccucgagcugaacauggaaacacuuaauaugaccaugccucugagcuguaccaaaaacuccucucaucacuacaucagagucgggaaugagacaggacucgagcugacacuuaccaacacgagcauuaucaaucauaaguucugcaaccuguccgacgcucacaaaaagaaucucuaugaucaugcccugaugucuauuaucagcaccuuucaccuguccauuccgaacuucaaucaguacgaagccaugagcugugacuuuaacggcggcaagaucucugugcaguauaaucucucccacagcuacgcuggggaugccgcugagcauugcggaacaguugccaacggcgugcugcaaaccuucaugcggauggcguggggagggcgcuauaucgcccuugacucuggcugugggaauugggauugcauuaugacauccuaccaguaccugaucauucagaacaccacgugggaagaccacugucaguuuagcagacccucuccuaucggauaucucggccugcuuucccaacggacacgcgauauuuacaucagcagacggcugcucggcaccuucacauggacccuguccgacucugaggggaacgagacccccggaggcuauugccugacacgcuggaugcucaucgaagcugagcugaaauguuuugggaauacggccgucgcuaagugcaacgaaaaacaugaugaggaguucugcgacaugcuuagacuguuugauuucaauaagcaggccauucggcgccucaaagcgccugcccagaugagcauccagcugauuaacaaggcugugaaugcccuuaucaacgaccaacugauuaugaagaaucaccucagagauaucauguguauccccuacugcaacuauuccaaauacugguaucugaaucacaccagcucuggacggacaucccugccuaaguguuggcucauuagcaacggcucuuaccugaaugaaacccaguucagcgacgacaucgagcagcaagcugauaacaugauuacagaaaugcuucagaaagaguacaucgaacgccaggggaagaccccgcugggacucguugacauuuuuaucuucuccacgucuuuuuaucugauuagcaucuuccugcaucuuaucaaaauucccacacacagacauaucgugggcaagccuugccccaaaccucaccggcucaaucauaugggcgucuguuccugcgggcuguacaagcaccccggagugccgaccaaguggaaacgcugaggacuagucccuguucccagagcccacuuuuuuuucuuuuuuugaaauaaaauagccugucuuucagaucucaaaggcucuuuucagagccaccaaaaaaaaaaaaaaaaaaaaaaaaaaaaaaaaaaaaaaaaaaaaaaaaaaaaaaaaaaaaaaaaaaaaaaaaaaaaaaaaaaaaaaaaaaaaaaaaaaaaa

SEQ ID NO: 28423 - RNA, 1745 nt, Artificial Sequence
  mRNA product Design a-1 (hSL-A100) comprising derived and/or modified sequence from LASV(803213;Clade II)__AAF86703__GPCmut5 (opt5)
aggagagucccgcagucggcguccagcggcucugcuuguucgugugugugucguugcaggccuuauucaagcuuaccaugggccagaucauuaccuucuuucaagaggugccccacgucaucgaagagguuaugaacauugugcugaucgcccucagccugcuugcuauucugaaggggaucuacaauguggccacaugcggacucuucggccugaucuccuuucuucugcucugugggagaucuugcagcgucacguauaaaggaguguacgaacugcagacccuggagcucaacauggcgaaucugaacaugacaaugccucuuuccuguaccaagaauaacucucaucacuauauuaugguuggcaaugaaacagggcuggagcucacccugacaaacaccagcaucauuaaucauaaauucugcaaccuuuccgacgcucacaagaaaaaucuguacgaucaugcccucaugucuaucauuagcacguuucaccuguccaucccgaacuucaaucaguaugaggccaugagcugugacuuuaacggaggcaagauuucugugcaguacaaucugucccacagcuucgcugucgaugccgcuaaccauugcggcaccaucgccaacggggugcuccaaacauuuaugcggauggcguggggaggcucuuauaucgcccuggacuccggguguggaaauugggauugcauuaugaccagcuaccaguaccuuaucauucagaacacaaccugggaagaccacugucaguucucucgccccuccccuaucggcuaucuggggcuccugagccaaagaacgcgggauauuuacaucucccgcagacuucugggaacauuuaccuggacacucucugacagcgagggcaaugaagcucccggcggguauugccugacccgguggaugcugaucgaggccgagcucaaguguuucggaaacaccgcuguugccaaaugcaaugaaaagcaugaugaggaauuuugcgacaugcugcgccuuuucgauuucaacaaacaggcgauuaagagacugaaaacgccugcccagauguccauccagcucauuaauaaggcugugaacgcccugaucaaugaccaacuuauuaugaagaaccaucugcgggauaucauguguauccccuacugcaauuauagccgcuacugguaucucaaccacacagucaccggcaaaacaucucugccuagauguuggcugguguccaaugggagcuaccucaacgagacccacuuuucugacgacauugaacagcaggcugauaauaugaucacagagaugcugcaaaaggaguacauggaccggcagggaaaaaccccgcuuggccugguggaucucuucgucuuuagcacguccuucuaucugauuucuaucuuucugcaccuuguuaagauucccacacaucgccacaucguggggaaaccuugccccaagccucauagacucaaccacaugggaauuuguagcugcggccuguacaaacaccccggcgugccggucaaguggaagcggugaggacuagucccuguucccagagcccacuuuuuuuucuuuuuuugaaauaaaauagccugucuuucagaucucaaaggcucuuuucagagccaccaaaaaaaaaaaaaaaaaaaaaaaaaaaaaaaaaaaaaaaaaaaaaaaaaaaaaaaaaaaaaaaaaaaaaaaaaaaaaaaaaaaaaaaaaaaaaaaaaaaaa

SEQ ID NO: 28424 - RNA, 1745 nt, Artificial Sequence
  mRNA product Design a-1 (hSL-A100) comprising derived and/or modified sequence from LASV(GA391;Clade III)__CAA36645__GPCmut5 (opt5)
aggagagucccgcagucggcguccagcggcucugcuuguucgugugugugucguugcaggccuuauucaagcuuaccaugggccagaucgugaccuucuuucaagaggucccccacguuauugaagaggugaugaacaucgugcugauugcccucagcauccuggcuauucuuaaggggcuguacaaugucgccacaugcggacucaucggccuggugacguuccuucugcucuccgggagaucuuguagccugaucuauaaaggaaccuacgaacugcagacacucgagcugaacauggaaacccuuaauaugacaaugccucuguccugcaccaagaacaauucucaucacuauauucggguuggcaacgagacagggcucgagcugacccuuacgaauaccagcauccugaaccauaaauuuuguaaucucuccgacgcgcacaagcgcaaccuguacgaucauucucugaugagcauuaucuccacauuccaccucagcauuccgaauuuuaaccaguaugaagcuaugucuugcgacuucaauggaggcaaaaucaccgugcaguacaaccugucccacagcuuugccgucgaugccgcuggccauugugggacacuugccaauggagugcugcaaaccuucaugagaauggcuuggggcgggucuuauauugcccucgacuccggaugcggcaacugggauuguaucaugacgagcuaccaguaccugaucauucagaacacaaccugggacgaucacugccaguuuucucggcccuccccuaucggguaucuuggacugcucagccaacgcacaagagacauuuacaucucccggcgccugcugggcaccuucaccuggacacucucugauagcgagggcaaugaaacgcccgggggauauugucugaccagauggaugcuuauugaggcggagcugaagugcuuuggcaacacagccguugcuaaguguaaugaaaaacaugacgaggaguucugcgauaugcuccggcuguuugacuucaacaagcaggccauccgcagacuuaaaaccccugcucagauguccauccagcugauuaauaaggccgugaacgcgcucaucaaugaucaacugauuaugaaaaaccaucugcgggacaucaugugcauucccuacuguaauuauagccgcuacugguaucucaaccacacaucuaccgggaagacgucccugccuagaugcuggcuuaucagcaauggaucuuaccugaacgaaacaaaguucagcgacgauaucgaacagcaggccgacaauaugauuaccgagaugcuccaaaaagaguacaucgaucggcagggcaagaccccgcuggggcuggucgaccuuuuuguguucuccacaucuuuuuaucucauuagcaucuuccugcaccuggugaaaauucccacccaccgccauaucgucggaaagccuugucccaaaccucacagacucaaccauaugggcauuugcuccuguggccuguacaagcagcccgggguuccggugcgguggaaaagaugaggacuagucccuguucccagagcccacuuuuuuuucuuuuuuugaaauaaaauagccugucuuucagaucucaaaggcucuuuucagagccaccaaaaaaaaaaaaaaaaaaaaaaaaaaaaaaaaaaaaaaaaaaaaaaaaaaaaaaaaaaaaaaaaaaaaaaaaaaaaaaaaaaaaaaaaaaaaaaaaaaaaa

SEQ ID NO: 28425 - RNA, 1748 nt, Artificial Sequence
  mRNA product Design a-1 (hSL-A100) comprising derived and/or modified sequence from LASV(AV;Clade V)__CCA30314__GPCmut5 (opt5)
aggagagucccgcagucggcguccagcggcucugcuuguucgugugugugucguugcaggccuuauucaagcuuaccaugggccagaucgugaccuucuuucaagaggucccccacguuauugaagaggugaugaacaucgugcugauugcccucagcauccuggcuguccuuaaggggcuguacaauauugccacaugcggacucaucggccugaucacguuccuucugcucugugggagauccugcucuagcaaccuguauaaaggaguguacgaacugcagucccucgaccugaauauggagacccuuaacaugacaaugccucugucuuguaccaagaauaacagccaucacuauauucggguuggcaaugauacagggcucgaacugacccuuacaaacaccuccauccugaaucauaaauuuugcaaccucucugacgcgcacaagaaagaucuguacgaccaugcucugaugagcauuaucuccacguuccaccucagcauuccgaauuuuaaccaguaugaggccaugucuugugauuucaauggaggcaagaucuccgugcaguacaaccugagccacucuuaugccauugacgcugccaaucauugcggcaccgucgcuaacgggauccuucaaacauuuaugcgcauggccuggggaggcuccuacaucgcgcuggauagcggguguggaaacugggacugcauuaugaccucuuaccaguaucucaucauucagaauacaaccugggagaaccacugucaguucuccagacccagcccuaucggcuaccuggggcuucugucccaacggacgcgcgauauuuauaucucuagacggcuccugggaacauuuaccuggacacugagcgacuccgaaggcaaugccacccccggcggguacugccucacccgcuggaugcugaucgaggcugaacuuaaguguuucggaaacacagccguggcuaaaugcaaugagaagcaugaugaggaauuuugcgacaugcugagacucuucgauuuuaacaaacaggccauuagccggcugaagucuccugcgcagauguccauccagcuuauuaauaaagccguuaacgcucugaucaaugaccaacucauuaugaagaaccaucugcgcgacaucauguguauccccuauugcaauuacagcaaguauugguaccugaaccacacgauuaccggcaaaacaucucucccuaaguguuggcuggugagcaauggguccuaccuuaacgagacccacuucucugaugacaucgaacagcaggccgauaauaugauuacagagaugcugcaaaaagaauauauggagagacagggaaagaccccgcucggccuggucgaccuguucguguuuagcacguccuucuaccuuaucagcauuuuucuccggcuggugaaaauccccacacaccgccauauugucgggaagccuugccccaaaccucacagacugaaccauaugggaaucuguucuugcggccucuauaagcagcccggcguuccggugcgguggaagcgcugaggacuagucccuguucccagagcccacuuuuuuuucuuuuuuugaaauaaaauagccugucuuucagaucucaaaggcucuuuucagagccaccaaaaaaaaaaaaaaaaaaaaaaaaaaaaaaaaaaaaaaaaaaaaaaaaaaaaaaaaaaaaaaaaaaaaaaaaaaaaaaaaaaaaaaaaaaaaaaaaaaaaa

SEQ ID NO: 28426 - RNA, 1745 nt, Artificial Sequence
  mRNA product Design a-1 (hSL-A100) comprising derived and/or modified sequence from LASV(Togo/2016/7082;Clade VI)__AMR44577__GPCmut5 (opt5)
aggagagucccgcagucggcguccagcggcucugcuuguucgugugugugucguugcaggccuuauucaagcuuaccaugggccagaucauuaccuucuuucaagaggugccccacgucaucgaagagguuaugaacauugugcugaucgcccucagccugcuugcuauucugaaggggguguacaaugucgccacaugcggaaucaucggccucgugacguuccuguuucuuugugggagauccugcucucugauuuauaaaggaagcuacgaacuccagacccuggagcugaacauggaaacacucaauaugaccaugccucuguccuguacaaagaacucuagccaucacuauauccggguuggcaaugagaccgggcuugagcugacacucaccaacacguccauuaucaaucauaaauucugcaaccugucugacgcgcacaagcgcaaucuuuacgaucaugcucugaugagcauucucuccaccuuucaccugagcaucccgaacuucaaucaguaugaagccaugucuugugacuuuaacggaggcaaaauuuccgugcaguacaaucugagccacgccuaugcugucgaugccgcugagcauugcggcacaguggccaacgggguucuccaaaccuucaugagaauggcguggggaggcucuuacaucgcccuggacuccggguguggaaauugggauugcaucaugacaagcuaccaguaucuuauuauccagaacaccacgugggaagaccacugucaguuuucucggcccuccccuauuggcuaccuggggcuccugagccaacgcacaagagauaucuauauuucccggcgccuucugggaaccuucacauggacccucucugacagcgagggcaacgagacccccggcggguacugccugacaagauggaugcugaucgaagcugagcucaaguguuuuggaaauacggccguggcuaagugcaacgaaaaacaugaugaggaguucugcgacaugcugcggcuuuuugauuucaauaagcaggccauccagcgccugaaauccccugcgcagaugagcauucaacucaucaacaaggccgucaaugcucugauuaacgaccagcuuaucaugaaaaaucaccugagagauaugauguguauucccuauugcaacuacucuaaguauugguaccucaaucacaccuccagcggccggacaucucugccuaaguguuggcuggugagcaacggguccuaccucaaugaaacccauuucucugacgacaucgagcagcaagccgauaacaugaucacagaaaugcugcagaaagaguauauugaccgccagggaaagaccccgcuuggccugguggaucucuuugucuucagcacguccuuuuaccugaucagcauuuuccugcaccuuaucaaaauucccacacauagacacaucguugggaagccuugccccaaaccucaucggcucaaucacaugggaauuuguucuugcggccuguauaagcagcccggcgugccgacccgcuggaaaagaugaggacuagucccuguucccagagcccacuuuuuuuucuuuuuuugaaauaaaauagccugucuuucagaucucaaaggcucuuuucagagccaccaaaaaaaaaaaaaaaaaaaaaaaaaaaaaaaaaaaaaaaaaaaaaaaaaaaaaaaaaaaaaaaaaaaaaaaaaaaaaaaaaaaaaaaaaaaaaaaaaaaaa

SEQ ID NO: 28427 - RNA, 1745 nt, Artificial Sequence
  mRNA product Design a-1 (hSL-A100) comprising derived and/or modified sequence from LASV(KAK-428;Clade n.d. (VII))__ANH09740__GPCmut5 (opt5)
aggagagucccgcagucggcguccagcggcucugcuuguucgugugugugucguugcaggccuuauucaagcuuaccaugggccagaucgugaccuucuuucaagaggucccccacguuauugaagaggugaugaacaucgugcugauugcccucagccugcuugcuauccugaaggggcucuacaauuucgccacaugcggagucauuggccugaucacguuucuucugcucugugggagauccugcucugcgaccuauaaaggacaguacgaacugcagacacuggagcucaacauggaaagccugaauaugaccaugccucuuuccuguacaaagaacaauucucaucacuauauccgggcuggcaacaauaccgggcuggagcucacacugaccaacacgagcauuaucucccauaaauucugcaaucuuucugacgcccacaagaaaaaccuguacgaucauacccucaugagcauuaucacaaccuuucaccuguccauuccgaauuucaaccaguaugaggccaugagcugugacuuuaauggaggcaagaucucuauucaauacaaccugucccacagcuaugcuggcgaugccgcucagcauugcgggacaguggccaauggaguucuccagaccuucaugcgcauggcguggggcgggucuuaccuggcccuugacuccggauguagaggcugggauugcaucaucagcucuuaccaguaucugauuauccaaaacacgacaugggacgaucacugucaguuuucccggcccagcccuauuggguaccucggauucgugucccagaagacccgcgacaucuauauuucuagacggcugcuuggcacauuuaccuggacccugagcgauuccgaaggccaugacaugcccgggggauacugccucacacgcuggaugcugaucgaggcugaucugaaauguuucggcaacacggccgucgcuaagugcaaugaaaaacacgacgaggaguuuugcgauauguggagacucuucgacuucaacaagcaggccauccaacggcugaaagcgccugcccagaugaauauucagcuuaucaacaaggcugugaaugcccugauuaacgaccaacucaugaugaagaaucaucugcgcgauaucauguguauucccuauugcaacuacagcaaauuuugguaucuuaauaacaccacaaccgggagaacaucucugccucgguguuggcucaucuccaauggaagcuaccugaacgaaacccacuucucugacgauaucgagcagcaggcugacaauaugauuacggaaaugcugcagaaggaguacauggaucgccaaggcaaaacaccgcucgggcugguugaccuuuuuguguucagcaccuccuuuuaucugaucaccauuuuccuccaccuggucaagauccccacacauagacacauugugggaaaaccuugccccaagccucaucggcugaaccacaugggcaucuguucuugcggccuuuacaaacagcccggggugccgguccgcuggaagagaugaggacuagucccuguucccagagcccacuuuuuuuucuuuuuuugaaauaaaauagccugucuuucagaucucaaaggcucuuuucagagccaccaaaaaaaaaaaaaaaaaaaaaaaaaaaaaaaaaaaaaaaaaaaaaaaaaaaaaaaaaaaaaaaaaaaaaaaaaaaaaaaaaaaaaaaaaaaaaaaaaaaaa

SEQ ID NO: 28428 - RNA, 1745 nt, Artificial Sequence; identical to SEQ ID NO: 28422
  mRNA product Design a-1 (hSL-A100) comprising derived and/or modified sequence from LASV(Pinneo-NIG-1969;Clade I)__AIT17836__GPCmut5 (opt5)

SEQ ID NO: 28429 - RNA, 1745 nt, Artificial Sequence
  mRNA product Design a-1 (hSL-A100) comprising derived and/or modified sequence from LASV(ISTH0009-NIG-2011;Clade II)__AIT17404__GPCmut5 (opt5)
aggagagucccgcagucggcguccagcggcucugcuuguucgugugugugucguugcaggccuuauucaagcuuaccaugggccagaucauuaccuucuuucaagaggugccccacgucaucgaagagguuaugaacauugugcugaucgcccucagccugcuugcuauucugaaggggaucuacaauguggccacaugcggacucuucggccuggucuccuuucuucugcucugugggagaucuugcagcacgaccuauaaaggaguguacgaacugcagacacuggagcucgacauggcgucccugaacaugaccaugccucuuucuuguacaaagaauaacagccaucacuauaucaugguuggcaaugaaaccgggcuggagcucacacugaccaacacguccauuaucaaucauaaauucugcaaccuuucugaugcucacaagaaaaaucuguacgaccaugcccucaugagcauuaucuccaccuuucaccugagcauuccgaacuucaaucaguaugaggccaugucuugugauuuuaacggaggcaagaucuccgugcaguacaaucugagccacgcuuaugccgucgacgcugccaaccauugcggcacaauugcgaauggggugcuccaaaccuucaugcggauggccuggggaggcucuuacaucgcucuggauuccggguguggaagcugggacugcaucaugacaucuuaccaguaucuuauuauccagaacaccacgugggaagaucacugucaguuuucccgccccagcccuauuggcuaccuggggcuccugucccaaagaacacgggacaucuauauuucucgcagacuucugggaaccuucacauggacccucagcgauuccgagggcaacgaaacccccggcggguacugccugacacgguggaugcugaucgaggccgagcucaaguguuuuggaaauacggcuguugccaaaugcaacgaaaagcaugacgaggaguucugcgauaugcugcgccuuuuugacuucaauaaacaggcgaucagacggcugaagaccccugcccagaugagcauucagcucaucaacaaagcugugaaugcccugauuaacgaucaacuuaucaugaagaaucaucugcgcgacauuauguguauccccuauugcaacuacucuaaguauugguaccucaaucacacagucaccggcaaaacaucccugccuagauguuggcuggugagcaacgggucuuaccucaaugaaacccacuucagcgacgauaucgaacagcaggcugacaacaugauuacggagcugcuucaaaaggaguauauggaucggcagggaaaaacaccgcugggccucguggaccuguuugucuucuccaccucuuuuuaccugaucagcauuuuccuucaccucaucaagauucccacccaucgccacaucacagggaaaccuugccccaagccucauagacugaaucacaugggaauuuguuccugcggccuguauaaacaccccggcguuccggugaaguggaagcggugaggacuagucccuguucccagagcccacuuuuuuuucuuuuuuugaaauaaaauagccugucuuucagaucucaaaggcucuuuucagagccaccaaaaaaaaaaaaaaaaaaaaaaaaaaaaaaaaaaaaaaaaaaaaaaaaaaaaaaaaaaaaaaaaaaaaaaaaaaaaaaaaaaaaaaaaaaaaaaaaaaaaa

SEQ ID NO: 28430 - RNA, 1745 nt, Artificial Sequence
  mRNA product Design a-1 (hSL-A100) comprising derived and/or modified sequence from LASV(ISTH2010-NIG-2012;Clade II)__AIT17482__GPCmut5 (opt5)
aggagagucccgcagucggcguccagcggcucugcuuguucgugugugugucguugcaggccuuauucaagcuuaccaugggccagaucauuaccuucuuucaagaggugccccacgucaucgaagagguuaugaacauugugcugaucgcccucagccugcuugcuauucugaaggggaucuacaauguggccacaugcggacucuucggccuggucuccuuucuucugcucugugggagaucuugcagcacgaccuauaaaggaguguacgaacugcagacacuggagcucgacauggcgucccugaacaugaccaugccucuuucuuguacaaagaauaacagccaucacuauaucaugguuggcaaugaaaccgggcuggagcucacacugaccaacacguccauuaucaaucauaaauucugcaaccuuucugaugcucacaagaaaaaucuguacgaccaugcccucaugagcauuaucuccaccuuucaccugagcauuccgaacuucaaucaguaugaggccaugucuugugauuuuaacggaggcaagaucuccgugcaguacaaucugagccacgcuuaugccgucgacgcugccaaccauugcggcacaauugcgaauggggugcuccaaaccuucaugcggauggccuggggaggcucuuacaucgcucuggauuccggguguggaagcugggacugcaucaugacaucuuaccaguaucuuauuauccagaacauuaccugggaagaucacugucaguuuucccgccccagcccuaucggcuaccuggggcuccugucccaaagaacgcgggacauuuauaucucucgcagacuucugggaacauucaccuggacacucagcgauuccgagggcaacgaaacccccggcggguacugccugacccgguggaugcugaucgaggccgagcucaaguguuuuggaaauacagcuguugccaaaugcaacgaaaagcaugacgaggaguucugcgauaugcugcgccuuuuugacuucaauaaacaggcgauuagacggcugaagacgccugcccagaugagcauccagcucauuaacaaagcugugaaugcccugaucaacgaucaacuuauuaugaagaaucaucugcgcgacaucauguguauccccuauugcaacuacucuaaguauugguaccucaaucacaccgucacaggcaaaaccucccugccuagauguuggcuggugagcaacgggucuuaccucaaugaaacacacuucagcgacgauauugaacagcaggcugacaacaugaucaccgagcugcuucaaaaggaguauauugaucggcagggaaaaacgccgcugggccucguggaccuguuugucuucuccacaucuuuuuaccugaucagcauuuuccuucaccucguuaagauccccacccaucgccacgugguggggaaaccuugccccaagccucauagacugaaucacaugggaauuuguuccugcggccuguauaaacaccccggcgucccggugaaguggaagcggugaggacuagucccuguucccagagcccacuuuuuuuucuuuuuuugaaauaaaauagccugucuuucagaucucaaaggcucuuuucagagccaccaaaaaaaaaaaaaaaaaaaaaaaaaaaaaaaaaaaaaaaaaaaaaaaaaaaaaaaaaaaaaaaaaaaaaaaaaaaaaaaaaaaaaaaaaaaaaaaaaaaaa

SEQ ID NO: 28431 - RNA, 1745 nt, Artificial Sequence
  mRNA product Design a-1 (hSL-A100) comprising derived and/or modified sequence from LASV(Lassa virus/H.sapiens-wt/NGA/2015/ISTH_0543;Clade II)__AVO03639__GPCmut5 (opt5)
aggagagucccgcagucggcguccagcggcucugcuuguucgugugugugucguugcaggccuuauucaagcuuaccaugggccagaucauuaccuucuuucaagaggugccccacgucaucgaagagguuaugaacauugugcugaucgcccucagccugcuugcuauucugaaggggaucuacaauguggccacaugcggacucuucggccuggucuccuuucuucugcucugugggagaucuugcagcacgaccuauaaaggaguguacgaacugcagacacuggagcucgacauggcgaaccugaauaugaccaugccucuuuccuguacaaagaacaauucucaucacuauaucaugguuggcaacgaaaccgggcuggagcucacacugaccaauacgagcauuaucaaccauaaauucugcaaucuuuccgaugcucacaagaaaaaccuguacgaccaugcccucaugucuauuaucagcaccuuucaccuguccauuccgaauuucaaccaguaugaggccaugagcugugauuuuaauggaggcaagaucucugugcaguacaaccugucccacacauaugcugucgacgccgcuaaucauugcggcaccauugccaacggggugcuccaaacauucaugcggauggcguggggaggcagcuacaucgcccuggauucuggguguggauccugggacugcaucaugaccagcuaccaguaucuuguuauucagaacacgacaugggaagaucacugucaguuuucucgccccuccccuaucggcuaccuggggcuccugagccaaagaacccgggacauuuauaucucccgcagacuucugggaacauucaccuggacccucucugauagcgagggcaaugaaacacccggcggguacugccugacgcgguggaugcugauugaggcugagcucaaguguuuuggaaacaccgccguggcuaaaugcaaugaaaagcaugacgaggaguucugcgauaugcugcgccuuuuugacuucaacaaacaggccaucagacggcugaagaccccugcgcagauguccauccagcucauuaauaaagccgucaacgcucugaucaaugaucaacuuauuaugaagaaccaucugcgcgacaucauguguauucccuauugcaauuacagcaaguauugguaccucaaccacacagugacaggcaaaaccucucugccuagauguuggcugguguccaaugggagcuaccucaacgaaacgcacuucucugacgauaucgaacagcaggccgacaauaugaucacagagcugcuucaaaaggaguauauugaucggcagggaaaaaccccgcugggccucgucgaccuguuuguuuucagcaccuccuuuuaccugaucucuauuuuccuucaccucgugaagauccccacacaucgccacauuaccgggaaaccuugccccaagccucauagacugaaccacaugggaaucuguagcugcggccuguauaaacaccccggcgugccggucaaguggaagcggugaggacuagucccuguucccagagcccacuuuuuuuucuuuuuuugaaauaaaauagccugucuuucagaucucaaaggcucuuuucagagccaccaaaaaaaaaaaaaaaaaaaaaaaaaaaaaaaaaaaaaaaaaaaaaaaaaaaaaaaaaaaaaaaaaaaaaaaaaaaaaaaaaaaaaaaaaaaaaaaaaaaaa

SEQ ID NO: 28432 - RNA, 1745 nt, Artificial Sequence
  mRNA product Design a-1 (hSL-A100) comprising derived and/or modified sequence from LASV(Lassa virus/H.sapiens-wt/NGA/2016/ISTH_0009;Clade II)__AVO03571__GPCmut5 (opt5)
aggagagucccgcagucggcguccagcggcucugcuuguucgugugugugucguugcaggccuuauucaagcuuaccaugggccagaucauuaccuucuuucaagaggugccccacgucaucgaagagguuaugaacauugugcugaucgcccucagccugcuugcuauucugaaggggaucuacaauguggccacaugcggacuccugggccuugucuccuuccugcuccugugugggagaucuugcagcacgaccuauaaaggaguguacgaacugcagacacucgagcuggacauggcgucccuuaacaugaccaugccucugucuuguacaaagaauaacagccaucacuauaucaugguuggcaaugaaaccgggcucgagcugacacuuaccaacacguccauuaucaaucauaaauuuugcaaccugucugaugcucacaagaaaaaucucuacgaccaugcccugaugagcauuaucuccaccuuccaccugagcauuccgaacuuuaaucaguaugaggccaugucuugugauuucaacggaggccggaucuccgugcaguacaaucucagccacucuuaugcugucgacgccgcuaaccauugcggcacaauugccaauggggugcugcaaaccuuuaugcgcauggcguggggaggcuccuacaucgcccuugauagcggguguggaucuugggacugcaucaugacauccuaccaguaucugauuauccagaacaccacgugggaagaucacugucaguucagcagacccuccccuauuggcuaccucgggcugcuuucucaacggacacgcgacaucuauauuagcagacggcugcucggaaccuuuacauggacccuguccgauagcgagggcaacgaaacccccggcggguacugccugacacgcuggaugcucaucgaggcugagcugaaguguuucggaaauacggccguugcuaagugcaacgaaaaacaugacgaggaauuuugcgauaugcuuagacuguucgacuuuaauaagcaggccauccggcgccucaaaaccccugcgcagaugucuauucagcugaucaacaaggccgugaaugcucuuauuaacgaucaacugaucaugaaaaaucaccucagagacauuauguguauccccuauugcaacuacuccaaguauugguaccugaaucacacagucaccggcaagacaagccugccucgguguuggcucgugucuaacgggagcuaccugaaugagacccauuucuccgacgauaucgaacagcaggccgacaacaugauuacggagcuucugcaaaaagaguauaucgaucgccagggaaagacaccgcucggccugguggaccuguucgucuuuucuaccagcuucuaccuuauuuccaucuuucuccaccugguuaaaauucccacccauagacacaucacagggaagccuugccccaaaccucaucggcugaaucacaugggaauuuguagcugcggccucuauaaccaccccggcgugccggugaaguggaaacgcugaggacuagucccuguucccagagcccacuuuuuuuucuuuuuuugaaauaaaauagccugucuuucagaucucaaaggcucuuuucagagccaccaaaaaaaaaaaaaaaaaaaaaaaaaaaaaaaaaaaaaaaaaaaaaaaaaaaaaaaaaaaaaaaaaaaaaaaaaaaaaaaaaaaaaaaaaaaaaaaaaaaaa

SEQ ID NO: 28433 - RNA, 1745 nt, Artificial Sequence
  mRNA product Design a-1 (hSL-A100) comprising derived and/or modified sequence from LASV(Lassa virus/H.sapiens-wt/NGA/2016/ISTH_0017;Clade II)__AVO03567__GPCmut5 (opt5)
aggagagucccgcagucggcguccagcggcucugcuuguucgugugugugucguugcaggccuuauucaagcuuaccaugggccagaucauuaccuucuuucaagaggugccccacgucaucgaagagguuaugaacauugugcugaucgcccucagccugcuugcuauucugaaggggaucuacaauguggccacaugcggacucuucggccuggucuccuuucuucugcucugugggagaucuugcagcacgaccuauaaaggaguguacgaacugcagacacuggagcucgacauggcgucccugaacaugaccaugccucuuucuuguacaaagaauaacagccaucacuauaucaugguuggcaaugaaaccgggcuggagcucacacugaccaacacguccauuaucaaucauaaauucugcaaccuuucugaugcucacaagaaaaaucuguacgaccaugcccucaugagcauuaucuccaccuuucaccugagcauuccgaacuucaaucaguaugaggccaugucuugugauuuuaacggaggcaagaucuccgugcaguacaaucugagccacacauaugcuauugacgccgcuaaccauugcggcaccaucgccaaugggguccuccaaacauucaugcggauggcguggggaggcucuuacaucgcccuggauuccggguguggaagcugggacugcauuaugaccucuuaccaguaucuuaucauucagaacacgacaugggaagaucacugucaguuuucccgccccagcccuaucggcuaccuggggcuccugucccaaagaacccgggacauuuauaucucucgcagacuucugggaacauucaccuggacccucagcgauuccgagggcaacgaaacacccggcggguacugccugacgcgguggaugcugaucgaggcugagcucaaguguuuuggaaauaccgccguggcuaaaugcaacgaaaagcaugacgaggaguucugcgauaugcugcgccuuuuugacuucaauaaacaggccauuagacggcugaagaccccugcgcagaugagcauccagcucauuaacaaagccguuaaugcucugaucaacgaucaacuuauuaugaagaaucaucugcgcgacaucauguguauccccuauugcaacuacucuaaguauugguaccucaaucacacagugacaggcaaaaccucccugccuagauguuggcuggucagcaacgggucuuaccucaaugaaacgcacuucagcgacgauauugaacagcaggccgacaacaugaucacagagcugcuucaaaaggaguauauggaucggcagggaaaaaccccgcugggccucguggaccuguuuguguucuccaccucuuuuuaccugauuagcaucuuccuucaccucguccgcauucccacacauagacacguuaucgggaagccuugccccaaaccucaucggcugaaucacaugggaauuuguuccugcggccuguauaagcaccccggcgugccggugaaauggaagcgcugaggacuagucccuguucccagagcccacuuuuuuuucuuuuuuugaaauaaaauagccugucuuucagaucucaaaggcucuuuucagagccaccaaaaaaaaaaaaaaaaaaaaaaaaaaaaaaaaaaaaaaaaaaaaaaaaaaaaaaaaaaaaaaaaaaaaaaaaaaaaaaaaaaaaaaaaaaaaaaaaaaaaa

SEQ ID NO: 28434 - RNA, 1745 nt, Artificial Sequence
  mRNA product Design a-1 (hSL-A100) comprising derived and/or modified sequence from LASV(Lassa virus/H.sapiens-wt/NGA/2018/ISTH_0959;Clade II)__AVV65099__GPCmut5 (opt5)
aggagagucccgcagucggcguccagcggcucugcuuguucgugugugugucguugcaggccuuauucaagcuuaccaugggccagaucauuaccuucuuucaagaggugccccacgucaucgaagagguuaugaacauugugcugaucgcccucagccugcuugcuauucugaaggggaucuacaauguggucacaugcggacucuucggccugguguccuuucuucugcucugugggagaucuugcagcacgaccuauaaaggaguuuacgaacugcagacacuggagcucgacauggccucccugaacaugaccaugccucuuucuuguacaaagaauaacagccaucacuauaucauggugggcaaugaaaccgggcuggagcucacacugaccaacacguccauuaucaaucauaaauucugcaaccuuucugaugcgcacaagaaaaaucuguacgaccaugcucucaugagcauuaucuccaccuuucaccugagcauuccgaacuucaaucaguaugaggccaugucuugugauuuuaacggaggcaagaucuccguccaguacaaucugagccacgccuaugcuauugacgccgcuaaccauugcggcacaaucgccaauggggugcuccaaaccuucaugcggauggcguggggaggcucuuacaucgcccuggauuccggguguggaagcugggacugcauuaugacaucuuaccaguaucuuaucauucagaacaccacgugggaagaucacugucaguuuucccgccccagcccuaucggcuaccuggggcuccugucccaaagaacacgggacauuuauaucucucgcagacuucugggaaccuucacauggacccucagcgauuccgagggcaacgaaacccccggcggguacugccugacacgguggaugcugaucgaggcugagcucaaguguuuuggaaauacggccguugcuaaaugcaacgaaaagcaugacgaggaguucugcgauaugcugcgccuuuuugacuucaauaaacaggccauuagacggcugaagaccccugcgcagaugagcauccagcucauuaacaaagccgugaaugcucugaucaacgaucaacuuauuaugaagaaucaucugcgcgacaucauguguauccccuauugcaacuacucuaaguauugguaccucaaucacacagucaccggcaaaacaucccugccuagauguuggcuggugagcaacgggucuuaccucaaugaaacccacuucagcgacgauauugaacagcaggccgacaacaugaucacggagcugcuucaaaaggaguauauugaucggcagggaaaaacaccgcugggccucguggaccuguuugucuucuccaccucuuuuuaccugaucagcauuuuccuucaccucguuaagauccccacccaucgccacgugauugggaaaccuugccccaagccucauagacugaaucacaugggaaucuguuccugcggccuguauaaacaccccggcgugccggucaaguggaagcggugaggacuagucccuguucccagagcccacuuuuuuuucuuuuuuugaaauaaaauagccugucuuucagaucucaaaggcucuuuucagagccaccaaaaaaaaaaaaaaaaaaaaaaaaaaaaaaaaaaaaaaaaaaaaaaaaaaaaaaaaaaaaaaaaaaaaaaaaaaaaaaaaaaaaaaaaaaaaaaaaaaaaa

SEQ ID NO: 28435 - RNA, 1745 nt, Artificial Sequence
  mRNA product Design a-1 (hSL-A100) comprising derived and/or modified sequence from LASV(LASV003-NIG-2008;Clade II)__AIT17580__GPCmut5 (opt5)
aggagagucccgcagucggcguccagcggcucugcuuguucgugugugugucguugcaggccuuauucaagcuuaccaugggccagaucauuaccuucuuucaagaggugccccacgucaucgaagagguuaugaacauugugcugaucgcccucagccugcuugcuauucugaaggggaucuacaauguggccacaugcggacucuucggccuggucuccuuucuucugcucugugggagaucuugcagcacgaccuauaaaggaguguacgaacugcagacacuggagcucgacauggcgucccugaacaugaccaugccucuuucuuguacaaagaauaacagccaucacuauaucaugguuggcaaugaaaccgggcuggagcucacacugaccaacacguccauuaucaaucauaaauucugcaaccuuucugaugcucacaagaaaaaucuguacgaccaugcccucaugagcauuaucuccaccuuucaccugagcauuccgaacuucaaucaguaugaggccaugucuugugauuuuaacggaggcaagaucuccgugcaguacaaucugagccacacauaugcugucgacgccgcuaaccauugcggcaccauugccaauggggugcuccaaacauucaugcggauggcguggggaggcucuuacaucgcccuggauuccggguguggaagcugggacugcaucaugaccucuuaccaguaucuuauuauccagaacacgacaugggaagaucacugucaguuuucccgccccagcccuauuggcuaccuggggcuccugucccaaagaacccgggacaucuauauuucucgcagacuucugggaacauucaccuggacccucagcgauuccgagagcaacgaaacacccggcggcuacugccugacgcgguggaugcugaucgaggcugagcucaaguguuuugggaauaccgccguugcuaaaugcaacgaaaagcaugacgaggaguucugcgauaugcugcgccuuuuugacuucaauaaacaggccaucagacggcugaaggcgccugcccagaugucuauucagcucaucaacaaagcugugaaugcccugauuaacgaucaacuuaucaugaagaaucaucugcgcgacauuauguguauccccuauugcaacuacuccaaguauugguaccucaaucacacagucaccggaagaacaagccugccucgguguuggcuggugucuaacggcagcuaccucaaugaaacccacuucuccgacgauaucgaacagcaggcugacaacaugauuacggagcugcuucaaaaagaguauauggaucgccaggggaagacaccgcugggacucguggaccuguuugucuucucuaccagcuuuuaccugaucuccauuuuccuucaccucguuaaaauccccacccauagacacgugauuggcaagccuugccccaaaccucaucggcugaaucacauggggaucuguagcugcggacuguauaagcaccccggcgugccggucaaauggaagcgcugaggacuagucccuguucccagagcccacuuuuuuuucuuuuuuugaaauaaaauagccugucuuucagaucucaaaggcucuuuucagagccaccaaaaaaaaaaaaaaaaaaaaaaaaaaaaaaaaaaaaaaaaaaaaaaaaaaaaaaaaaaaaaaaaaaaaaaaaaaaaaaaaaaaaaaaaaaaaaaaaaaaaa

SEQ ID NO: 28436 - RNA, 1745 nt, Artificial Sequence
  mRNA product Design a-1 (hSL-A100) comprising derived and/or modified sequence from LASV(LASV035-NIG-2009;Clade II)__AIT17588__GPCmut5 (opt5)
aggagagucccgcagucggcguccagcggcucugcuuguucgugugugugucguugcaggccuuauucaagcuuaccaugggccagaucauuaccuucuuucaagaggugccccacgucaucgaagagguuaugaacauugugcugaucgcccucagccugcuugcuauucugaaggggaucuacaauguggccacaugcggacucuucggccuggucuccuuucuucugcucugugggagaucuugcagcacgaccuauaaaggaguguacgaacugcagacacuggagcucgacauggcgucccugaacaugaccaugccucuuucuuguacaaagaauaacagccaucacuauaucaugguuggcaaugaaaccgggcuggagcucacacugaccaacacguccauuaucaaucauaaauucugcaaccuuucugaugcucacaagaaaaaucuguacgaccaugcccucaugagcauuaucuccaccuuucaccugagcauuccgaacuucaaucaguaugaggccaugucuugugauuuuaacggaggcaagaucuccgugcaguacaaucugagccacgcuuaugccgucgacgcugccaaccauugcggcacaauugcgaauggggugcuccaaaccuucaugcggauggccuggggaggcucuuacaucgcucuggauuccggguguggaagcugggacugcaucaugacaucuuaccaguaucuuauuauccagaacaccacgugggaagaucacugucaguuuucccgccccagcccuauuggcuaccuggggcuccugucccaaagaacacgggacaucuauauuucucgcagacuucugggaaccuucacauggacccucagcgauuccgagggcaacgaaacccccggcggguacugccugacacgguggaugcugaucgaggccgagcucaaguguuuuggaaauacggcuguugccaaaugcaacgaaaagcaugacgaggaguucugcgauaugcugcgccuuuuugacuucaauaaacaggcgaucagacggcugaaggccccugcucagaugagcauucagcucaucaacaaagccgugaaugcucugauuaacgaucaacuuaucaugaagaaucaucugcgcgacauuauguguauccccuauugcaacuacucuaaguauugguaccucaaucacaccgucacaggcaaaaccucccugccuagauguuggcuggugagcaacgggucuuaccucaaugaaacacacuucagcgacgauaucgaacagcaggccgacaacaugauuaccgagcugcuucaaaaggaguauaucgaucggcagggaaaaacgccgcugggccucguggaccuguuugucuucuccacaucuuuuuaccugauuagcaucuuccuucaccucguuaagauucccacccaucgccacgugaucgggaaaccuugccccaagccucauagacugaaucacaugggaauuuguuccugcggccuguauaaacaccccggcgugccggucaaguggaagcggugaggacuagucccuguucccagagcccacuuuuuuuucuuuuuuugaaauaaaauagccugucuuucagaucucaaaggcucuuuucagagccaccaaaaaaaaaaaaaaaaaaaaaaaaaaaaaaaaaaaaaaaaaaaaaaaaaaaaaaaaaaaaaaaaaaaaaaaaaaaaaaaaaaaaaaaaaaaaaaaaaaaaa

SEQ ID NO: 28437 - RNA, 1745 nt, Artificial Sequence
  mRNA product Design a-1 (hSL-A100) comprising derived and/or modified sequence from LASV(LASV1000-NIG-2009;Clade II)__AIT17782__GPCmut5 (opt5)
aggagagucccgcagucggcguccagcggcucugcuuguucgugugugugucguugcaggccuuauucaagcuuaccaugggccagaucauuaccuucuuucaagaggugccccacgucaucgaagagguuaugaacauugugcugaucgcccucagccugcuugcuauucugaaggggaucuacaauguggccacaugcggacucuucggccuggucuccuuucuucugcucugugggagaucuugcagcacgaccuauaaaggaguguacgaacugcagacacuggagcucgacauggcgucccugaacaugaccaugccucuuucuuguacaaagaauaacagccaucacuauaucaugguuggcaaugaaaccgggcuggagcucacacugaccaacacguccauuaucaaucauaaauucugcaaccuuucugaugcucacaagaaaaaucuguacgaccaugcccucaugagcauuaucuccaccuuucaccugagcauuccgaacuucaaucaguaugaggccaugucuugugauuuuaacggaggcaagaucuccgugcaguacaaucugagccacacauaugcugucgacgccgcuaaccauugcggcaccauugccaauggggugcuccaaacauucaugcggauggcguggggaggcucuuacaucgcccuggauuccggguguggaagcugggacugcaucaugaccucuuaccaguaucuuauuauccagaacacgacaugggaagaucacugucaguuuucccgccccagcccuauuggcuaccuggggcuccugucccaaagaacccgggacaucuauauuucucgcagacuucugggaacauucaccuggacccucagcgauuccgagggcaacgaaacacccggcggguacugccugacgcgguggaugcugaucgaggcugagcucaaguguuuuggaaauaccgccguugcuaaaugcaacgaaaagcaugacgaggaguucugcgauaugcugcgccuuuuugacuucaauaaacaggccaucaagagacugaaaaccccugcgcagaugagcauucagcucaucaacaaggccgugaaugcucugauuaacgaucaacuuaucaugaagaaucaucugcgggacauuauguguauccccuauugcaacuacucuaaauauugguaccucaaucacacagucacaggcaagaccucccugccucgcuguuggcuggugagcaacgggucuuaccucaaugaaacgcacuucagcgacgauaucgaacagcaggccgacaacaugauuacagagcugcuucaaaaagaguauaucgauagacagggaaagaccccgcugggccucguggaccuguuugucuucuccaccucuuuuuaccugauuagcaucuuccuucaccucguuaaaauucccacacaucggcacgugguggggaagccuugccccaaaccucaucgccugaaucacaugggaaucuguuccugcggccuguauaagcaccccggcgucccggugaaguggaaaagaugaggacuagucccuguucccagagcccacuuuuuuuucuuuuuuugaaauaaaauagccugucuuucagaucucaaaggcucuuuucagagccaccaaaaaaaaaaaaaaaaaaaaaaaaaaaaaaaaaaaaaaaaaaaaaaaaaaaaaaaaaaaaaaaaaaaaaaaaaaaaaaaaaaaaaaaaaaaaaaaaaaaaa

SEQ ID NO: 28438 - RNA, 1745 nt, Artificial Sequence
  mRNA product Design a-1 (hSL-A100) comprising derived and/or modified sequence from LASV(LASV221-NIG-2010;Clade II)__AIT17624__GPCmut5 (opt5)
aggagagucccgcagucggcguccagcggcucugcuuguucgugugugugucguugcaggccuuauucaagcuuaccaugggccagaucauuaccuucuuucaagaggugccccacgucaucgaagagguuaugaacauugugcugaucgcccucagccugcuugcuauucugaaggggaucuacaauguggccacaugcggacucuucggccuggucuccuuucuucugcucugugggagaucuugcagcacgaccuauaaaggaguguacgaacugcagacacuggagcucgacauggcgucccugaacaugaccaugccucuuucuuguacaaagaauaacagccaucacuauaucaugguuggcaaugaaaccgggcuggagcucacacugaccaacacguccauuaucaaucauaaauucugcaaccuuucugaugcucacaagaaaaaucuguacgaccaugcccucaugagcauuaucuccaccuuucaccugagcauuccgaacuucaaucaguaugaggccaugucuugugauuuuaacggaggcaagaucuccgugcaguacaaucugagccacacauaugcuauugacgccgcuaaccauugcggcaccaucgccaaugggguccuccaaacauucaugcggauggcguggggaggcucuuacaucgcccuggauuccggguguggaagcugggacugcauuaugaccucuuaccaguaucuuaucauucagaacacgacaugggaagaucacugucaguuuucccgccccagcccuaucggcuaccuggggcuccugucccaaagaacccgggacauuuauaucucucgcagacuucugggaacauucaccuggacccucagcgauuccgagggcaacgaaacacccggcggguacugccugacgcgguggaugcugaucgaggcugagcucaaguguuuuggaaauaccgccguggcuaaaugcaacgaaaagcaugacgaggaguucugcgauaugcugcgccuuuuugacuucaauaaacaggccauuagacggcugaagaccccugcgcagaugagcauccagcucauuaacaaagccguuaaugcucugaucaacgaucaacuuauuaugaagaaucaucugcgcgacaucauguguauccccuauugcaacuacucuaaguauugguaccucaaucacacagugacaggcaaaaccucccugccuagauguuggcuggucagcaacgggucuuaccucaaugaaacgcacuucagcgacgauauugaacagcaggccgacaacaugaucacagagaugcugcaaaaggaguauauggaucggcagggaaaaaccccgcuuggccugguggaccucuuuguguucuccaccucuuuuuaccugauuagcaucuuccugcaccuugucaagauucccacacaucgccacguuaucgggaaaccuugccccaagccucauagacucaaucacaugggaauuuguuccugcggccuguauaaacaccccggcgugccggugaaguggaagcggugaggacuagucccuguucccagagcccacuuuuuuuucuuuuuuugaaauaaaauagccugucuuucagaucucaaaggcucuuuucagagccaccaaaaaaaaaaaaaaaaaaaaaaaaaaaaaaaaaaaaaaaaaaaaaaaaaaaaaaaaaaaaaaaaaaaaaaaaaaaaaaaaaaaaaaaaaaaaaaaaaaaaa

SEQ ID NO: 28439 - RNA, 1745 nt, Artificial Sequence
  mRNA product Design a-1 (hSL-A100) comprising derived and/or modified sequence from LASV(LASV237-NIG-2010;Clade II)__AIT17638__GPCmut5 (opt5)
aggagagucccgcagucggcguccagcggcucugcuuguucgugugugugucguugcaggccuuauucaagcuuaccaugggccagaucauuaccuucuuucaagaggugccccacgucaucgaagagguuaugaacauugugcugaucgcccucagccugcuugcuauucugaaggggaucuacaauguggccacaugcggacucuucggccuggucuccuuucuucugcucugugggagaucuugcagcacgaccuauaaaggaguguacgaacugcagacacuggagcucgacauggcgucccugaacaugaccaugccucuuucuuguacaaagaauaacagccaucacuauaucaugguuggcaaugaaaccgggcuggagcucacacugaccaacacguccauuaucaaucauaaauucugcaaccuuucugaugcucacaagaaagaccuguacgaucaugcccucaugagcauuaucuccaccuuucaccugagcauuccgaauuucaaccaguaugaggccaugucuugugacuuuaauggaggcaagaucuccgugcaguacaaccugagccacacauaugcugucgaugccgcuaaucauugcggcaccauugccaacggggugcuccaaacauucaugcggauggcguggggaggcucuuacaucgcccuggacuccggguguggaagcugggauugcaucaugaccucuuaccaguaucuuauuauccagaauacgacaugggaagaccacugucaguuuucccgccccagcccuauuggcuaccuggggcuccugucccaaagaacccgggauaucuauauuucucgcagacuucugggaacauucaccuggacccucagcgacuccgagggcaacgaaacacccggcggguacugccugacgcgguggaugcugaucgaggcugagcucaaguguuuuggaaacaccgccguugcuaaaugcaaugaaaagcaugaugaggaguucugcgacaugcugcgccuuuuugauuucaacaaacaggccaucagacggcugaagaccccugcgcagaugagcauucagcucaucaauaaagccgugaacgcucugauuaaugaccaacuuaucaugaagaaccaucugcgcgacauuauguguauccccuauugcaauuacucuaaguauugguaccucaaccacacagucacaggcaaaaccucccugccuagauguuggcuggugagcaaugggucuuaccucaacgaaacgcacuucagcgaugacaucgaacagcaggccgauaauaugauuacagagcugcuucaaaaggaguauauggaccggcagggaaaaaccccgcugggccucguggaucuguuugucuucuccaccucuuuuuaccugaucagcauuuuccuucaccucaucaagauucccacacaucgccacaucaccgggaaaccuugccccaagccucauagacugaaccacaugggaauuuguuccugcggccuguauaaacaccccggcguuccggugaaguggaagcggugaggacuagucccuguucccagagcccacuuuuuuuucuuuuuuugaaauaaaauagccugucuuucagaucucaaaggcucuuuucagagccaccaaaaaaaaaaaaaaaaaaaaaaaaaaaaaaaaaaaaaaaaaaaaaaaaaaaaaaaaaaaaaaaaaaaaaaaaaaaaaaaaaaaaaaaaaaaaaaaaaaaaa

SEQ ID NO: 28440 - RNA, 1745 nt, Artificial Sequence
  mRNA product Design a-1 (hSL-A100) comprising derived and/or modified sequence from LASV(LASV253-NIG-2011;Clade II)__AIT17670__GPCmut5 (opt5)
aggagagucccgcagucggcguccagcggcucugcuuguucgugugugugucguugcaggccuuauucaagcuuaccaugggccagaucauuaccuucuuucaagaggugccccacgucaucgaagagguuaugaacauugugcugaucgcccucagccugcuugcuauucugaaggggaucuacaauguggccacaugcggacucuucggccuggucuccuuucuucugcucugugggagaucuugcagcacgaccuauaaaggaguguacgaacugcagacacuggagcucgacauggcgucccugaacaugaccaugccucuuucuuguacaaagaauaacagccaucacuauaucaugguuggcaaugaaaccgggcuggagcucacacugaccaacacguccauuaucaaucauaaauucugcaaccuuucugaugcucacaagaaaaaucuguacgaccaugcccucaugagcauuaucuccaccuuucaccugagcauuccgaacuucaaucaguaugaggccaugucuugugauuuuaacggaggcaagaucuccgugcaguacaaucugagccacacauaugcugucgacgccgcuaaccauugcggcaccauugccaauggggugcuccaaacauucaugcggauggcguggggaggcucuuacaucgcccuggauuccggguguggaagcugggacugcaucaugaccucuuaccaguaucuuauuauccagaacacgacaugggaagaucacugucaguuuucccgccccagcccuauuggcuaccuggggcuccugucccaaagaacccgggacaucuauauuucucgcagacuucugggaacauucaccuggacccucagcgauuccgagggcaacgaaacacccggcggguacugccugacgcgguggaugcugaucgaggcugagcucaaguguuuuggaaauaccgccguugcuaaaugcaacgaaaagcaugacgaggaguucugcgauaugcugcgccuuuuugacuucaauaaacaggccaucagacggcugaaggcgccugcccagaugagcauucagcucaucaacaaagcugugaaugcccugauuaacgaucaacuuaucaugaagaaucaucugcgcgacauuauguguauccccuauugcaacuacucuaaguauugguaccucaaucacacagucaccggcagaacaucccugccucgguguuggcuggugagcaacgggucuuaccucaaugaaacccacuucagcgacgauaucgaacagcaggcugacaacaugauuacggagcugcuucaaaaagaguauaucgaucgccagggaaagacaccgcugggccucguggaccuguuugucuucuccaccucuuuuuaccugauuagcaucuuccuucaccucguuaaaauucccacccauagacacaucauugggaagccuugccccaaaccucaucggcugaaucacaugggaaucuguuccugcggccuguauaagcaccccggcgugccggugaaauggaagcgcugaggacuagucccuguucccagagcccacuuuuuuuucuuuuuuugaaauaaaauagccugucuuucagaucucaaaggcucuuuucagagccaccaaaaaaaaaaaaaaaaaaaaaaaaaaaaaaaaaaaaaaaaaaaaaaaaaaaaaaaaaaaaaaaaaaaaaaaaaaaaaaaaaaaaaaaaaaaaaaaaaaaaa

SEQ ID NO: 28441 - RNA, 1745 nt, Artificial Sequence
  mRNA product Design a-1 (hSL-A100) comprising derived and/or modified sequence from LASV(LASV254-NIG-2011;Clade II)__AIT17674__GPCmut5 (opt5)
aggagagucccgcagucggcguccagcggcucugcuuguucgugugugugucguugcaggccuuauucaagcuuaccaugggccagaucauuaccuucuuucaagaggugccccacgucaucgaagagguuaugaacauugugcugaucgcccucagccugcuugcuauucugaaggggaucuacaauguggccacaugcggacucuucggccuggucuccuuucuucugcucugugggagaucuugcagcacgaccuauaaaggaguguacgaacugcagacacuggagcucgacaugaccaaccugaauaugacaaugccucuuuccuguaccaagaacaauucucaucacuauaucaugguuggcaacgaaacagggcuggagcucacccugacgaauaccagcauuaucaaccauaaauucugcaaucuuuccgaugcgcacaagaaaaaccuguacaaucaugcucucaugucuauuaucagcacauuucaccuguccauuccgaacuucaaucaguaugaggccaugagcugugacuuuaacggaggcaagaucucugugcaguacaaucugucccacagcuaugccgucgaugcugccaaccauugcggcaccauugcuaacggggugcuccaaacauucaugcggauggccuggggaggcucuuacaucgcgcuggacuccggguguggaaauugggauugcaucaugaccagcuaccaguaucuuauuauccagaacacgacaugggaagaccacugucaguuuucucgccccuccccuauuggcuaccuggggcuccugagccaaagaacccgggauaucuauauuucccgcagacuucugggaacauucaccuggacccucucugacagcgagggcaaugaaacacccggcggguacugccugacgcgguggaugcugaucgaggccgagcucaaguguuuuggaaacaccgcuguugccaaaugcaaugaaaagcaugaugaggaguucugcgacaugcugcgccuuuuugauuucaacaaacaggcuaucagacggcugaagaccccugcccaggcgaauauucagcucaucaacaaagccgugaaugcucugauuaacgaccaacuuaucaugaagaaucaucugcgcgauauuauguguauccccuauugcaacuacuccaaguauugguaccucaaucacacagucacaggcaaaaccagccugccuagauguuggcuggugucuaacggguccuaccucaaugaaacgcacuucagcgacgacaucgaacagcaggccgauaacaugauuacagagcugcuucaaaaggaguauauggaccggcagggaaaaaccccgcugggccucguggaucuguuugucuucucuaccagcuuuuaccugaucuccauuuuccuucaccucguuaagauccccacacaucgccacgugauugggaaaccuugccccaagccucauagacugaaccacaugggaaucuguucuugcggccuguauaaacaccccggcgugccggucaaguggaagcggugaggacuagucccuguucccagagcccacuuuuuuuucuuuuuuugaaauaaaauagccugucuuucagaucucaaaggcucuuuucagagccaccaaaaaaaaaaaaaaaaaaaaaaaaaaaaaaaaaaaaaaaaaaaaaaaaaaaaaaaaaaaaaaaaaaaaaaaaaaaaaaaaaaaaaaaaaaaaaaaaaaaaa

SEQ ID NO: 28442 - RNA, 1745 nt, Artificial Sequence
  mRNA product Design a-1 (hSL-A100) comprising derived and/or modified sequence from LASV(Nig08-A19;Clade III)__ADU56618__GPCmut5 (opt5)
aggagagucccgcagucggcguccagcggcucugcuuguucgugugugugucguugcaggccuuauucaagcuuaccaugggccagaucgugaccuucuuucaagaggucccccacguuauugaagaggugaugaacaucgugcugauugcccucagcauccuggcuauucuuaaggggcuguacaauaucgccacaugcggacucaucggccuggucacguuccuucugcucuccgggagaucuuguagcaugaccuauaaaggaguguacgaacugcagacacuggagcucaacaugaauacccugaacaugacaaugccucuuuccugcaccaagaauaacucucaucacuauauuaugguuggcaaugaaacagggcuggagcucacccugacgaacaccagccuucugcaucacaaauuuuguaaucucuccgacgcgcauaagaaaaaccuguacgaucacacacugaugucuaucauuagcaccuuccaccucuccaucccgaauuuuaaccaguaugaggcuaugagcugcgacuucaauggaggcaagauuacagugcaguacaaccugucucauuccuaugccaucgaugccgcuaaucacuguggcaccgucgccaacggggugcuucaaacguuuaugcggauggcuuggggaggcagcuacauugcccuggacucugggugcggaaagugggauuguaucaugacauccuaccaguaucucaucauucagaacaccacaugggaagaccauugccaguucagccgccccucuccuaucggcuaccuggggcuucugucccaaagaacccgggauauuuauaucagccgcagacuccugggaaccuuuacauggacgcuguccgacucugagggcaaugaaacccccggcggguacugucucacacgguggaugcugauugaggcggagcuuaaaugcuucggaaacaccgccguugcuaaguguaaugaaaaacacgaugaggaauuuugcgacaugcugcgccucuucgauuuuaacaagcaggccaucagacggcugaaagcuccugcccagaugagcauccagcuuauuaauaaggcggugaacgcccugaucaaugaccaacucauuaugaagaaccaucugcgcgauaucaugugcauucccuauuguaauuacuccaaauauugguaccugaaccacacaagcaccggcagaacgucucucccucggugcuggcuggucuccaaugggagcuaccuuaacgagacacacuucucugacgacaucgaacagcaggcugauaauaugaucaccgagaugcugcaaaaggaguaucucgaccgccagggaaaaaccccgcugggccugguggaucuuuucguguuuagcacauccuucuaccucauuucuaucuuucugcaucuggucaagauucccacccacagacauaucguugggaaaccuugucccaagccucaccggcucaaccacaugggaauuugcagcuguggccuguauaaacagcccggcgugccggugcgcuggaagagaugaggacuagucccuguucccagagcccacuuuuuuuucuuuuuuugaaauaaaauagccugucuuucagaucucaaaggcucuuuucagagccaccaaaaaaaaaaaaaaaaaaaaaaaaaaaaaaaaaaaaaaaaaaaaaaaaaaaaaaaaaaaaaaaaaaaaaaaaaaaaaaaaaaaaaaaaaaaaaaaaaaaaa

SEQ ID NO: 28443 - RNA, 1748 nt, Artificial Sequence
  mRNA product Design a-1 (hSL-A100) comprising derived and/or modified sequence from LASV(G1180-SLE-2010;Clade IV)__AIT17168__GPCmut5 (opt5)
aggagagucccgcagucggcguccagcggcucugcuuguucgugugugugucguugcaggccuuauucaagcuuaccaugggccagaucgugaccuucuuucaagaggucccccacguuauugaagaggugaugaacaucgugcugauugcccucagcauccuggcuguccuuaaggggcuguacaauuucgccacaugcggacucgugggccugcuuacguuucugcuccugugugggagauccugcaccgcgucucgguauaaaggaguuuacgaacugcagacacucgagcugaacauggaaacccuuaauaugacaaugccucugagcuguaccaagaacaauucccaucacuauauuauggugggcaacgagacagggcucgagcugacccuuacgaauaccucuaucaucaaccauaaauucugcaaucugagcgacgcucacaagaaaaaccucuacgaucaugcccugauguccauuaucucuacauuucaccugagcauuccgaauuucaaccaguaugaagccauguccugugacuuuaauggaggcaagaucagcguccaguacaaccucucucacuccuaugcuggcgaugccgcuaaucauugcgggaccguggccaacggaguucugcaaacauucaugcgcauggcguggggcgggagcuacauugcccuugacucuggauguggcuccugggauugcaucaugaccagcuaccaguaucugauuauccagaacacgacaugggaggaccacugucaguuuucuagacccuccccuaucggguaccucggacugcuuagccaacggacccgcgauauuuauaucuccagacggcugcucggcacauucaccuggacccugucugacagcgaaggcaaggauacacccgggggauacugccugacgcgcuggaugcucauugaggcugagcugaaauguuuuggcaauaccgccguggcuaagugcaacgaaaaacaugacgaggaguucugcgauaugcuuagacuguuugacuucaauaagcaggccauccagcggcucaaagcgccugcccagauguccauucaacugaucaacaaggcugucaaugcccuuaucaacgaucagcugauuaugaagaaucaccuccgcgacaucauguguauucccuauugcaacuacagcaaauauugguaccugaaucacacaaccacagggaagaccucucugccuaaauguuggcucguguccaacggaagcuaccugaaugaaacgcauuucucugacgauaucgaacagcaagcugacaacaugauuacagagaugcuucagaaggaguauauggaaagacagggcaaaaccccgcuggggcucguggaucuguuugucuucagcaccuccuuuuaccugaucucuaucuuccuucaccucguuaagauucccacacaucggcacaucgugggaaaaagcugcccuaagccccaucgccugaaucacaugggcauuuguuccugcggccuguauaagcagccuggggugcccgucaaauggaagagaugaggacuagucccuguucccagagcccacuuuuuuuucuuuuuuugaaauaaaauagccugucuuucagaucucaaaggcucuuuucagagccaccaaaaaaaaaaaaaaaaaaaaaaaaaaaaaaaaaaaaaaaaaaaaaaaaaaaaaaaaaaaaaaaaaaaaaaaaaaaaaaaaaaaaaaaaaaaaaaaaaaaaa

SEQ ID NO: 28444 - RNA, 1748 nt, Artificial Sequence
  mRNA product Design a-1 (hSL-A100) comprising derived and/or modified sequence from LASV(G1442-SLE-2011;Clade IV)__AIT17180__GPCmut5 (opt5)
aggagagucccgcagucggcguccagcggcucugcuuguucgugugugugucguugcaggccuuauucaagcuuaccaugggccagaucgugaccuucuuucaagaggucccccacguuauugaagaggugaugaacaucgugcugauugcccucagcauccuggcuguccuuaaggggcuguacaauguggccacaugcggacucauuggccugguuacguuccuucugcucugugggagauccugcaccacaacccuguauaaaggaguguacgaacugcagacacucgagcugaacauggaaacccuuaauaugacaaugccucugucuuguaccaagaacaauagccaucacuauauccgggucggcaacgagacggggcucgagcugacccuuacaaauaccuccaucauuaaccauaaauuuugcaaucugucugacgcgcacaagaaaaaccucuacgaucaugcucugaugagcaucauuuccacauuccaccugucuaucccgaauuuuaaccaguaugaagccaugagcugugacuucaauggaggcaagauuuccgugcaguacaaccucagccacucuuaugccggcgaugcugccaaucauugcgggaccguugcuaacggagugcugcaaacguuuaugcgcauggccuggggcggguccuacaucgcgcuugacagcggauguggcaacugggauugcauuaugacaucuuaccaguaucugaucauccagaauaccacaugggacgaucacugucaguucuccagacccagcccuauuggguaccucggacugcuuucucaacggacccgcgacgucuauaucuccagacggcugcucggcaccuuuacauggacgcugagcgauuccgagggcaaggacacccccgggggauacugccugacacgcuggaugcucauugaagccgagcugaaauguuucggcaacaccgcuguggccaagugcaaugagaaacaugaugaagaguuuugcgacaugcuuagacuguucgauuuuaacaagcaggcuauccagcggcucaaagccccugcgcagaugucuauucaacugaucaauaaggccgugaacgcucuuaucaaugaccagcugauuaugaagaaccaccuccgcgacaucauguguauucccuauugcaauuacagcaaauauugguaccugaacaauacagccaccgggaagacgucccugccuaaauguuggcucaucagcaacggaucuuaccugaaugaaacacacuucuccgaugacauugagcaggaagcugauaacaugaucaccgagaugcuucaaaaggaguauauggaaagacagggcaaaaccccgcuggggcucgucgaccuguucguuuuuagcacaucuuucuaccugaucagcauuuuucuucaucucgugaagauccccacccaccggcauauugugggaaaauccugcccuaagccccaccgccugaaucauaugggcaucuguucuugcggccuguauaagcagccugggguccccgugagauggaaacggugaggacuagucccuguucccagagcccacuuuuuuuucuuuuuuugaaauaaaauagccugucuuucagaucucaaaggcucuuuucagagccaccaaaaaaaaaaaaaaaaaaaaaaaaaaaaaaaaaaaaaaaaaaaaaaaaaaaaaaaaaaaaaaaaaaaaaaaaaaaaaaaaaaaaaaaaaaaaaaaaaaaaa

SEQ ID NO: 28445 - RNA, 1748 nt, Artificial Sequence
  mRNA product Design a-1 (hSL-A100) comprising derived and/or modified sequence from LASV(G3010-SLE-2013;Clade IV)__AIT17344__GPCmut5 (opt5)
aggagagucccgcagucggcguccagcggcucugcuuguucgugugugugucguugcaggccuuauucaagcuuaccaugggccagaucgugaccuucuuucaagaggucccccacguuauugaagaggugaugaacaucgugcugauugcccucagcauccuggcuguccuuaaggggcuguacaauuucgccacaugcggacucgugggccugguuacguuucuucugcucugugggagauccugcaccacaucucuguauaaaggaguguacgaacugcagacccucgagcugaacauggaaacacuuaauaugaccaugccucugagcuguacaaagaacaauucccaucacuauauuauggucggcaacgagaccgggcucgagcugacgcuuaccaauacaucuaucaucaaccauaaauucugcaaucugagcgacgcgcacaagaaaaaccucuacaaucaugcucugauguccauuaucucuaccuuucaccugagcauuccgaacuucaaucaguaugaagccauguccugugauuuuaacggaggcaagaucagcgugcaguacaaucucucucacuccuaugccggcgacgcugccagccauugcgggacaguugcuaacggagugcugcaaaccuucaugcggauggccuggggcgggucuuacauugcgcuugauuccggauguggcaagugggacugcaucaugacgagcuaccaguaucugauuauccagaacacaaccugggaggaucacugucaguuuucucgccccuccccuaucggguaccucggacugcuuagccaaagaacacgggacauuuauaucucccgcagacugcucggcaccuucaccuggacacugucugauagcgaaggcaaagacacgcccgggggauacugccugacccgguggaugcucauugaggccgagcugaaguguuuuggcaauacagcugucgccaaaugcaacgaaaagcaugaugaggaguucugcgacaugcuucgccuguuugauuucaauaaacaggcuauccagagacucaagaccccugcccagauguccauucaacugaucaacaaggcggugaaugcccuuaucaacgaccagcugauuaugaaaaaucaccuccgggauaucauguguauucccuauugcaacuacagcaaguauugguaccugaaucacacaaccacggggaaaacaucucugccuaaguguuggcucguguccaacggaagcuaccugaaugaaacccauuucucugacgacaucgaacagcaagcugauaacaugauuaccgagaugcuucagaaagaguauauggaacgccagggcaagacaccgcuggggcucgucgaccuguuuguuuucagcaccuccuuuuaccugaucucuaucuuccuucaccucgugaaaauucccacacauagacacaucgugggaaagagcugcccuaagccccaucggcugaaucacaugggcauuuguuccugcggccuguauaaacagccugggguccccgugcgcuggaagagaugaggacuagucccuguucccagagcccacuuuuuuuucuuuuuuugaaauaaaauagccugucuuucagaucucaaaggcucuuuucagagccaccaaaaaaaaaaaaaaaaaaaaaaaaaaaaaaaaaaaaaaaaaaaaaaaaaaaaaaaaaaaaaaaaaaaaaaaaaaaaaaaaaaaaaaaaaaaaaaaaaaaaa

SEQ ID NO: 28446 - RNA, 1748 nt, Artificial Sequence
  mRNA product Design a-1 (hSL-A100) comprising derived and/or modified sequence from LASV(G502-SLE-2009;Clade IV)__AIT17126__GPCmut5 (opt5)
aggagagucccgcagucggcguccagcggcucugcuuguucgugugugugucguugcaggccuuauucaagcuuaccaugggccagaucgugaccuucuuucaagaggucccccacguuauugaagaggugaugaacaucgugcugauugcccucagcauccuggcuguccuuaaggggcuguacaauuucgccacaugcggacucgugggccugcuuacguuucugcuccugugugggagauccugcaccacaggacuguauaaaggcguuuacgaacuccagacccuggagcuuaacauggaaacacugaauaugaccaugccucucucuuguacaaagaacaauagccaucacuauauuaugguggggaacgagaccggacuggagcuuacgcugaccaauacauccaucaucaaccauaaauucugcaaucucucugacgcgcacaagaaaaaccuguacgaucaugcucugaugagcauuaucuccaccuuucaccucucuauuccgaauuucaaccaguaugaagccaugagcugugacuuuaauggcggcaagaucuccguccaguacaaccugagccacucuuaugccggggaugcugccgaccauugcggaacaguggcuaauggcguucuucaaaccuucaugcggauggccuggggaggguccuacauugcgcuggauagcggcugugggcgcugggacugcaucaugacgucuuaccaguaucucauuauccagaacacaaccugggaggaucacugucaguuuuccagacccagcccuaucggauaccugggccuucugucucaacggacacgcgacauuuauaucuccagacggcuccugggcaccuucaccuggacacugagcgauuccgaagggaaggacacgcccggaggcuacugccucacccgcuggaugcugauugaggccgagcuuaaauguuuugggaacacagcuguggccaagugcaaugaaaaacaugaugaggaguucugcgacaugcugagacucuuugauuucaacaagcaggcuauccagcggcugaaagccccugcgcagaugucuauucaacuuaucaauaaggccgucaacgcucugaucaaugaccagcucgugaugaagaaccaucugcgcgacauuauguguauccccuauugcaauuacagcagauauugguaccugaaccacaccacaaccggacggacgucccucccuaaauguuggcuggugagcaauggcucuuaccuuaacgaaacacacuucuccgaugacauugaacagcaagccgauaauaugaucaccgagaugcugcagaaggaguauauggaacgccaggggaaaaccccgcucggacuggucgaccuguuuguuuucagcacaucuuuuuaccuuauuagcaucuuccuccaccuggugaagauccccacccauagacacauugugggcaaauccugcccuaagccccaucggcugaaccacaugggcaucuguucuugcgggcucuauaaacagccuggaguccccgugaaguggaagcgcugaggacuagucccuguucccagagcccacuuuuuuuucuuuuuuugaaauaaaauagccugucuuucagaucucaaaggcucuuuucagagccaccaaaaaaaaaaaaaaaaaaaaaaaaaaaaaaaaaaaaaaaaaaaaaaaaaaaaaaaaaaaaaaaaaaaaaaaaaaaaaaaaaaaaaaaaaaaaaaaaaaaaa

SEQ ID NO: 28447 - RNA, 1748 nt, Artificial Sequence
  mRNA product Design a-1 (hSL-A100) comprising derived and/or modified sequence from LASV(G733-SLE-2010;Clade IV)__AIT17154__GPCmut5 (opt5)
aggagagucccgcagucggcguccagcggcucugcuuguucgugugugugucguugcaggccuuauucaagcuuaccaugggccagaucgugaccuucuuucaagaggucccccacguuauugaagaggugaugaacaucgugcugauugcccucagcauccuggcuguccuuaaggggcuguacaauuucgccacaugcggaauugugggccucguuuccuuucugcuucugugugggagaucuugcacgaccagccucuauaaaggaguguacgaacugcagacacuggagcucaacauggaaacccugaauaugacaaugccucuuuccuguaccaagaacaauucucaucacuauaucauggucggcaacgagacagggcuggagcucacccugacgaauaccagcaucauuaaccauaaauucugcaaucuuuccgacgcgcacaagaaaaaccuguacgaucaugcucucaugucuaucauuagcacauuucaccuguccaucccgaauuucaaccaguaugaagccaugagcugugacuuuaauggaggcaagauuucugugcaguacaaccugucccacagcuaugccggcgaugcugccaaucauugcgggaccaucgcuaacggaguucuccaaacauucaugcggauggccuggggcgggucuuacauugcgcuggacuccggaugugaucgcugggacugcaucaugaccagcuaccaguaucuuaucauucagaacacgacaugggaggaucacugucaguuuucuagacccuccccuaucggcuaccuggggcuccugagccaacggacccgcgacauuuauaucuccagacggcuucugggaacauucaccuggacccucucugauagcgaaggcaaggacacacccggcggguacugccugacgcgcuggaugcugauugaggccgagcucaaauguuuuggaaauaccgcuguggccaagugcaacgaaaaacaugaugaggaguucugcgacaugcugagacuuuuugauuucaauaagcaggcuauccagcggcugaaagccccugcgcagauguccauccaacucauuaacaaggccgucaaugcucugaucaacgaccagcuuauuaugaagaaucaucugcgcgacaucauguguauucccuauugcaacuacagcaaauauugguaccucaaucacacaaccacaggcaagaccucucugccuaaauguuggcugguguccaacgggagcuaccucaaugaaacgcacuucucugaugacaucgaacagcaagccgauaacaugaucacagagaugcugcagaaggaguauauggaaagacagggaaaaaccccgcuuggccugguggaccucuuugucuucagcaccuccuuuuaccugauuucuaucuuccugcaccuuguuaagauucccacacaucggcacgugguggggaaaagcugcccuaagccccaucgccucaaucacaugggaaucuguuccugcggccuguauggccagccugggguccccgugaaguggaaaagaugaggacuagucccuguucccagagcccacuuuuuuuucuuuuuuugaaauaaaauagccugucuuucagaucucaaaggcucuuuucagagccaccaaaaaaaaaaaaaaaaaaaaaaaaaaaaaaaaaaaaaaaaaaaaaaaaaaaaaaaaaaaaaaaaaaaaaaaaaaaaaaaaaaaaaaaaaaaaaaaaaaaaa

SEQ ID NO: 28448 - RNA, 1748 nt, Artificial Sequence
  mRNA product Design a-1 (hSL-A100) comprising derived and/or modified sequence from MOPV/LASV reassortant(IGS-1;Clade IV)__AFY05576__GPCmut5 (opt5)
aggagagucccgcagucggcguccagcggcucugcuuguucgugugugugucguugcaggccuuauucaagcuuaccaugggccagaucgugaccuucuuucaagaggucccccacguuauugaagaggugaugaacaucgugcugauugcccucagcguccuggcugugcuuaaggggcuguacaauuucgccacaugcggacucguuggccuggugacguuucuucugcucugugggagauccugcaccacaucucuguauaaaggagucuacgaacugcagacccucgagcugaacauggaaacacuuaauaugaccaugccucugagcuguacaaagaacaauucccaucacuauaucauggugggcaacgagaccgggcucgagcugacgcuuaccaauacaucuauuaucaaccauaaauucugcaaucugagcgacgcgcacaagaaaaaccucuacgaucaugcucugauguccaucauuucuaccuuucaccugagcaucccgaauuucaaccaguaugaagccauguccugugacuuuaauggaggcaagauuagcguucaguacaaccucucucacuccuaugccggcgaugcugccaaucauugcgggacaguggcuaacggaguccugcaaaccuucaugcggauggccuggggcgggagcuacaucgcgcuugacucuggauguggcaacugggauugcauuaugacguccuaccaguaucugaucauucagaauacaaccugggaggaccacugucaguuuagccgccccucuccuaucggguaccucggacugcuuucccaaagaacacgggauaucuauauuagccgcagacugcucggcaccuucaccuggacacuguccgacucugaaggcgaggauacgcccgggggauacugccugacccgguggaugcucaucgaggccgaacugaaguguuuuggcaacacagcuguggccaaaugcaaugagaagcaugacgaagaguucugcgauaugcuucgccuguuugacuucaacaaacaggcuauucagagacucaaggccccugcgcagaugagcauccaacugauuaauaaagccgugaacgcucuuaucaaugaucagcugaucaugaagaaccaccuccgggacauuauguguauccccuauugcaauuacuccaaguauugguaccugaaccacaccacaaccgggcgcacgagccugccuaaauguuggcucgucucuaauggauccuaccugaacgaaacacauuucagcgacgauauugagcagcaagccgacaauaugaucaccgagaugcuucagaaggaauauauggagagacagggcaaaaccccgcuggggcucguugaucuguuuguguucucuaccagcuuuuaccugauuuccaucuuccuucaccucgugaagauccccacacaucggcacauugucggaaaaucuugcccuaagccccaucgccugaaccacaugggcaucuguagcugcggccuguauaaacagccuggggugcccguuaaguggaagagaugaggacuagucccuguucccagagcccacuuuuuuuucuuuuuuugaaauaaaauagccugucuuucagaucucaaaggcucuuuucagagccaccaaaaaaaaaaaaaaaaaaaaaaaaaaaaaaaaaaaaaaaaaaaaaaaaaaaaaaaaaaaaaaaaaaaaaaaaaaaaaaaaaaaaaaaaaaaaaaaaaaaaa

SEQ ID NO: 28449 - RNA, 1748 nt, Artificial Sequence
  mRNA product Design a-1 (hSL-A100) comprising derived and/or modified sequence from LASV(LM765-SLE-2012;Clade IV)__AIT17814__GPCmut5 (opt5)
aggagagucccgcagucggcguccagcggcucugcuuguucgugugugugucguugcaggccuuauucaagcuuaccaugggccagaucgugaccuucuuucaagaggucccccacguuauugaagaggugaugaacaucgugcugauugcccucagcauccuggcuguccuuaaggggcuguacaauuucgccacaugcggacucgugggccugguuacguuucuucugcucugugggagauccugcaccacaucucuguauaaaggaguguacgaacugcagacccucgagcugaacauggaaacacuuaauaugaccaugccucugagcuguacaaagaacaauucccaucacuauauuauggucggcaacgagaccgggcucgagcugacgcuuaccaauacaucuaucaucgaccauaaauucugcaaccugagcgaugcgcaccggaagaaucucuacgaccaugcucugauguccauuaucucuaccuuucaccugagcauuccgaacuucaaucaguaugaagccauguccugugauuuuaacggaggcaaaaucagcgugcaguacaaucucucucacuccuaugccaaggacgcugccgaucauugcggcacaguugcuaacggggugcugcaaaccuucaugcgcauggccuggggaggcagcuacauugcgcuugacucuggguguggaagaugggauugcaucaugacguccuaccaguaucugauuauccagaauacaaccugggaggaccacugucaguuuagccggcccucuccuaucggcuaccucgggcugcuuucccaacgcacaagagauauuuauaucagccggcgccugcucggaaccuucaccuggacacuguccgacucugaaggcaaggauacgcccggcggguacugccugaccagauggaugcucauugaggccgagcugaaauguuuuggaaacacagcugucgccaagugcaacgaaaaacaugacgaggaguucugcgauaugcuucggcuguuugacuucaauaagcaggcuauccagcgccucaaagccccugcgcagaugagcauucaacugaucaacaaggccgugaaugcucuuaucaacgaccagcugauuaugaagaaucaccucagagauaucauguguauucccuauugcaacuacuccaaauauugguaccugaaucacaccacaaccggcaagacgagccugccuaaauguuggcucgugucuaacggguccuaccugaaugaaacacauuucagcgacgauaucgaacagcaagccgacaacaugauuaccgagaugcuucagaaggaguauauggaacggcagggaaaaaccccgcugggccucgucgaucuguuuguuuucucuaccagcuuuuaccugaucuccaucuuccuucaccucgugaagauucccacacaucgccacaucguggggaaaccuugccccaagccucauagacugaaucacaugggaauuuguucuugcggccuguauaagcagcccggcgucccggugaaauggaagcggugaggacuagucccuguucccagagcccacuuuuuuuucuuuuuuugaaauaaaauagccugucuuucagaucucaaaggcucuuuucagagccaccaaaaaaaaaaaaaaaaaaaaaaaaaaaaaaaaaaaaaaaaaaaaaaaaaaaaaaaaaaaaaaaaaaaaaaaaaaaaaaaaaaaaaaaaaaaaaaaaaaaaa

SEQ ID NO: 28450 - RNA, 1748 nt, Artificial Sequence
  mRNA product Design a-1 (hSL-A100) comprising derived and/or modified sequence from LASV(LM776-SLE-2012;Clade IV)__AIT17824__GPCmut5 (opt5)
aggagagucccgcagucggcguccagcggcucugcuuguucgugugugugucguugcaggccuuauucaagcuuaccaugggccagaucgugaccuucuuucaagaggucccccacguuauugaagaggugaugaacaucgugcugauugcccucagcauccuggcuguccuuaaggggcuguacaauuucgccacaugcggacucgugggccugguuacguuucuucugcucugugggagauccugcaccacaucuguguauaaaggagucuacgaacugcagacccuggagcucaacauggaaacacugaauaugaccaugccucuuagcuguacaaagaacaauucccaucacuauauuauggugggcaacgagaccgggcuggagcucacgcugaccaauacaucuaucaucaaccauaaauucugcaaucuuagcgacgcgcacaagaaaaaccuguacgaucaugcucucauguccauuaucucuaccuuucaccugagcauuccgaauuucaaccaguaugaagccauguccugugacuuuaauggaggcaagaucagcguucaguacaaccugucucacuccuaugccggcgaugcugccaaucauugcgggacaguggcuaacggaguccuccaaaccuucaugcggauggccuggggcgggagcuacauugcgcuggacucuggauguggcaagugggauugcaucaugacguccuaccaguaucuuauuauccagaacacaaccugggaggaccacugucaguuuagccgccccucuccuaucggguaccugggacuccugucccaaagaacacgggauauuuauaucagccgcagacuucugggcaccuucaccuggacacucuccgacucugaaggcaaagauacgcccgggggauacugccugacccgguggaugcugauugaggccgagcucaaguguuuuggcaauacagcuguggccaaaugcaacgaaaagcaugacgaggaguucugcgauaugcugcgccuuuuugacuucaauaaacaggcuauccagagacugaaggccccugcgcagaugagcauucaacucaucaacaaggccgugaaugcucugaucaacgaucagcuuauuaugaaaaaucaucugcgggacaucauguguauucccuauugcaacuacuccaaguauugguaccucaaucacaccacaaccgggaaaacgagccugccuaaguguuggcuggucucuaacggauccuaccucaaugaaacacacuucagcgacgauaucgaacagcaagccgacaacaugauuaccgagaugcugcagaaagaguauauggaacgccagggcaagaccccgcuugggcugguugaucucuuuguguucucuaccagcuuuuaccugaucuccaucuuccugcaccuugugaaaauucccacacauagacacaucgucggaaagucuugcccuaagccccaucggcucaaucacaugggcauuuguagcugcggccuguauaaacagccuggggugcccguucgcuggaagagaugaggacuagucccuguucccagagcccacuuuuuuuucuuuuuuugaaauaaaauagccugucuuucagaucucaaaggcucuuuucagagccaccaaaaaaaaaaaaaaaaaaaaaaaaaaaaaaaaaaaaaaaaaaaaaaaaaaaaaaaaaaaaaaaaaaaaaaaaaaaaaaaaaaaaaaaaaaaaaaaaaaaaa

SEQ ID NO: 28451 - RNA, 1748 nt, Artificial Sequence
  mRNA product Design a-1 (hSL-A100) comprising derived and/or modified sequence from LASV(Mad39;Clade IV)__ANH09722__GPCmut5 (opt5)
aggagagucccgcagucggcguccagcggcucugcuuguucgugugugugucguugcaggccuuauucaagcuuaccaugggccagaucgugaccuucuuucaagaggucccccacguuauugaagaggugaugaacaucgugcugauugcccucagcauccuggcuguccuuaaggggcuguacaauguggccacaugcggacucauuggccugguuacguuccuucugcucugugggagauccugcaccacaacccuguauaaaggaguguacgaacugcaggcgcucgagcugaacauggaaacacuuaauaugaccaugccucugucuuguacaaagaacaauagccaucacuauauccgggucggcaacgagaccgggcucgagcugacgcuuaccaauacaucccugaucaaccauaaauuuugcaaucucucugacgcucacaagaaaaaccuguacgaucaugcccugaugagcauuaucuccaccuuccaccucucuauuccgaauuuuaaccaguaugaagccaugagcugugacuucaaugauggaaagaucuccgugcaguacaaccugagccacacauaugcuggcgacaccgccaaucauugcggcacgguugcuaacggggugcuucaaacauuuaugcgcauggccuggggaggcucuuacauugcgcuggauuccggguguggaggcugggacugcaucaugaccagcuaccaguaucucauuauccagaacacaaccugggaggaucacugucaguucucuagacccuccccuaucggguaccugggacuucugagccaacggacccgcgacauuuauaucucuagacggcuccugggcacauuuacguggacccuguccgauagcgaaggcaaggacacacccgggggauacugccucacccgcuggaugcugauugaggccgagcuuaaauguuucggcaauacagcugucgccaagugcaacgaaaaacaugaugaggaauuuugcgacaugcugagacucuucgauuuuaauaagcaggcuauccagcggcugaaagccccugcgcagauguccauucaacuuaucaacaaggccgugaaugcucugaucaacgaccagcucauuaugaagaaucaucugcgcgacaucauguguauucccuauugcaacuacucuaaauauugguaccugaaucacaccgugacggggaagacaagccucccuaaauguuggcuggucuccaacggaagcuaccuuaaugagacccacuucucugaugacaucgaacagcaagccgauaacaugauuaccgagaugcugcagaaggaguauauggaaagacagggcaaaacaccgcucgggcugguugaccuguucguguuuuccaccagcuucuaccuuaucucuaucuuucuccaccuggugaagauucccacacaucggcacgucgugggaaaaccuugccccaagccucaucgccugaaucacaugggcaucuguagcugcggcuucuauaagcagcccgggguuccggugagauggaaacggugaggacuagucccuguucccagagcccacuuuuuuuucuuuuuuugaaauaaaauagccugucuuucagaucucaaaggcucuuuucagagccaccaaaaaaaaaaaaaaaaaaaaaaaaaaaaaaaaaaaaaaaaaaaaaaaaaaaaaaaaaaaaaaaaaaaaaaaaaaaaaaaaaaaaaaaaaaaaaaaaaaaaa

SEQ ID NO: 28452 - RNA, 1748 nt, Artificial Sequence
  mRNA product Design a-1 (hSL-A100) comprising derived and/or modified sequence from LASV(Z0947-SLE-2011;Clade IV)__AIT17840__GPCmut5 (opt5)
aggagagucccgcagucggcguccagcggcucugcuuguucgugugugugucguugcaggccuuauucaagcuuaccaugggccagaucgugaccuucuuucaagaggucccccacguuauugaagaggugaugaacaucgugcugauugcccucagcauccuggcuguccuuaaggggcuguacaauuucgccacaugcggacucgugggccugguuacguuucuucugcucugugggagauccugcaccauuucucuguauaaaggaguguacgaacugcagacacucgagcugaacauggaaacccuuaauaugacaaugccucugagcuguaccaagaacaauucccaucacuauaucauggucggcaacgagacagggcucgagcugacccuuacgaauaccucuaucauuaaccauaaauucugcaaucugagcgacgcgcacaagaaaaaccucuacgaucaugcucugauguccaucauuucuacauuucaccugagcaucccgaauuucaaccaguaugaagccauguccugugacuuuaauggaggcaagauuagcgugcaguacaaccucucucacuccuaugccggcgaugcugccaaucauugcgggaccguugcuaacggagugcugcaaacauucaugcggauggccuggggcgggagcuacaucgcgcuugacucuggaugugaucgcugggacugcauuaugaccuccuaccaguaucugaucauccagaacacgacaugggaggaucacugucaguuuagcagacccucuccuauuggcuaccucgggcugcuuucccaacggacccgcgacaucuauauuagcagacggcugcucggaacauucaccuggacccuguccgauucugaaggcaaggacacacccggcggguacugccugacgcgcuggaugcucaucgaggccgagcugaaauguuuuggaaauaccgcugucgccaagugcaacgaaaaacaugaugaggaguucugcgacaugcuuagacuguuugauuucaauaagcaggcuauucagcggcucaaagccccugcgcagaugagcauccaacugaucaacaaggccgugaaugcucuuauuaacgaccagcugaucaugaagaaucaccuccgcgacauuauguguauccccuauugcaacuacuccaaauauugguaccugaaucacacaaccacaggcaagaccagccugccuaaauguuggcucgugucuaacggguccuaccugaaugaaacgcauuucagcgaugacauugaacagcaagccgauaacaugaucacagagaugcuucagaaggaguauauggaaagacagggaaaaaccccgcugggccucgucgaccuguuuguuuucucuaccagcuuuuaccugaucuccauuuuccuucaccucgugaagauccccacacaucggcacauuguggggaaaccuugccccaagccucaucgccugaaucacaugggaaucuguucuugcggccuguauaagcagcccggcgucccggugaaauggaagagaugaggacuagucccuguucccagagcccacuuuuuuuucuuuuuuugaaauaaaauagccugucuuucagaucucaaaggcucuuuucagagccaccaaaaaaaaaaaaaaaaaaaaaaaaaaaaaaaaaaaaaaaaaaaaaaaaaaaaaaaaaaaaaaaaaaaaaaaaaaaaaaaaaaaaaaaaaaaaaaaaaaaaa

SEQ ID NO: 28453 - RNA, 1724 nt, Artificial Sequence
  mRNA product Design a-1 (A100) comprising derived and/or modified sequence from LASV(Josiah;Clade IV)__NP_694870__GPCmut5 (opt1)
aggagagucccgcagucggcguccagcggcucugcuuguucgugugugugucguugcaggccuuauucaagcuuaccaugggccagaucgugaccuucuuccaggaggucccccacgugaucgaggaggugaugaacaucguccugaucgcccucagcgugcuggccgugcugaaggggcucuacaacuucgcgaccugcggccuggucgggcuggugacguuccuccugcugugcggccgcuccugcaccaccagccucuacaaggggguguacgagcugcagacccuggagcucaacauggagacgcugaacaugaccaugccgcuguccugcaccaagaacaacagccaccacuacaucauggucggcaacgagaccggccucgagcugacgcugaccaacaccuccaucaucaaccacaaguucugcaaccucagcgacgcccacaagaagaaccuguacgaccacgcccugauguccaucaucagcaccuuccaccucuccauccccaacuucaaccaguacgaggccaugagcugcgacuucaacgggggcaagaucuccgugcaguacaaccugagccacuccuacgccggggacgcggccaaccacugcggcacgguggccaacgggguccugcagaccuucaugcggauggccuggggcggcagcuacaucgcgcucgacuccgggugcggcaacugggacugcaucaugaccagcuaccaguaccugaucauccagaacaccacgugggaggaccacugccaguucucccggcccagccccaucggguaccugggccuccugucccagcgcacccgggacaucuacaucagccgccggcugcucggcaccuucaccuggacgcugagcgacuccgaggggaaggacaccccgggcggguacugccugacccgcuggaugcucaucgaggccgagcugaagugcuucggcaacaccgccguggccaagugcaacgagaagcacgacgaggaguucugcgacaugcugcggcuguucgacuucaacaagcaggccauccagcgccugaaggcgcccgcccagaugagcauccagcugaucaacaaggccgugaacgcccucaucaacgaccagcugaucaugaagaaccaccuccgggacaucaugugcauccccuacugcaacuacuccaaguacugguaccucaaccacacgaccaccggccgcaccagccugcccaagugcuggcuggucuccaacggcagcuaccucaacgagacgcacuucuccgacgacaucgagcagcaggccgacaacaugaucaccgagaugcugcagaaggaguacauggagcggcaggggaagacgccccugggccucguggaccuguucguguucagcaccuccuucuaccugaucagcaucuuccugcaccucgucaagaucccgacccaccgccacaucguggggaaguccugccccaagccccaccggcugaaccacaugggcaucugcagcugcgggcuguacaagcagcccggcgugccggucaaguggaagcgcugaggacuagucccuguucccagagcccacuuuuuuuucuuuuuuugaaauaaaauagccugucuuucagaucuaaaaaaaaaaaaaaaaaaaaaaaaaaaaaaaaaaaaaaaaaaaaaaaaaaaaaaaaaaaaaaaaaaaaaaaaaaaaaaaaaaaaaaaaaaaaaaaaaaaa

SEQ ID NO: 28454 - RNA, 1721 nt, Artificial Sequence
  mRNA product Design a-1 (A100) comprising derived and/or modified sequence from LASV(LP;Clade I)__AAF86701__GPCmut5 (opt1)
aggagagucccgcagucggcguccagcggcucugcuuguucgugugugugucguugcaggccuuauucaagcuuaccaugggccagaucaucaccuucuuccaggaggugccccacgucaucgaggaggugaugaacaucgugcugaucgcccucagccugcuggccauccucaaggggcuguacaacaucgcgaccugcggcaucaucgggcuggucgccuuccucuuccugugcggcaaguccugcagccugacgcucaagggcggguacgagcugcagacccuggagcucaacauggagacccugaacaugaccaugccgcuguccugcacgaagaacagcucccaccacuacauccgcgugggcaacgagaccgggcucgagcugacccugaccaacacgagcaucaucaaccacaaguucugcaaccucuccgacgcccacaagaagaaccuguacgaccacgcccugaugagcaucaucuccaccuuccaccucagcauccccaacuucaaccaguacgaggccauguccugcgacuucaacggcgggaagaucagcgugcaguacaaccugucccacagcuacgcgggcgacgccgccgagcacugcgggaccgucgccaacggcgugcugcagaccuucaugcggauggcguggggcgggcgcuacaucgcccucgacuccggcugcgggaacugggacugcaucaugacgagcuaccaguaccugaucauccagaacaccaccugggaggaccacugccaguucucccggcccagccccaucggcuaccugggccuccugucccagcgcacccgggacaucuacaucagccgccggcugcucgggacguucaccuggacccugagcgacuccgagggcaacgagacccccgggggcuacugccugacgcgcuggaugcucaucgaggccgagcugaagugcuucgggaacaccgccguggccaagugcaacgagaagcacgacgaggaguucugcgacaugcugcggcuguucgacuucaacaagcaggcgauccgccggcugaaggcccccgcccagaugagcauccagcugaucaacaaggccgucaacgcccucaucaacgaccagcugaucaugaagaaccaccuccgcgacaucaugugcauccccuacugcaacuacuccaaguacugguaccucaaccacaccagcuccggccggaccagccugcccaagugcuggcugaucuccaacgggagcuaccucaacgagacgcaguucuccgacgacaucgagcagcaggcggacaacaugaucaccgagaugcugcagaaggaguacaucgagcgccagggcaagaccccgcuggggcucguggacaucuucaucuucagcaccuccuucuaccugaucagcaucuuccugcaccugaucaagaucccgacgcaccggcacaucgugggcaagcccugccccaagccccaccgccucaaccacaugggggucugcuccugcggccuguacaagcacccgggcgugcccaccaaguggaagcggugaggacuagucccuguucccagagcccacuuuuuuuucuuuuuuugaaauaaaauagccugucuuucagaucuaaaaaaaaaaaaaaaaaaaaaaaaaaaaaaaaaaaaaaaaaaaaaaaaaaaaaaaaaaaaaaaaaaaaaaaaaaaaaaaaaaaaaaaaaaaaaaaaaaaa

SEQ ID NO: 28455 - RNA, 1721 nt, Artificial Sequence
  mRNA product Design a-1 (A100) comprising derived and/or modified sequence from LASV(803213;Clade II)__AAF86703__GPCmut5 (opt1)
aggagagucccgcagucggcguccagcggcucugcuuguucgugugugugucguugcaggccuuauucaagcuuaccaugggccagaucaucaccuucuuccaggaggugccccacgucaucgaggaggugaugaacaucgugcugaucgcccucagccugcuggccauccucaaggggaucuacaacgucgcgaccugcggccuguucgggcugaucuccuuccuccugcugugcggccgcagcugcuccgugacguacaaggggguguacgagcuccagacccuggagcugaacauggccaaccucaacaugaccaugccgcugagcugcaccaagaacaacucccaccacuacaucauggucggcaacgagacgggccuggagcucacccugaccaacaccagcaucaucaaccacaaguucugcaaccuguccgacgcccacaagaagaaccucuacgaccacgcccugaugagcaucaucuccacguuccaccugagcauccccaacuucaaccaguacgaggccauguccugcgacuucaacgggggcaagaucagcgugcaguacaaccucucccacagcuucgcgguggacgccgccaaccacugcgggaccaucgccaacggcguccugcagaccuucaugcggauggcguggggcggguccuacaucgcccuggacagcggcugcgggaacugggacugcaucaugaccuccuaccaguaccucaucauccagaacacgaccugggaggaccacugccaguucagccgccccucccccaucggcuaccuggggcugcucagccagcggacccgcgacaucuacaucagccggcgccugcugggcaccuucacguggacccucuccgacagcgagggcaacgaggcccccgggggcuacugccugacccgguggaugcugaucgaggccgagcucaagugcuucgggaacaccgccguggcgaagugcaacgagaagcacgacgaggaguucugcgacaugcugcgccuguucgacuucaacaagcaggccaucaagcggcucaagacgcccgcccagauguccauccagcugaucaacaaggccgugaacgcccugaucaacgaccagcucaucaugaagaaccaccuccgcgacaucaugugcauccccuacugcaacuacagccgguacugguaccugaaccacaccgucaccgggaagaccucccugccccgcugcuggcuggugagcaacggcuccuaccugaacgagacgcacuucagcgacgacaucgagcagcaggcggacaacaugaucaccgagaugcuccagaaggaguacauggaccggcagggcaagaccccgcuggggcugguggaccucuucgucuucuccaccagcuucuaccugaucuccaucuuccugcaccuggugaagaucccgacgcaccgccacaucgugggcaagcccugccccaagccccaccggcucaaccacauggggaucugcagcugcggccuguacaagcacccggggguccccgugaaguggaagcgcugaggacuagucccuguucccagagcccacuuuuuuuucuuuuuuugaaauaaaauagccugucuuucagaucuaaaaaaaaaaaaaaaaaaaaaaaaaaaaaaaaaaaaaaaaaaaaaaaaaaaaaaaaaaaaaaaaaaaaaaaaaaaaaaaaaaaaaaaaaaaaaaaaaaaa

SEQ ID NO: 28456 - RNA, 1721 nt, Artificial Sequence
  mRNA product Design a-1 (A100) comprising derived and/or modified sequence from LASV(GA391;Clade III)__CAA36645__GPCmut5 (opt1)
aggagagucccgcagucggcguccagcggcucugcuuguucgugugugugucguugcaggccuuauucaagcuuaccaugggccagaucgugaccuucuuccaggaggucccccacgugaucgaggaggugaugaacaucguccugaucgcccucagcauccuggccauccugaaggggcucuacaacguggcgaccugcggccugaucgggcuggugacguuccuccugcuguccggccgcagcugcucccucaucuacaaggggaccuacgagcugcagacccuggagcucaacauggagacccugaacaugacgaugccgcugagcugcaccaagaacaacucccaccacuacauccgggucggcaacgagaccggccucgagcugacccugacgaacaccagcauccucaaccacaaguucugcaaccuguccgacgcccacaagcgcaaccuguacgaccacagccucauguccaucaucagcaccuuccaccuguccauccccaacuucaaccaguacgaggccaugagcugcgacuucaacgggggcaagaucaccgugcaguacaaccugucccacagcuucgccguggacgccgcggggcacugcggcacgcucgccaacgggguccugcagaccuucaugcggauggccuggggcggcuccuacaucgcccuggacagcgggugcggcaacugggacugcaucaugaccuccuaccaguaccucaucauccagaacaccacgugggacgaccacugccaguucagccggcccucccccaucggguaccugggccugcucagccagcgcacccgggacaucuacaucagccgccggcugcugggcaccuucaccuggacgcucuccgacagcgaggggaacgagaccccgggcggguacugccugacccgcuggaugcugaucgaggcggagcucaagugcuucggcaacaccgccguggccaagugcaacgagaagcacgacgaggaguucugcgacaugcugcggcuguucgacuucaacaagcaggccauccgccggcucaagacgcccgcccagauguccauccagcugaucaacaaggcggugaacgcccugaucaacgaccagcucaucaugaagaaccaccuccgcgacaucaugugcauccccuacugcaacuacagccgguacugguaccugaaccacaccuccaccggcaagaccagccugccccgcugcuggcugaucuccaacggcagcuaccugaacgagacgaaguucuccgacgacaucgagcagcaggccgacaacaugaucaccgagaugcuccagaaggaguacaucgaccggcaggggaagacgccccugggccuggucgaccuguucguguucagcaccuccuucuaccucaucagcaucuuccugcaccuggugaagaucccgacccaccgccacaucgucgggaagcccugccccaagccccaccggcucaaccacaugggcaucugcuccugcgggcuguacaagcagccgggcgugcccgugcgcuggaagcggugaggacuagucccuguucccagagcccacuuuuuuuucuuuuuuugaaauaaaauagccugucuuucagaucuaaaaaaaaaaaaaaaaaaaaaaaaaaaaaaaaaaaaaaaaaaaaaaaaaaaaaaaaaaaaaaaaaaaaaaaaaaaaaaaaaaaaaaaaaaaaaaaaaaaa

SEQ ID NO: 28457 - RNA, 1724 nt, Artificial Sequence
  mRNA product Design a-1 (A100) comprising derived and/or modified sequence from LASV(AV;Clade V)__CCA30314__GPCmut5 (opt1)
aggagagucccgcagucggcguccagcggcucugcuuguucgugugugugucguugcaggccuuauucaagcuuaccaugggccagaucgugaccuucuuccaggaggucccccacgugaucgaggaggugaugaacaucguccugaucgcccucagcauccuggccgugcugaaggggcucuacaacaucgcgaccugcggccugaucgggcugaucacguuccuccugcugugcggccgcuccugcagcuccaaccucuacaaggggguguacgagcugcagagccuggaccucaacauggagacccugaacaugaccaugccgcuguccugcaccaagaacaacagccaccacuacauccgggucggcaacgacacgggccucgagcugacccugaccaacaccuccauccucaaccacaaguucugcaaccugagcgacgcccacaagaaggaccuguacgaccacgcccucauguccaucaucagcacguuccaccuguccauccccaacuucaaccaguacgaggccaugagcugcgacuucaacgggggcaagaucuccgugcaguacaaccugagccacuccuacgccaucgacgcggccaaccacugcgggaccguggccaacggcauccuccagaccuucaugcgcauggccuggggcgggagcuacaucgcgcuggacuccggcugcgggaacugggacugcaucaugaccagcuaccaguaccugaucauccagaacacgaccugggagaaccacugccaguucucccgccccagccccaucggcuaccucgggcugcugagccagcggacccgcgacaucuacaucucccggcgccuccugggcaccuucacguggacccugagcgacuccgagggcaacgccacccccgggggcuacugccucacccgguggaugcugaucgaggccgagcugaagugcuucgggaacacggccgucgccaagugcaacgagaagcacgacgaggaguucugcgacaugcuccgccuguucgacuucaacaagcaggcgaucagccggcugaagucccccgcccagaugagcauccagcucaucaacaaggccgugaacgcccugaucaacgaccagcugaucaugaagaaccaccuccgcgacaucaugugcauccccuacugcaacuacuccaaguacugguaccugaaccacaccaucaccgggaagaccagccugcccaagugcuggcucguguccaacggcagcuaccugaacgagacgcacuucuccgacgacaucgagcagcaggccgacaacaugaucaccgagaugcugcagaaggaguacauggagcggcagggcaagaccccgcucgggcuggucgaccuguucguguucagcaccuccuucuaccugaucagcaucuuccuccgccuggugaagaucccgacgcaccggcacaucgucggcaagcccugccccaagccccaccgccugaaccacauggggaucugcuccugcggccucuacaagcagccgggggugcccgugcgguggaagcgcugaggacuagucccuguucccagagcccacuuuuuuuucuuuuuuugaaauaaaauagccugucuuucagaucuaaaaaaaaaaaaaaaaaaaaaaaaaaaaaaaaaaaaaaaaaaaaaaaaaaaaaaaaaaaaaaaaaaaaaaaaaaaaaaaaaaaaaaaaaaaaaaaaaaaa

SEQ ID NO: 28458 - RNA, 1721 nt, Artificial Sequence
  mRNA product Design a-1 (A100) comprising derived and/or modified sequence from LASV(Togo/2016/7082;Clade VI)__AMR44577__GPCmut5 (opt1)
aggagagucccgcagucggcguccagcggcucugcuuguucgugugugugucguugcaggccuuauucaagcuuaccaugggccagaucaucaccuucuuccaggaggugccccacgucaucgaggaggugaugaacaucgugcugaucgcccucagccugcuggccauccucaagggggucuacaacguggcgaccugcggcaucaucgggcuggugacguuccuguuccucugcggccgcuccugcagccugaucuacaagggguccuacgagcugcagacccucgagcugaacauggagacccugaacaugaccaugccgcucagcugcacgaagaacuccagccaccacuacauccgggucggcaacgagaccggccuggagcugacccucaccaacacguccaucaucaaccacaaguucugcaaccugagcgacgcccacaagcgcaaccuguacgaccacgcccucauguccauccugagcaccuuccaccuguccauccccaacuucaaccaguacgaggccaugagcugcgacuucaacgggggcaagaucuccgugcaguacaaccucagccacgccuacgcgguggacgccgccgagcacugcgggaccgucgccaacggcgugcugcagaccuucaugcggauggcguggggcggguccuacaucgcccuggacagcggcugcgggaacugggacugcaucaugacguccuaccaguaccucaucauccagaacaccaccugggaggaccacugccaguucagccggcccucccccaucggcuaccuggggcugcucagccagcgcacccgggacaucuacaucagccgccggcugcugggcacguucaccuggacccucuccgacagcgagggcaacgagacccccgggggcuacugccugacgcgcuggaugcugaucgaggccgagcucaagugcuucgggaacaccgccguggccaagugcaacgagaagcacgacgaggaguucugcgacaugcugcggcuguucgacuucaacaagcaggcgauccagcgccucaagucccccgcccagaugagcauccagcugaucaacaaggccgucaacgcccugaucaacgaccagcucaucaugaagaaccaccuccgggacaugaugugcauccccuacugcaacuacuccaaguacugguaccugaaccacaccagcuccgggcgcaccagccugcccaagugcuggcugguguccaacggcagcuaccugaacgagacgcacuucuccgacgacaucgagcagcaggccgacaacaugaucaccgagaugcuccagaaggaguacaucgaccggcagggcaagaccccgcuggggcugguggaccucuucgucuucagcaccuccuucuaccugaucagcaucuuccugcaccugaucaagaucccgacgcaccgccacaucgugggcaagcccugccccaagccccaccggcucaaccacauggggaucugcuccugcggccuguacaagcagccgggggugcccacccgcuggaagcggugaggacuagucccuguucccagagcccacuuuuuuuucuuuuuuugaaauaaaauagccugucuuucagaucuaaaaaaaaaaaaaaaaaaaaaaaaaaaaaaaaaaaaaaaaaaaaaaaaaaaaaaaaaaaaaaaaaaaaaaaaaaaaaaaaaaaaaaaaaaaaaaaaaaaa

SEQ ID NO: 28459 - RNA, 1721 nt, Artificial Sequence
  mRNA product Design a-1 (A100) comprising derived and/or modified sequence from LASV(KAK-428;Clade n.d. (VII))__ANH09740__GPCmut5 (opt1)
aggagagucccgcagucggcguccagcggcucugcuuguucgugugugugucguugcaggccuuauucaagcuuaccaugggccagaucgugaccuucuuccaggaggucccccacgugaucgaggaggugaugaacaucguccugaucgcccucagccugcuggccauccucaaggggcuguacaacuucgcgaccugcggcgugaucgggcugaucacguuccuccugcugugcggccgcuccugcagcgccaccuacaaggggcaguacgagcuccagacccuggagcugaacauggagucccucaacaugaccaugccgcugagcugcacgaagaacaacucccaccacuacauccgggccggcaacaacaccggccuggagcucacccugaccaacacgagcaucaucucccacaaguucugcaaccugagcgacgcccacaagaagaaccucuacgaccacacccugauguccaucaucaccaccuuccaccugagcauccccaacuucaaccaguacgaggccauguccugcgacuucaacgggggcaagaucagcauccaguacaaccucucccacagcuacgcgggggacgccgcccagcacugcggcacgguggccaacgggguccugcagaccuucaugcgcauggcguggggcggcuccuaccuggcccucgacagcgggugccgcggcugggacugcaucaucuccagcuaccaguaccugaucauccagaacaccaccugggacgaccacugccaguucucccggcccagccccaucggguaccugggcuucgugagccagaagacgcgcgacaucuacaucucccggcgccuccugggcaccuucaccuggacccugagcgacuccgaggggcacgacaugccgggcggguacugccucacgcgguggaugcugaucgaggccgaccugaagugcuucggcaacaccgccguggccaagugcaacgagaagcacgacgaggaguucugcgacauguggcgccucuucgacuucaacaagcaggcgauccagcggcugaaggcccccgcccagaugaacauccagcugaucaacaaggccgucaacgcccucaucaacgaccagcugaugaugaagaaccaccuccgcgacaucaugugcauccccuacugcaacuacagcaaguucugguaccugaacaacaccaccacgggccggaccucccugccccgcugcuggcugaucagcaacggcuccuaccucaacgagacccacuucagcgacgacaucgagcagcaggcggacaacaugaucaccgagaugcugcagaaggaguacauggaccggcaggggaagacgccccugggccucguggaccuguucguguucuccaccagcuucuaccugaucaccaucuuccuccaccuggucaagaucccgacccaccgccacaucguggggaagcccugccccaagccccaccggcugaaccacaugggcaucugcuccugcgggcuguacaagcagccgggcgugcccguccgcuggaagcggugaggacuagucccuguucccagagcccacuuuuuuuucuuuuuuugaaauaaaauagccugucuuucagaucuaaaaaaaaaaaaaaaaaaaaaaaaaaaaaaaaaaaaaaaaaaaaaaaaaaaaaaaaaaaaaaaaaaaaaaaaaaaaaaaaaaaaaaaaaaaaaaaaaaaa

SEQ ID NO: 28460 - RNA, 1721 nt, Artificial Sequence; identical to SEQ ID NO: 28454
  mRNA product Design a-1 (A100) comprising derived and/or modified sequence from LASV(Pinneo-NIG-1969;Clade I)__AIT17836__GPCmut5 (opt1)

SEQ ID NO: 28461 - RNA, 1721 nt, Artificial Sequence
  mRNA product Design a-1 (A100) comprising derived and/or modified sequence from LASV(ISTH0009-NIG-2011;Clade II)__AIT17404__GPCmut5 (opt1)
aggagagucccgcagucggcguccagcggcucugcuuguucgugugugugucguugcaggccuuauucaagcuuaccaugggccagaucaucaccuucuuccaggaggugccccacgucaucgaggaggugaugaacaucgugcugaucgcccucagccugcuggccauccucaaggggaucuacaacgucgcgaccugcggccuguucgggcugguguccuuccuccugcugugcggccgcagcugcuccacgaccuacaaggggguguacgagcuccagacccuggagcuggacauggccagccucaacaugaccaugccgcuguccugcacgaagaacaacagccaccacuacaucauggucggcaacgagaccggccuggagcucacccugaccaacacguccaucaucaaccacaaguucugcaaccugagcgacgcccacaagaagaaccucuacgaccacgcccugauguccaucaucagcaccuuccaccuguccauccccaacuucaaccaguacgaggccaugagcugcgacuucaacgggggcaagaucuccgugcaguacaaccucagccacgcguacgccguggacgccgccaaccacugcgggaccaucgcgaacggcguccugcagaccuucaugcggauggccuggggcggguccuacaucgcccuggacagcggcugcggguccugggacugcaucaugacgagcuaccaguaccucaucauccagaacaccaccugggaggaccacugccaguucucccgccccagccccaucggcuaccuggggcugcucagccagcggacccgcgacaucuacaucucccggcgccugcugggcacguucaccuggacccucagcgacuccgagggcaacgagacccccgggggcuacugccugacgcgguggaugcugaucgaggccgagcucaagugcuucgggaacaccgccguggcgaagugcaacgagaagcacgacgaggaguucugcgacaugcugcgccuguucgacuucaacaagcaggccauccggcgccucaagacccccgcccagaugagcauccagcugaucaacaaggccgugaacgcccugaucaacgaccagcucaucaugaagaaccaccuccgggacaucaugugcaucccguacugcaacuacuccaaguacugguaccugaaccacaccgucacggggaagaccagccugccccgcugcuggcugguguccaacggcagcuaccugaacgagacccacuucuccgacgacaucgagcagcaggcggacaacaugaucaccgagcuccugcagaaggaguacauggaccggcagggcaagacgccccuggggcucguggaccuguucgucuucagcaccuccuucuaccugaucagcaucuuccugcaccucaucaagaucccgacccaccgccacaucaccggcaagcccugccccaagccccaccggcugaaccacauggggaucugcuccugcggccuguacaagcacccgggggugcccgugaaguggaagcgcugaggacuagucccuguucccagagcccacuuuuuuuucuuuuuuugaaauaaaauagccugucuuucagaucuaaaaaaaaaaaaaaaaaaaaaaaaaaaaaaaaaaaaaaaaaaaaaaaaaaaaaaaaaaaaaaaaaaaaaaaaaaaaaaaaaaaaaaaaaaaaaaaaaaaa

SEQ ID NO: 28462 - RNA, 1721 nt, Artificial Sequence
  mRNA product Design a-1 (A100) comprising derived and/or modified sequence from LASV(ISTH2010-NIG-2012;Clade II)__AIT17482__GPCmut5 (opt1)
aggagagucccgcagucggcguccagcggcucugcuuguucgugugugugucguugcaggccuuauucaagcuuaccaugggccagaucaucaccuucuuccaggaggugccccacgucaucgaggaggugaugaacaucgugcugaucgcccucagccugcuggccauccucaaggggaucuacaacgucgcgaccugcggccuguucgggcugguguccuuccuccugcugugcggccgcagcugcuccacgaccuacaaggggguguacgagcuccagacccuggagcuggacauggccagccucaacaugaccaugccgcuguccugcacgaagaacaacagccaccacuacaucauggucggcaacgagaccggccuggagcucacccugaccaacacguccaucaucaaccacaaguucugcaaccugagcgacgcccacaagaagaaccucuacgaccacgcccugauguccaucaucagcaccuuccaccuguccauccccaacuucaaccaguacgaggccaugagcugcgacuucaacgggggcaagaucuccgugcaguacaaccucagccacgcguacgccguggacgccgccaaccacugcgggaccaucgcgaacggcguccugcagaccuucaugcggauggccuggggcggguccuacaucgcccuggacagcggcugcggguccugggacugcaucaugacgagcuaccaguaccucaucauccagaacaucaccugggaggaccacugccaguucucccgccccagccccaucggcuaccuggggcugcucagccagcggacccgcgacaucuacaucucccggcgccugcugggcaccuucacguggacccucagcgacuccgagggcaacgagacccccgggggcuacugccugacccgguggaugcugaucgaggccgagcucaagugcuucgggaacacggccguggcgaagugcaacgagaagcacgacgaggaguucugcgacaugcugcgccuguucgacuucaacaagcaggccauccggcgccucaagacccccgcccagaugagcauccagcugaucaacaaggccgugaacgcccugaucaacgaccagcucaucaugaagaaccaccuccgggacaucaugugcauccccuacugcaacuacuccaaguacugguaccugaaccacaccgucaccgggaagacgagccugccccgcugcuggcugguguccaacggcagcuaccugaacgagacccacuucuccgacgacaucgagcagcaggcggacaacaugaucaccgagcuccugcagaaggaguacaucgaccggcagggcaagaccccgcuggggcucguggaccuguucgucuucagcacguccuucuaccugaucagcaucuuccugcaccucgugaagaucccgacccaccgccacguggucggcaagcccugccccaagccccaccggcugaaccacauggggaucugcuccugcggccuguacaagcacccgggggugcccgugaaguggaagcgcugaggacuagucccuguucccagagcccacuuuuuuuucuuuuuuugaaauaaaauagccugucuuucagaucuaaaaaaaaaaaaaaaaaaaaaaaaaaaaaaaaaaaaaaaaaaaaaaaaaaaaaaaaaaaaaaaaaaaaaaaaaaaaaaaaaaaaaaaaaaaaaaaaaaaa

SEQ ID NO: 28463 - RNA, 1721 nt, Artificial Sequence
  mRNA product Design a-1 (A100) comprising derived and/or modified sequence from LASV(Lassa virus/H.sapiens-wt/NGA/2015/ISTH_0543;Clade II)__AVO03639__GPCmut5 (opt1)
aggagagucccgcagucggcguccagcggcucugcuuguucgugugugugucguugcaggccuuauucaagcuuaccaugggccagaucaucaccuucuuccaggaggugccccacgucaucgaggaggugaugaacaucgugcugaucgcccucagccugcuggccauccucaaggggaucuacaacgucgcgaccugcggccuguucgggcugguguccuuccuccugcugugcggccgcagcugcuccacgaccuacaaggggguguacgagcuccagacccuggagcuggacauggccaaccucaacaugaccaugccgcugagcugcacgaagaacaacucccaccacuacaucauggucggcaacgagaccggccuggagcucacccugaccaacacgagcaucaucaaccacaaguucugcaaccuguccgacgcccacaagaagaaccucuacgaccacgcccugaugagcaucaucuccaccuuccaccugagcauccccaacuucaaccaguacgaggccauguccugcgacuucaacgggggcaagaucagcgugcaguacaaccucucccacaccuacgcgguggacgccgccaaccacugcgggaccaucgccaacggcguccugcagacguucaugcggauggcguggggcgggagcuacaucgcccuggacuccggcugcgggagcugggacugcaucaugaccuccuaccaguaccucgugauccagaacaccaccugggaggaccacugccaguucagccgccccucccccaucggcuaccuggggcugcucagccagcggacgcgcgacaucuacaucagccggcgccugcugggcaccuucaccuggacccucuccgacagcgagggcaacgagacgcccgggggcuacugccugacccgguggaugcugaucgaggccgagcucaagugcuucgggaacaccgccguggccaagugcaacgagaagcacgacgaggaguucugcgacaugcugcgccuguucgacuucaacaagcaggcgauccggcgccucaagacccccgcccagauguccauccagcugaucaacaaggccgucaacgcccugaucaacgaccagcucaucaugaagaaccaccuccgggacaucaugugcauccccuacugcaacuacagcaaguacugguaccugaaccacacggugaccgggaagaccucccugccccgcugcuggcuggugagcaacggcuccuaccugaacgagacccacuucagcgacgacaucgagcagcaggccgacaacaugaucacggagcuccugcagaaggaguacaucgaccggcagggcaagaccccgcuggggcucgucgaccuguucguguucuccaccagcuucuaccugaucuccaucuuccugcaccucgugaagaucccgacccaccgccacaucacgggcaagcccugccccaagccccaccggcugaaccacauggggaucugcagcugcggccuguacaagcacccggggguccccgugaaguggaagcgcugaggacuagucccuguucccagagcccacuuuuuuuucuuuuuuugaaauaaaauagccugucuuucagaucuaaaaaaaaaaaaaaaaaaaaaaaaaaaaaaaaaaaaaaaaaaaaaaaaaaaaaaaaaaaaaaaaaaaaaaaaaaaaaaaaaaaaaaaaaaaaaaaaaaaa

SEQ ID NO: 28464 - RNA, 1721 nt, Artificial Sequence
  mRNA product Design a-1 (A100) comprising derived and/or modified sequence from LASV(Lassa virus/H.sapiens-wt/NGA/2016/ISTH_0009;Clade II)__AVO03571__GPCmut5 (opt1)
aggagagucccgcagucggcguccagcggcucugcuuguucgugugugugucguugcaggccuuauucaagcuuaccaugggccagaucaucaccuucuuccaggaggugccccacgucaucgaggaggugaugaacaucgugcugaucgcccucagccugcuggccauccucaaggggaucuacaacgucgcgaccugcggccugcuggggcucguguccuuccugcugcucugcggccgcagcugcuccacgaccuacaaggggguguacgagcugcagacccuggagcucgacauggccagccugaacaugaccaugccgcuguccugcacgaagaacaacagccaccacuacaucauggucggcaacgagaccggccucgagcugacccugaccaacacguccaucaucaaccacaaguucugcaaccucagcgacgcccacaagaagaaccuguacgaccacgcccugauguccaucaucagcaccuuccaccucuccauccccaacuucaaccaguacgaggccaugagcugcgacuucaacgggggccggaucuccgugcaguacaaccugagccacuccuacgcgguggacgccgccaaccacugcgggaccaucgccaacggcguccugcagaccuucaugcgcauggcguggggcgggagcuacaucgcccucgacuccggcugcgggagcugggacugcaucaugacguccuaccaguaccugaucauccagaacaccaccugggaggaccacugccaguucagccggcccagccccaucggcuaccuggggcuccugucccagcgcacccgggacaucuacaucagccgccggcugcucggcacguucaccuggacccuguccgacagcgagggcaacgagacccccgggggcuacugccugacgcgcuggaugcucaucgaggccgagcugaagugcuucgggaacaccgccguggccaagugcaacgagaagcacgacgaggaguucugcgacaugcugcggcuguucgacuucaacaagcaggcgauccgccggcugaagacccccgcccagauguccauccagcugaucaacaaggccgugaacgcccucaucaacgaccagcugaucaugaagaaccaccuccgcgacaucaugugcaucccguacugcaacuacagcaaguacugguaccucaaccacaccgucacggggaagaccucccugccccggugcuggcuggugagcaacggcuccuaccucaacgagacccacuucagcgacgacaucgagcagcaggccgacaacaugaucaccgagcugcugcagaaggaguacaucgaccgccagggcaagacgccccucgggcugguggaccuguucgucuucuccaccagcuucuaccugaucuccaucuuccuccaccuggugaagaucccgacccaccggcacaucaccggcaagcccugccccaagccccaccgccugaaccacauggggaucugcagcugcggccucuacaaccacccgggggugcccgucaaguggaagcggugaggacuagucccuguucccagagcccacuuuuuuuucuuuuuuugaaauaaaauagccugucuuucagaucuaaaaaaaaaaaaaaaaaaaaaaaaaaaaaaaaaaaaaaaaaaaaaaaaaaaaaaaaaaaaaaaaaaaaaaaaaaaaaaaaaaaaaaaaaaaaaaaaaaaa

SEQ ID NO: 28465 - RNA, 1721 nt, Artificial Sequence
  mRNA product Design a-1 (A100) comprising derived and/or modified sequence from LASV(Lassa virus/H.sapiens-wt/NGA/2016/ISTH_0017;Clade II)__AVO03567__GPCmut5 (opt1)
aggagagucccgcagucggcguccagcggcucugcuuguucgugugugugucguugcaggccuuauucaagcuuaccaugggccagaucaucaccuucuuccaggaggugccccacgucaucgaggaggugaugaacaucgugcugaucgcccucagccugcuggccauccucaaggggaucuacaacgucgcgaccugcggccuguucgggcugguguccuuccuccugcugugcggccgcagcugcuccacgaccuacaaggggguguacgagcuccagacccuggagcuggacauggccagccucaacaugaccaugccgcuguccugcacgaagaacaacagccaccacuacaucauggucggcaacgagaccggccuggagcucacccugaccaacacguccaucaucaaccacaaguucugcaaccugagcgacgcccacaagaagaaccucuacgaccacgcccugauguccaucaucagcaccuuccaccuguccauccccaacuucaaccaguacgaggccaugagcugcgacuucaacgggggcaagaucuccgugcaguacaaccucagccacaccuacgcgaucgacgccgccaaccacugcgggaccaucgccaacggcgugcugcagacguucaugcggauggcguggggcggguccuacaucgcccuggacagcggcugcggguccugggacugcaucaugaccagcuaccaguaccucaucauccagaacaccaccugggaggaccacugccaguucucccgccccagccccaucggcuaccuggggcugcucagccagcggacgcgcgacaucuacaucucccggcgccugcugggcaccuucaccuggacccucagcgacuccgagggcaacgagacgcccgggggcuacugccugacccgguggaugcugaucgaggccgagcucaagugcuucgggaacaccgccgucgccaagugcaacgagaagcacgacgaggaguucugcgacaugcugcgccuguucgacuucaacaagcaggcgauccggcgccucaagacccccgcccagaugagcauccagcugaucaacaaggccgugaacgcccugaucaacgaccagcucaucaugaagaaccaccuccgggacaucaugugcauccccuacugcaacuacuccaaguacugguaccugaaccacacggugaccgggaagaccagccugccccgcugcuggcuggucuccaacggcagcuaccugaacgagacccacuucuccgacgacaucgagcagcaggccgacaacaugaucacggagcuccugcagaaggaguacauggaccggcagggcaagaccccgcuggggcucguggaccuguucguguucagcaccuccuucuaccugaucagcaucuuccugcaccucguccgcaucccgacccaccggcacgugaucggcaagcccugccccaagccccaccgccugaaccacauggggaucugcuccugcggccuguacaagcacccgggggugcccgucaaguggaagcggugaggacuagucccuguucccagagcccacuuuuuuuucuuuuuuugaaauaaaauagccugucuuucagaucuaaaaaaaaaaaaaaaaaaaaaaaaaaaaaaaaaaaaaaaaaaaaaaaaaaaaaaaaaaaaaaaaaaaaaaaaaaaaaaaaaaaaaaaaaaaaaaaaaaaa

SEQ ID NO: 28466 - RNA, 1721 nt, Artificial Sequence
  mRNA product Design a-1 (A100) comprising derived and/or modified sequence from LASV(Lassa virus/H.sapiens-wt/NGA/2018/ISTH_0959;Clade II)__AVV65099__GPCmut5 (opt1)
aggagagucccgcagucggcguccagcggcucugcuuguucgugugugugucguugcaggccuuauucaagcuuaccaugggccagaucaucaccuucuuccaggaggugccccacgucaucgaggaggugaugaacaucgugcugaucgcccucagccugcuggccauccucaaggggaucuacaacgucgugaccugcggccuguucgggcugguguccuuccuccugcugugcggccgcagcugcuccacgaccuacaagggggucuacgagcuccagacccuggagcuggacauggcgagccucaacaugaccaugccgcuguccugcacgaagaacaacagccaccacuacaucauggugggcaacgagaccggccuggagcucacccugaccaacacguccaucaucaaccacaaguucugcaaccugagcgacgcccacaagaagaaccucuacgaccacgcccugauguccaucaucagcaccuuccaccuguccauccccaacuucaaccaguacgaggccaugagcugcgacuucaacgggggcaagaucuccgugcaguacaaccucagccacgccuacgcgaucgacgccgccaaccacugcgggaccaucgccaacggcguccugcagaccuucaugcggauggcguggggcggguccuacaucgcccuggacagcggcugcggguccugggacugcaucaugacgagcuaccaguaccucaucauccagaacaccaccugggaggaccacugccaguucucccgccccagccccaucggcuaccuggggcugcucagccagcggacccgcgacaucuacaucucccggcgccugcugggcacguucaccuggacccucagcgacuccgagggcaacgagacccccgggggcuacugccugacgcgguggaugcugaucgaggccgagcucaagugcuucgggaacaccgccguggccaagugcaacgagaagcacgacgaggaguucugcgacaugcugcgccuguucgacuucaacaagcaggcgauccggcgccucaagacccccgcccagaugagcauccagcugaucaacaaggccgugaacgcccugaucaacgaccagcucaucaugaagaaccaccuccgggacaucaugugcaucccguacugcaacuacuccaaguacugguaccugaaccacaccgucacggggaagaccagccugccccgcugcuggcugguguccaacggcagcuaccugaacgagacccacuucuccgacgacaucgagcagcaggccgacaacaugaucaccgagcuccugcagaaggaguacaucgaccggcagggcaagacgccccuggggcucguggaccuguucgucuucagcaccuccuucuaccugaucagcaucuuccugcaccucgugaagaucccgacccaccgccacgugaucggcaagcccugccccaagccccaccggcugaaccacauggggaucugcuccugcggccuguacaagcacccggggguccccgugaaguggaagcgcugaggacuagucccuguucccagagcccacuuuuuuuucuuuuuuugaaauaaaauagccugucuuucagaucuaaaaaaaaaaaaaaaaaaaaaaaaaaaaaaaaaaaaaaaaaaaaaaaaaaaaaaaaaaaaaaaaaaaaaaaaaaaaaaaaaaaaaaaaaaaaaaaaaaaa

SEQ ID NO: 28467 - RNA, 1721 nt, Artificial Sequence
  mRNA product Design a-1 (A100) comprising derived and/or modified sequence from LASV(LASV003-NIG-2008;Clade II)__AIT17580__GPCmut5 (opt1)
aggagagucccgcagucggcguccagcggcucugcuuguucgugugugugucguugcaggccuuauucaagcuuaccaugggccagaucaucaccuucuuccaggaggugccccacgucaucgaggaggugaugaacaucgugcugaucgcccucagccugcuggccauccucaaggggaucuacaacgucgcgaccugcggccuguucgggcugguguccuuccuccugcugugcggccgcagcugcuccacgaccuacaaggggguguacgagcuccagacccuggagcuggacauggccagccucaacaugaccaugccgcuguccugcacgaagaacaacagccaccacuacaucauggucggcaacgagaccggccuggagcucacccugaccaacacguccaucaucaaccacaaguucugcaaccugagcgacgcccacaagaagaaccucuacgaccacgcccugauguccaucaucagcaccuuccaccuguccauccccaacuucaaccaguacgaggccaugagcugcgacuucaacgggggcaagaucuccgugcaguacaaccucagccacaccuacgcgguggacgccgccaaccacugcgggaccaucgccaacggcguccugcagacguucaugcggauggcguggggcggguccuacaucgcccuggacagcggcugcggguccugggacugcaucaugaccagcuaccaguaccucaucauccagaacaccaccugggaggaccacugccaguucucccgccccagccccaucggcuaccuggggcugcucagccagcggacgcgcgacaucuacaucucccggcgccugcugggcaccuucaccuggacccucagcgacuccgagagcaacgagacgccgggcggguacugccugacccgguggaugcugaucgaggccgagcucaagugcuucggcaacaccgccguggccaagugcaacgagaagcacgacgaggaguucugcgacaugcugcgccuguucgacuucaacaagcaggcgauccggcgccucaaggcccccgcccagauguccauccagcugaucaacaaggccgugaacgcccugaucaacgaccagcucaucaugaagaaccaccuccgggacaucaugugcauccccuacugcaacuacagcaaguacugguaccugaaccacaccgucacgggccgcaccucccugccccggugcuggcuggugagcaacggguccuaccugaacgagacccacuucagcgacgacaucgagcagcaggcggacaacaugaucaccgagcuccugcagaaggaguacauggaccgccagggcaagacgccccugggccucguggaccuguucgucuucuccaccagcuucuaccugaucuccaucuuccugcaccucgugaagaucccgacccaccggcacgugaucgggaagcccugccccaagccccaccgccugaaccacaugggcaucugcagcugcgggcuguacaagcacccgggcguccccgugaaguggaagcggugaggacuagucccuguucccagagcccacuuuuuuuucuuuuuuugaaauaaaauagccugucuuucagaucuaaaaaaaaaaaaaaaaaaaaaaaaaaaaaaaaaaaaaaaaaaaaaaaaaaaaaaaaaaaaaaaaaaaaaaaaaaaaaaaaaaaaaaaaaaaaaaaaaaaa

SEQ ID NO: 28468 - RNA, 1721 nt, Artificial Sequence
  mRNA product Design a-1 (A100) comprising derived and/or modified sequence from LASV(LASV035-NIG-2009;Clade II)__AIT17588__GPCmut5 (opt1)
aggagagucccgcagucggcguccagcggcucugcuuguucgugugugugucguugcaggccuuauucaagcuuaccaugggccagaucaucaccuucuuccaggaggugccccacgucaucgaggaggugaugaacaucgugcugaucgcccucagccugcuggccauccucaaggggaucuacaacgucgcgaccugcggccuguucgggcugguguccuuccuccugcugugcggccgcagcugcuccacgaccuacaaggggguguacgagcuccagacccuggagcuggacauggccagccucaacaugaccaugccgcuguccugcacgaagaacaacagccaccacuacaucauggucggcaacgagaccggccuggagcucacccugaccaacacguccaucaucaaccacaaguucugcaaccugagcgacgcccacaagaagaaccucuacgaccacgcccugauguccaucaucagcaccuuccaccuguccauccccaacuucaaccaguacgaggccaugagcugcgacuucaacgggggcaagaucuccgugcaguacaaccucagccacgcguacgccguggacgccgccaaccacugcgggaccaucgcgaacggcguccugcagaccuucaugcggauggccuggggcggguccuacaucgcccuggacagcggcugcggguccugggacugcaucaugacgagcuaccaguaccucaucauccagaacaccaccugggaggaccacugccaguucucccgccccagccccaucggcuaccuggggcugcucagccagcggacccgcgacaucuacaucucccggcgccugcugggcacguucaccuggacccucagcgacuccgagggcaacgagacccccgggggcuacugccugacgcgguggaugcugaucgaggccgagcucaagugcuucgggaacaccgccguggcgaagugcaacgagaagcacgacgaggaguucugcgacaugcugcgccuguucgacuucaacaagcaggccauccggcgccucaaggcccccgcccagaugagcauccagcugaucaacaaggccgugaacgcgcugaucaacgaccagcucaucaugaagaaccaccuccgggacaucaugugcauccccuacugcaacuacuccaaguacugguaccugaaccacaccgucaccgggaagacgagccugccccgcugcuggcugguguccaacggcagcuaccugaacgagacccacuucuccgacgacaucgagcagcaggccgacaacaugaucaccgagcuccugcagaaggaguacaucgaccggcagggcaagaccccgcuggggcucguggaccuguucgucuucagcacguccuucuaccugaucagcaucuuccugcaccucgugaagaucccgacccaccgccacgugaucggcaagcccugccccaagccccaccggcugaaccacauggggaucugcuccugcggccuguacaagcacccggggguccccgugaaguggaagcgcugaggacuagucccuguucccagagcccacuuuuuuuucuuuuuuugaaauaaaauagccugucuuucagaucuaaaaaaaaaaaaaaaaaaaaaaaaaaaaaaaaaaaaaaaaaaaaaaaaaaaaaaaaaaaaaaaaaaaaaaaaaaaaaaaaaaaaaaaaaaaaaaaaaaaa

SEQ ID NO: 28469 - RNA, 1721 nt, Artificial Sequence
  mRNA product Design a-1 (A100) comprising derived and/or modified sequence from LASV(LASV1000-NIG-2009;Clade II)__AIT17782__GPCmut5 (opt1)
aggagagucccgcagucggcguccagcggcucugcuuguucgugugugugucguugcaggccuuauucaagcuuaccaugggccagaucaucaccuucuuccaggaggugccccacgucaucgaggaggugaugaacaucgugcugaucgcccucagccugcuggccauccucaaggggaucuacaacgucgcgaccugcggccuguucgggcugguguccuuccuccugcugugcggccgcagcugcuccacgaccuacaaggggguguacgagcuccagacccuggagcuggacauggccagccucaacaugaccaugccgcuguccugcacgaagaacaacagccaccacuacaucauggucggcaacgagaccggccuggagcucacccugaccaacacguccaucaucaaccacaaguucugcaaccugagcgacgcccacaagaagaaccucuacgaccacgcccugauguccaucaucagcaccuuccaccuguccauccccaacuucaaccaguacgaggccaugagcugcgacuucaacgggggcaagaucuccgugcaguacaaccucagccacaccuacgcgguggacgccgccaaccacugcgggaccaucgccaacggcguccugcagacguucaugcggauggcguggggcggguccuacaucgcccuggacagcggcugcggguccugggacugcaucaugaccagcuaccaguaccucaucauccagaacaccaccugggaggaccacugccaguucucccgccccagccccaucggcuaccuggggcugcucagccagcggacgcgcgacaucuacaucucccggcgccugcugggcaccuucaccuggacccucagcgacuccgagggcaacgagacgcccgggggcuacugccugacccgguggaugcugaucgaggccgagcucaagugcuucgggaacaccgccguggccaagugcaacgagaagcacgacgaggaguucugcgacaugcugcgccuguucgacuucaacaagcaggcgaucaagcggcucaagacccccgcccagaugagcauccagcugaucaacaaggccgugaacgcccugaucaacgaccagcucaucaugaagaaccaccuccgcgacaucaugugcauccccuacugcaacuacuccaaguacugguaccugaaccacacggucaccgggaagaccagccugccccggugcuggcugguguccaacggcagcuaccugaacgagacccacuucuccgacgacaucgagcagcaggccgacaacaugaucacggagcuccugcagaaggaguacaucgaccgccagggcaagaccccgcuggggcucguggaccuguucgucuucagcaccuccuucuaccugaucagcaucuuccugcaccucgugaagaucccgacccaccggcacguggucggcaagcccugccccaagccccaccgccugaaccacauggggaucugcuccugcggccuguacaagcacccgggggugcccgugaaguggaagcggugaggacuagucccuguucccagagcccacuuuuuuuucuuuuuuugaaauaaaauagccugucuuucagaucuaaaaaaaaaaaaaaaaaaaaaaaaaaaaaaaaaaaaaaaaaaaaaaaaaaaaaaaaaaaaaaaaaaaaaaaaaaaaaaaaaaaaaaaaaaaaaaaaaaaa

SEQ ID NO: 28470 - RNA, 1721 nt, Artificial Sequence
  mRNA product Design a-1 (A100) comprising derived and/or modified sequence from LASV(LASV221-NIG-2010;Clade II)__AIT17624__GPCmut5 (opt1)
aggagagucccgcagucggcguccagcggcucugcuuguucgugugugugucguugcaggccuuauucaagcuuaccaugggccagaucaucaccuucuuccaggaggugccccacgucaucgaggaggugaugaacaucgugcugaucgcccucagccugcuggccauccucaaggggaucuacaacgucgcgaccugcggccuguucgggcugguguccuuccuccugcugugcggccgcagcugcuccacgaccuacaaggggguguacgagcuccagacccuggagcuggacauggccagccucaacaugaccaugccgcuguccugcacgaagaacaacagccaccacuacaucauggucggcaacgagaccggccuggagcucacccugaccaacacguccaucaucaaccacaaguucugcaaccugagcgacgcccacaagaagaaccucuacgaccacgcccugauguccaucaucagcaccuuccaccuguccauccccaacuucaaccaguacgaggccaugagcugcgacuucaacgggggcaagaucuccgugcaguacaaccucagccacaccuacgcgaucgacgccgccaaccacugcgggaccaucgccaacggcgugcugcagacguucaugcggauggcguggggcggguccuacaucgcccuggacagcggcugcggguccugggacugcaucaugaccagcuaccaguaccucaucauccagaacaccaccugggaggaccacugccaguucucccgccccagccccaucggcuaccuggggcugcucagccagcggacgcgcgacaucuacaucucccggcgccugcugggcaccuucaccuggacccucagcgacuccgagggcaacgagacgcccgggggcuacugccugacccgguggaugcugaucgaggccgagcucaagugcuucgggaacaccgccgucgccaagugcaacgagaagcacgacgaggaguucugcgacaugcugcgccuguucgacuucaacaagcaggcgauccggcgccucaagacccccgcccagaugagcauccagcugaucaacaaggccgugaacgcccugaucaacgaccagcucaucaugaagaaccaccuccgggacaucaugugcauccccuacugcaacuacuccaaguacugguaccugaaccacacggugaccgggaagaccagccugccccgcugcuggcuggucuccaacggcagcuaccugaacgagacccacuucuccgacgacaucgagcagcaggccgacaacaugaucacggagaugcuccagaaggaguacauggaccggcagggcaagaccccgcuggggcugguggaccucuucguguucagcaccuccuucuaccugaucagcaucuuccugcaccuggucaagaucccgacccaccgccacgugaucggcaagcccugccccaagccccaccggcucaaccacauggggaucugcuccugcggccuguacaagcacccgggggugcccgucaaguggaagcgcugaggacuagucccuguucccagagcccacuuuuuuuucuuuuuuugaaauaaaauagccugucuuucagaucuaaaaaaaaaaaaaaaaaaaaaaaaaaaaaaaaaaaaaaaaaaaaaaaaaaaaaaaaaaaaaaaaaaaaaaaaaaaaaaaaaaaaaaaaaaaaaaaaaaaa

SEQ ID NO: 28471 - RNA, 1721 nt, Artificial Sequence
  mRNA product Design a-1 (A100) comprising derived and/or modified sequence from LASV(LASV237-NIG-2010;Clade II)__AIT17638__GPCmut5 (opt1)
aggagagucccgcagucggcguccagcggcucugcuuguucgugugugugucguugcaggccuuauucaagcuuaccaugggccagaucaucaccuucuuccaggaggugccccacgucaucgaggaggugaugaacaucgugcugaucgcccucagccugcuggccauccucaaggggaucuacaacgucgcgaccugcggccuguucgggcugguguccuuccuccugcugugcggccgcagcugcuccacgaccuacaaggggguguacgagcuccagacccuggagcuggacauggccagccucaacaugaccaugccgcuguccugcacgaagaacaacagccaccacuacaucauggucggcaacgagaccggccuggagcucacccugaccaacacguccaucaucaaccacaaguucugcaaccugagcgacgcccacaagaaggaccucuacgaccacgcccugauguccaucaucagcaccuuccaccuguccauccccaacuucaaccaguacgaggccaugagcugcgacuucaacgggggcaagaucuccgugcaguacaaccucagccacaccuacgcgguggacgccgccaaccacugcgggaccaucgccaacggcguccugcagacguucaugcggauggcguggggcggguccuacaucgcccuggacagcggcugcggguccugggacugcaucaugaccagcuaccaguaccucaucauccagaacaccaccugggaggaccacugccaguucucccgccccagccccaucggcuaccuggggcugcucagccagcggacgcgcgacaucuacaucucccggcgccugcugggcaccuucaccuggacccucagcgacuccgagggcaacgagacgcccgggggcuacugccugacccgguggaugcugaucgaggccgagcucaagugcuucgggaacaccgccguggccaagugcaacgagaagcacgacgaggaguucugcgacaugcugcgccuguucgacuucaacaagcaggcgauccggcgccucaagacccccgcccagaugagcauccagcugaucaacaaggccgugaacgcccugaucaacgaccagcucaucaugaagaaccaccuccgggacaucaugugcauccccuacugcaacuacuccaaguacugguaccugaaccacacggucaccgggaagaccagccugccccgcugcuggcugguguccaacggcagcuaccugaacgagacccacuucuccgacgacaucgagcagcaggccgacaacaugaucacggagcuccugcagaaggaguacauggaccggcagggcaagaccccgcuggggcucguggaccuguucgucuucagcaccuccuucuaccugaucagcaucuuccugcaccucaucaagaucccgacccaccgccacaucacgggcaagcccugccccaagccccaccggcugaaccacauggggaucugcuccugcggccuguacaagcacccgggggugcccgugaaguggaagcgcugaggacuagucccuguucccagagcccacuuuuuuuucuuuuuuugaaauaaaauagccugucuuucagaucuaaaaaaaaaaaaaaaaaaaaaaaaaaaaaaaaaaaaaaaaaaaaaaaaaaaaaaaaaaaaaaaaaaaaaaaaaaaaaaaaaaaaaaaaaaaaaaaaaaaa

SEQ ID NO: 28472 - RNA, 1721 nt, Artificial Sequence
  mRNA product Design a-1 (A100) comprising derived and/or modified sequence from LASV(LASV253-NIG-2011;Clade II)__AIT17670__GPCmut5 (opt1)
aggagagucccgcagucggcguccagcggcucugcuuguucgugugugugucguugcaggccuuauucaagcuuaccaugggccagaucaucaccuucuuccaggaggugccccacgucaucgaggaggugaugaacaucgugcugaucgcccucagccugcuggccauccucaaggggaucuacaacgucgcgaccugcggccuguucgggcugguguccuuccuccugcugugcggccgcagcugcuccacgaccuacaaggggguguacgagcuccagacccuggagcuggacauggccagccucaacaugaccaugccgcuguccugcacgaagaacaacagccaccacuacaucauggucggcaacgagaccggccuggagcucacccugaccaacacguccaucaucaaccacaaguucugcaaccugagcgacgcccacaagaagaaccucuacgaccacgcccugauguccaucaucagcaccuuccaccuguccauccccaacuucaaccaguacgaggccaugagcugcgacuucaacgggggcaagaucuccgugcaguacaaccucagccacaccuacgcgguggacgccgccaaccacugcgggaccaucgccaacggcguccugcagacguucaugcggauggcguggggcggguccuacaucgcccuggacagcggcugcggguccugggacugcaucaugaccagcuaccaguaccucaucauccagaacaccaccugggaggaccacugccaguucucccgccccagccccaucggcuaccuggggcugcucagccagcggacgcgcgacaucuacaucucccggcgccugcugggcaccuucaccuggacccucagcgacuccgagggcaacgagacgcccgggggcuacugccugacccgguggaugcugaucgaggccgagcucaagugcuucgggaacaccgccguggccaagugcaacgagaagcacgacgaggaguucugcgacaugcugcgccuguucgacuucaacaagcaggcgauccggcgccucaaggcccccgcccagaugagcauccagcugaucaacaaggccgugaacgcccugaucaacgaccagcucaucaugaagaaccaccuccgggacaucaugugcaucccguacugcaacuacuccaaguacugguaccugaaccacaccgucacggggcgcaccagccugccccggugcuggcugguguccaacggcagcuaccugaacgagacccacuucuccgacgacaucgagcagcaggcggacaacaugaucaccgagcuccugcagaaggaguacaucgaccgccagggcaagacgccccuggggcucguggaccuguucgucuucagcaccuccuucuaccugaucagcaucuuccugcaccucgugaagaucccgacccaccggcacaucaucggcaagcccugccccaagccccaccgccugaaccacauggggaucugcuccugcggccuguacaagcacccgggggugcccgucaaguggaagcggugaggacuagucccuguucccagagcccacuuuuuuuucuuuuuuugaaauaaaauagccugucuuucagaucuaaaaaaaaaaaaaaaaaaaaaaaaaaaaaaaaaaaaaaaaaaaaaaaaaaaaaaaaaaaaaaaaaaaaaaaaaaaaaaaaaaaaaaaaaaaaaaaaaaaa

SEQ ID NO: 28473 - RNA, 1721 nt, Artificial Sequence
  mRNA product Design a-1 (A100) comprising derived and/or modified sequence from LASV(LASV254-NIG-2011;Clade II)__AIT17674__GPCmut5 (opt1)
aggagagucccgcagucggcguccagcggcucugcuuguucgugugugugucguugcaggccuuauucaagcuuaccaugggccagaucaucaccuucuuccaggaggugccccacgucaucgaggaggugaugaacaucgugcugaucgcccucagccugcuggccauccucaaggggaucuacaacgucgcgaccugcggccuguucgggcugguguccuuccuccugcugugcggccgcagcugcuccacgaccuacaaggggguguacgagcuccagacccuggagcuggacaugaccaaccucaacaugacgaugccgcugagcugcaccaagaacaacucccaccacuacaucauggucggcaacgagaccggccuggagcucacccugacgaacaccagcaucaucaaccacaaguucugcaaccuguccgacgcccacaagaagaaccucuacaaccacgcccugaugagcaucaucuccaccuuccaccugagcauccccaacuucaaccaguacgaggccauguccugcgacuucaacgggggcaagaucagcgugcaguacaaccucucccacagcuacgccguggacgcggccaaccacugcgggaccaucgccaacggcguccugcagacguucaugcggauggccuggggcggguccuacaucgcgcuggacagcggcugcgggaacugggacugcaucaugaccuccuaccaguaccucaucauccagaacaccaccugggaggaccacugccaguucagccgccccucccccaucggcuaccuggggcugcucagccagcggacgcgcgacaucuacaucagccggcgccugcugggcaccuucaccuggacccucuccgacagcgagggcaacgagacgcccgggggcuacugccugacccgguggaugcugaucgaggccgagcucaagugcuucgggaacaccgccguggccaagugcaacgagaagcacgacgaggaguucugcgacaugcugcgccuguucgacuucaacaagcaggccauccggcgccucaagacccccgcgcaggccaacauccagcugaucaacaaggccgugaacgcccugaucaacgaccagcucaucaugaagaaccaccuccgggacaucaugugcauccccuacugcaacuacuccaaguacugguaccugaaccacacggucaccgggaagaccagccugccccgcugcuggcugguguccaacggcagcuaccugaacgagacccacuucuccgacgacaucgagcagcaggccgacaacaugaucacggagcuccugcagaaggaguacauggaccggcagggcaagaccccgcuggggcucguggaccuguucgucuucagcaccuccuucuaccugaucagcaucuuccugcaccucgugaagaucccgacccaccgccacgugaucggcaagcccugccccaagccccaccggcugaaccacauggggaucugcuccugcggccuguacaagcacccggggguccccgugaaguggaagcgcugaggacuagucccuguucccagagcccacuuuuuuuucuuuuuuugaaauaaaauagccugucuuucagaucuaaaaaaaaaaaaaaaaaaaaaaaaaaaaaaaaaaaaaaaaaaaaaaaaaaaaaaaaaaaaaaaaaaaaaaaaaaaaaaaaaaaaaaaaaaaaaaaaaaaa

SEQ ID NO: 28474 - RNA, 1721 nt, Artificial Sequence
  mRNA product Design a-1 (A100) comprising derived and/or modified sequence from LASV(Nig08-A19;Clade III)__ADU56618__GPCmut5 (opt1)
aggagagucccgcagucggcguccagcggcucugcuuguucgugugugugucguugcaggccuuauucaagcuuaccaugggccagaucgugaccuucuuccaggaggucccccacgugaucgaggaggugaugaacaucguccugaucgcccucagcauccuggccauccugaaggggcucuacaacaucgcgaccugcggccugaucgggcuggugacguuccuccugcuguccggccgcagcugcuccaugaccuacaaggggguguacgagcuccagacccuggagcugaacaugaacacccucaacaugacgaugccgcugagcugcaccaagaacaacucccaccacuacaucauggucggcaacgagaccggccuggagcucacccugacgaacaccagccugcuccaccacaaguucugcaaccuguccgacgcccacaagaagaaccuguacgaccacacccucaugagcaucaucuccaccuuccaccugagcauccccaacuucaaccaguacgaggccauguccugcgacuucaacgggggcaagaucacggugcaguacaaccugagccacuccuacgccaucgacgccgcgaaccacugcgggaccguggccaacggcguccuccagaccuucaugcggauggccuggggcgggagcuacaucgcccuggacuccggcugcgggaagugggacugcaucaugaccagcuaccaguaccugaucauccagaacacgaccugggaggaccacugccaguucucccggcccagccccaucggcuaccucgggcugcugucccagcgcacccgggacaucuacaucagccgccggcuccugggcaccuucacguggacccugagcgacuccgagggcaacgagacccccgggggcuacugccucacccgcuggaugcugaucgaggcggagcugaagugcuucgggaacacggccguggccaagugcaacgagaagcacgacgaggaguucugcgacaugcuccggcuguucgacuucaacaagcaggccauccgccggcugaaggcccccgcgcagaugagcauccagcucaucaacaaggccgugaacgcccugaucaacgaccagcugaucaugaagaaccaccuccgcgacaucaugugcauccccuacugcaacuacuccaaguacugguaccugaaccacaccagcaccgggcggaccucccugccccgcugcuggcucgucagcaacggcuccuaccugaacgagacgcacuucagcgacgacaucgagcagcaggccgacaacaugaucaccgagaugcugcagaaggaguaccucgaccggcagggcaagaccccgcuggggcugguggaccuguucguguucuccaccagcuucuaccucaucuccaucuuccugcaccuggucaagaucccgacgcaccgccacaucgugggcaagcccugccccaagccccaccggcucaaccacauggggaucugcagcugcggccuguacaagcagccgggggugcccguccgcuggaagcggugaggacuagucccuguucccagagcccacuuuuuuuucuuuuuuugaaauaaaauagccugucuuucagaucuaaaaaaaaaaaaaaaaaaaaaaaaaaaaaaaaaaaaaaaaaaaaaaaaaaaaaaaaaaaaaaaaaaaaaaaaaaaaaaaaaaaaaaaaaaaaaaaaaaaa

SEQ ID NO: 28475 - RNA, 1724 nt, Artificial Sequence
  mRNA product Design a-1 (A100) comprising derived and/or modified sequence from LASV(G1180-SLE-2010;Clade IV)__AIT17168__GPCmut5 (opt1)
aggagagucccgcagucggcguccagcggcucugcuuguucgugugugugucguugcaggccuuauucaagcuuaccaugggccagaucgugaccuucuuccaggaggucccccacgugaucgaggaggugaugaacaucguccugaucgcccucagcauccuggccgugcugaaggggcucuacaacuucgcgaccugcggccugguggggcugcucaccuuccugcugcucugcggccgcuccugcaccgccagccgguacaagggggucuacgagcugcagacccuggagcucaacauggagacccugaacaugacgaugccgcuguccugcaccaagaacaacagccaccacuacaucauggugggcaacgagaccggccucgagcugacccugacgaacaccuccaucaucaaccacaaguucugcaaccucagcgacgcccacaagaagaaccuguacgaccacgcccugauguccaucaucagcaccuuccaccucuccauccccaacuucaaccaguacgaggccaugagcugcgacuucaacgggggcaagaucuccgugcaguacaaccugagccacuccuacgcgggggacgccgccaaccacugcggcaccgucgccaacggggugcugcagacguucaugcgcauggcguggggcggcagcuacaucgcccucgacuccgggugcggcagcugggacugcaucaugaccuccuaccaguaccugaucauccagaacaccaccugggaggaccacugccaguucagccggcccucccccaucggguaccugggccuccugagccagcgcacgcgggacaucuacaucagccgccggcugcucggcaccuucaccuggacccuguccgacagcgaggggaaggacacgccgggcggguacugccugacccgcuggaugcucaucgaggccgagcugaagugcuucggcaacaccgccguggccaagugcaacgagaagcacgacgaggaguucugcgacaugcugcggcuguucgacuucaacaagcaggcgauccagcgccugaaggcccccgcccagauguccauccagcugaucaacaaggccgucaacgcccucaucaacgaccagcugaucaugaagaaccaccuccgggacaucaugugcauccccuacugcaacuacagcaaguacugguaccucaaccacaccacgaccggcaagaccucccugcccaagugcuggcuggugagcaacggcuccuaccucaacgagacccacuucagcgacgacaucgagcagcaggcggacaacaugaucacggagaugcugcagaaggaguacauggagcgccaggggaagacgccccugggccucguggaccuguucgucuucuccaccagcuucuaccugaucuccaucuuccugcaccucgugaagaucccgacccaccggcacaucgugggcaagagcugccccaagccccaccgccugaaccacauggggaucugcuccugcgggcuguacaagcagcccggcgucccggugaaguggaagcggugaggacuagucccuguucccagagcccacuuuuuuuucuuuuuuugaaauaaaauagccugucuuucagaucuaaaaaaaaaaaaaaaaaaaaaaaaaaaaaaaaaaaaaaaaaaaaaaaaaaaaaaaaaaaaaaaaaaaaaaaaaaaaaaaaaaaaaaaaaaaaaaaaaaaa

SEQ ID NO: 28476 - RNA, 1724 nt, Artificial Sequence
  mRNA product Design a-1 (A100) comprising derived and/or modified sequence from LASV(G1442-SLE-2011;Clade IV)__AIT17180__GPCmut5 (opt1)
aggagagucccgcagucggcguccagcggcucugcuuguucgugugugugucguugcaggccuuauucaagcuuaccaugggccagaucgugaccuucuuccaggaggucccccacgugaucgaggaggugaugaacaucguccugaucgcccucagcauccuggccgugcugaaggggcucuacaacguggcgaccugcggccugaucgggcuggucacguuccuccugcugugcggccgcuccugcaccaccacccucuacaaggggguguacgagcugcagacgcuggagcucaacauggagacccugaacaugaccaugccgcugagcugcaccaagaacaacucccaccacuacauccgggugggcaacgagacgggccucgagcugacccugaccaacaccagcaucaucaaccacaaguucugcaaccucuccgacgcccacaagaagaaccuguacgaccacgcccugaugagcaucaucuccacguuccaccucagcauccccaacuucaaccaguacgaggccauguccugcgacuucaacgggggcaagaucagcguccaguacaaccugucccacagcuacgccggggacgcggccaaccacugcggcaccguggccaacggggugcugcagaccuucaugcgcauggccuggggcggcuccuacaucgcgcucgacagcgggugcggcaacugggacugcaucaugaccuccuaccaguaccugaucauccagaacacgaccugggacgaccacugccaguucagccgccccucccccaucggguaccugggccuccugagccagcggacccgcgacgucuacaucucccggcgccugcucggcaccuucacguggacccugagcgacagcgaggggaaggacaccccgggcggguacugccugacccgguggaugcucaucgaggccgagcugaagugcuucggcaacacggccguggccaagugcaacgagaagcacgacgaggaguucugcgacaugcugcgccucuucgacuucaacaagcaggccauccagcggcugaaggcgcccgcccagauguccauccagcugaucaacaaggccgugaacgcccucaucaacgaccagcugaucaugaagaaccaccuccgcgacaucaugugcauccccuacugcaacuacagcaaguacugguaccugaacaacaccgccaccggcaagaccucccugcccaagugcuggcugaucagcaacggcuccuaccucaacgagacgcacuucagcgacgacaucgagcaggaggcggacaacaugaucaccgagaugcugcagaaggaguacauggagcggcaggggaagacgccccugggccucgucgaccuguucguguucuccaccagcuucuaccugaucuccaucuuccugcaccucgugaagaucccgacccaccgccacaucgucggcaagagcugccccaagccccaccggcugaaccacauggggaucugcuccugcgggcuguacaagcagcccggcgugccggugcgcuggaagcggugaggacuagucccuguucccagagcccacuuuuuuuucuuuuuuugaaauaaaauagccugucuuucagaucuaaaaaaaaaaaaaaaaaaaaaaaaaaaaaaaaaaaaaaaaaaaaaaaaaaaaaaaaaaaaaaaaaaaaaaaaaaaaaaaaaaaaaaaaaaaaaaaaaaaa

SEQ ID NO: 28477 - RNA, 1724 nt, Artificial Sequence
  mRNA product Design a-1 (A100) comprising derived and/or modified sequence from LASV(G3010-SLE-2013;Clade IV)__AIT17344__GPCmut5 (opt1)
aggagagucccgcagucggcguccagcggcucugcuuguucgugugugugucguugcaggccuuauucaagcuuaccaugggccagaucgugaccuucuuccaggaggucccccacgugaucgaggaggugaugaacaucguccugaucgcccucagcauccuggccgugcugaaggggcucuacaacuucgcgaccugcggccugguggggcuggucacguuccuccugcugugcggccgcuccugcaccaccagccucuacaaggggguguacgagcugcagacccuggagcucaacauggagacgcugaacaugaccaugccgcuguccugcaccaagaacaacagccaccacuacaucauggugggcaacgagaccggccucgagcugacgcugaccaacaccuccaucaucaaccacaaguucugcaaccucagcgacgcccacaagaagaaccuguacaaccacgcccugauguccaucaucagcaccuuccaccucuccauccccaacuucaaccaguacgaggccaugagcugcgacuucaacgggggcaagaucuccguccaguacaaccugagccacuccuacgccggggacgcggccagccacugcggcacgguggccaacggggugcugcagaccuucaugcggauggccuggggcggcuccuacaucgcgcucgacagcgggugcggcaagugggacugcaucaugaccuccuaccaguaccugaucauccagaacaccacgugggaggaccacugccaguucagccgccccucccccaucggguaccugggccuccugagccagcggacccgcgacaucuacaucagccggcgccugcucggcaccuucaccuggacgcuguccgacagcgaggggaaggacaccccgggcggguacugccugacccgguggaugcucaucgaggccgagcugaagugcuucggcaacaccgccgucgccaagugcaacgagaagcacgacgaggaguucugcgacaugcugcgccucuucgacuucaacaagcaggccauccagcggcugaagacgcccgcgcagauguccauccagcugaucaacaaggccgugaacgcccucaucaacgaccagcugaucaugaagaaccaccuccgcgacaucaugugcauccccuacugcaacuacagcaaguacugguaccugaaccacaccaccaccggcaagacgucccugcccaagugcuggcuggugagcaacggcuccuaccucaacgagacccacuucagcgacgacaucgagcagcaggccgacaacaugaucaccgagaugcugcagaaggaguacauggagcggcaggggaagacgccccugggccucgucgaccuguucguguucuccaccagcuucuaccugaucuccaucuuccugcaccucgugaagaucccgacccaccgccacaucgucggcaagagcugccccaagccccaccggcugaaccacauggggaucugcuccugcgggcuguacaagcagcccggcgugccggugcgcuggaagcggugaggacuagucccuguucccagagcccacuuuuuuuucuuuuuuugaaauaaaauagccugucuuucagaucuaaaaaaaaaaaaaaaaaaaaaaaaaaaaaaaaaaaaaaaaaaaaaaaaaaaaaaaaaaaaaaaaaaaaaaaaaaaaaaaaaaaaaaaaaaaaaaaaaaaa

SEQ ID NO: 28478 - RNA, 1724 nt, Artificial Sequence
  mRNA product Design a-1 (A100) comprising derived and/or modified sequence from LASV(G502-SLE-2009;Clade IV)__AIT17126__GPCmut5 (opt1)
aggagagucccgcagucggcguccagcggcucugcuuguucgugugugugucguugcaggccuuauucaagcuuaccaugggccagaucgugaccuucuuccaggaggucccccacgugaucgaggaggugaugaacaucguccugaucgcccucagcauccuggccgugcugaaggggcucuacaacuucgcgaccugcggccugguggggcugcucacguuccugcugcucugcggccgcuccugcaccaccgggcuguacaagggcgucuacgagcugcagacccucgagcugaacauggagacgcugaacaugaccaugccgcucagcugcaccaagaacaacucccaccacuacaucauggugggcaacgagaccgggcuggagcugacgcucaccaacaccagcaucaucaaccacaaguucugcaaccuguccgacgcccacaagaagaaccuguacgaccacgcccucaugagcaucaucuccaccuuccaccugagcauccccaacuucaaccaguacgaggccauguccugcgacuucaacggcgggaagaucagcgugcaguacaaccugucccacagcuacgccggcgacgcggccgaccacugcgggacggucgccaacggcgugcuccagaccuucaugcggauggccuggggcggguccuacaucgcgcuggacagcggcugcgggcggugggacugcaucaugaccuccuaccaguaccugaucauccagaacaccacgugggaggaccacugccaguucagccgccccucccccaucggcuaccucggccugcugagccagcggacccgcgacaucuacaucucccggcgccuccuggggaccuucaccuggacgcugagcgacagcgagggcaaggacacccccgggggcuacugccucacccgguggaugcugaucgaggccgagcugaagugcuucgggaacaccgccguggccaagugcaacgagaagcacgacgaggaguucugcgacaugcuccgccuguucgacuucaacaagcaggccauccagcggcugaaggcgcccgcccagauguccauccagcucaucaacaaggccgucaacgcccugaucaacgaccagcuggugaugaagaaccaccuccgcgacaucaugugcauccccuacugcaacuacagccgguacugguaccugaaccacacgaccaccggccgcaccucccugcccaagugcuggcucgugagcaacggguccuaccugaacgagacgcacuucagcgacgacaucgagcagcaggccgacaacaugaucaccgagaugcugcagaaggaguacauggagcggcagggcaagaccccgcucgggcuggucgaccuguucguguucuccaccagcuucuaccugaucuccaucuuccuccaccuggugaagaucccgacgcaccgccacaucgucggcaagagcugccccaagccccaccggcugaaccacauggggaucugcuccugcggccucuacaagcagcccggcgugccggugaaguggaagcgcugaggacuagucccuguucccagagcccacuuuuuuuucuuuuuuugaaauaaaauagccugucuuucagaucuaaaaaaaaaaaaaaaaaaaaaaaaaaaaaaaaaaaaaaaaaaaaaaaaaaaaaaaaaaaaaaaaaaaaaaaaaaaaaaaaaaaaaaaaaaaaaaaaaaaa

SEQ ID NO: 28479 - RNA, 1724 nt, Artificial Sequence
  mRNA product Design a-1 (A100) comprising derived and/or modified sequence from LASV(G733-SLE-2010;Clade IV)__AIT17154__GPCmut5 (opt1)
aggagagucccgcagucggcguccagcggcucugcuuguucgugugugugucguugcaggccuuauucaagcuuaccaugggccagaucgugaccuucuuccaggaggucccccacgugaucgaggaggugaugaacaucguccugaucgcccucagcauccuggccgugcugaaggggcucuacaacuucgcgaccugcggcaucguggggcuggucuccuuccugcuccugugcggccgcagcugcacgaccucccuguacaaggggguguacgagcuccagacccuggagcugaacauggagacccucaacaugacgaugccgcugagcugcaccaagaacaacucccaccacuacaucauggugggcaacgagaccggccuggagcucacccugacgaacaccagcaucaucaaccacaaguucugcaaccuguccgacgcccacaagaagaaccucuacgaccacgcccugaugagcaucaucuccaccuuccaccugagcauccccaacuucaaccaguacgaggccauguccugcgacuucaacgggggcaagaucagcguccaguacaaccucucccacagcuacgccggggacgcggccaaccacugcggcaccaucgccaacggggugcugcagacguucaugcggauggccuggggcggcuccuacaucgcgcuggacagcgggugcgaccggugggacugcaucaugaccuccuaccaguaccucaucauccagaacaccaccugggaggaccacugccaguucagccgccccucccccaucggcuaccuggggcugcucagccagcggacgcgcgacaucuacaucagccggcgccugcugggcaccuucaccuggacccucuccgacagcgagggcaaggacacgcccgggggcuacugccugacccgguggaugcugaucgaggccgagcucaagugcuucgggaacaccgccguggccaagugcaacgagaagcacgacgaggaguucugcgacaugcugcgccuguucgacuucaacaagcaggccauccagcggcucaaggcgcccgcccagauguccauccagcugaucaacaaggccgucaacgcccugaucaacgaccagcucaucaugaagaaccaccuccgcgacaucaugugcauccccuacugcaacuacagcaaguacugguaccugaaccacaccacgaccgggaagaccucccugcccaagugcuggcuggugagcaacggcuccuaccugaacgagacccacuucagcgacgacaucgagcagcaggccgacaacaugaucacggagaugcuccagaaggaguacauggagcggcagggcaagaccccgcuggggcugguggaccucuucgucuucuccaccagcuucuaccugaucuccaucuuccugcaccuggugaagaucccgacccaccgccacguggucggcaagagcugccccaagccccaccggcucaaccacauggggaucugcuccugcggccuguacgggcagcccggcgugccggugaaguggaagcgcugaggacuagucccuguucccagagcccacuuuuuuuucuuuuuuugaaauaaaauagccugucuuucagaucuaaaaaaaaaaaaaaaaaaaaaaaaaaaaaaaaaaaaaaaaaaaaaaaaaaaaaaaaaaaaaaaaaaaaaaaaaaaaaaaaaaaaaaaaaaaaaaaaaaaa

SEQ ID NO: 28480 - RNA, 1724 nt, Artificial Sequence
  mRNA product Design a-1 (A100) comprising derived and/or modified sequence from MOPV/LASV reassortant(IGS-1;Clade IV)__AFY05576__GPCmut5 (opt1)
aggagagucccgcagucggcguccagcggcucugcuuguucgugugugugucguugcaggccuuauucaagcuuaccaugggccagaucgugaccuucuuccaggaggucccccacgugaucgaggaggugaugaacaucguccugaucgcccucagcgugcuggccgugcugaaggggcucuacaacuucgcgaccugcggccuggucgggcuggugacguuccuccugcugugcggccgcuccugcaccaccagccucuacaaggggguguacgagcugcagacccuggagcucaacauggagacgcugaacaugaccaugccgcuguccugcaccaagaacaacagccaccacuacaucauggucggcaacgagaccggccucgagcugacgcugaccaacaccuccaucaucaaccacaaguucugcaaccucagcgacgcccacaagaagaaccuguacgaccacgcccugauguccaucaucagcaccuuccaccucuccauccccaacuucaaccaguacgaggccaugagcugcgacuucaacgggggcaagaucuccgugcaguacaaccugagccacuccuacgccggggacgcggccaaccacugcggcacgguggccaacgggguccugcagaccuucaugcggauggccuggggcggcagcuacaucgcgcucgacuccgggugcggcaacugggacugcaucaugaccagcuaccaguaccugaucauccagaacaccacgugggaggaccacugccaguucucccggcccagccccaucggguaccugggccuccugucccagcgcacccgggacaucuacaucagccgccggcugcucggcaccuucaccuggacgcugagcgacuccgagggggaggacaccccgggcggguacugccugacccgcuggaugcucaucgaggccgagcugaagugcuucggcaacaccgccguggccaagugcaacgagaagcacgacgaggaguucugcgacaugcugcggcuguucgacuucaacaagcaggccauccagcgccugaaggcgcccgcccagaugagcauccagcugaucaacaaggccgugaacgcccucaucaacgaccagcugaucaugaagaaccaccuccgggacaucaugugcauccccuacugcaacuacuccaaguacugguaccucaaccacacgaccaccggccgcaccagccugcccaagugcuggcuggucuccaacggcagcuaccucaacgagacgcacuucuccgacgacaucgagcagcaggccgacaacaugaucaccgagaugcugcagaaggaguacauggagcggcaggggaagacgccccugggccucguggaccuguucguguucagcaccuccuucuaccugaucagcaucuuccugcaccucgucaagaucccgacccaccgccacaucguggggaaguccugccccaagccccaccggcugaaccacaugggcaucugcagcugcgggcuguacaagcagcccggcgugccggucaaguggaagcgcugaggacuagucccuguucccagagcccacuuuuuuuucuuuuuuugaaauaaaauagccugucuuucagaucuaaaaaaaaaaaaaaaaaaaaaaaaaaaaaaaaaaaaaaaaaaaaaaaaaaaaaaaaaaaaaaaaaaaaaaaaaaaaaaaaaaaaaaaaaaaaaaaaaaaa

SEQ ID NO: 28481 - RNA, 1724 nt, Artificial Sequence
  mRNA product Design a-1 (A100) comprising derived and/or modified sequence from LASV(LM765-SLE-2012;Clade IV)__AIT17814__GPCmut5 (opt1)
aggagagucccgcagucggcguccagcggcucugcuuguucgugugugugucguugcaggccuuauucaagcuuaccaugggccagaucgugaccuucuuccaggaggucccccacgugaucgaggaggugaugaacaucguccugaucgcccucagcauccuggccgugcugaaggggcucuacaacuucgcgaccugcggccugguggggcuggucacguuccuccugcugugcggccgcuccugcaccaccagccucuacaaggggguguacgagcugcagacccuggagcucaacauggagacgcugaacaugaccaugccgcuguccugcaccaagaacaacagccaccacuacaucauggugggcaacgagaccggccucgagcugacgcugaccaacaccuccaucaucgaccacaaguucugcaaccucagcgacgcccaccggaagaaccuguacgaccacgcccugauguccaucaucagcaccuuccaccucuccauccccaacuucaaccaguacgaggccaugagcugcgacuucaacgggggcaagaucuccguccaguacaaccugagccacuccuacgccaaggacgcggccgaccacugcgggacgguggccaacggcgugcugcagaccuucaugcgcauggccuggggcgggagcuacaucgcgcucgacuccggcugcgggcgcugggacugcaucaugaccagcuaccaguaccugaucauccagaacaccacgugggaggaccacugccaguucucccggcccagccccaucggcuaccuggggcuccugucccagcgcacccgggacaucuacaucagccgccggcugcucggcaccuucaccuggacgcugagcgacuccgagggcaaggacacccccgggggcuacugccugacccgcuggaugcucaucgaggccgagcugaagugcuucgggaacaccgccgucgccaagugcaacgagaagcacgacgaggaguucugcgacaugcugcggcuguucgacuucaacaagcaggccauccagcgccugaaggcgcccgcccagaugagcauccagcugaucaacaaggccgugaacgcccucaucaacgaccagcugaucaugaagaaccaccuccgggacaucaugugcauccccuacugcaacuacuccaaguacugguaccucaaccacacgaccaccgggaagaccagccugcccaagugcuggcugguguccaacggcagcuaccucaacgagacgcacuucuccgacgacaucgagcagcaggccgacaacaugaucaccgagaugcugcagaaggaguacauggagcgccagggcaagaccccgcuggggcucgucgaccuguucguguucagcaccuccuucuaccugaucagcaucuuccugcaccucgugaagaucccgacgcaccggcacaucgucggcaagcccugccccaagccccaccgccugaaccacauggggaucugcuccugcggccuguacaagcagccgggggugcccgugaaguggaagcggugaggacuagucccuguucccagagcccacuuuuuuuucuuuuuuugaaauaaaauagccugucuuucagaucuaaaaaaaaaaaaaaaaaaaaaaaaaaaaaaaaaaaaaaaaaaaaaaaaaaaaaaaaaaaaaaaaaaaaaaaaaaaaaaaaaaaaaaaaaaaaaaaaaaaa

SEQ ID NO: 28482 - RNA, 1724 nt, Artificial Sequence
  mRNA product Design a-1 (A100) comprising derived and/or modified sequence from LASV(LM776-SLE-2012;Clade IV)__AIT17824__GPCmut5 (opt1)
aggagagucccgcagucggcguccagcggcucugcuuguucgugugugugucguugcaggccuuauucaagcuuaccaugggccagaucgugaccuucuuccaggaggucccccacgugaucgaggaggugaugaacaucguccugaucgcccucagcauccuggccgugcugaaggggcucuacaacuucgcgaccugcggccugguggggcuggucacguuccuccugcugugcggccgcuccugcaccaccagcguguacaaggggguguacgagcuccagacccuggagcugaacauggagacgcucaacaugaccaugccgcuguccugcaccaagaacaacagccaccacuacaucauggucggcaacgagaccggccuggagcucacgcugaccaacaccuccaucaucaaccacaaguucugcaaccugagcgacgcccacaagaagaaccucuacgaccacgcccugauguccaucaucagcaccuuccaccuguccauccccaacuucaaccaguacgaggccaugagcugcgacuucaacgggggcaagaucuccgugcaguacaaccucagccacuccuacgccggggacgcggccaaccacugcggcacgguggccaacgggguccugcagaccuucaugcggauggccuggggcggcagcuacaucgcgcuggacuccgggugcggcaagugggacugcaucaugaccagcuaccaguaccucaucauccagaacaccacgugggaggaccacugccaguucucccgccccagccccaucggguaccugggccugcucucccagcggacccgcgacaucuacaucagccggcgccugcugggcaccuucaccuggacgcucagcgacuccgaggggaaggacaccccgggcggguacugccugacccgguggaugcugaucgaggccgagcucaagugcuucggcaacaccgccguggccaagugcaacgagaagcacgacgaggaguucugcgacaugcugcgccuguucgacuucaacaagcaggccauccagcggcucaaggcgcccgcccagaugagcauccagcugaucaacaaggccgugaacgcccugaucaacgaccagcucaucaugaagaaccaccuccgcgacaucaugugcauccccuacugcaacuacuccaaguacugguaccugaaccacacgaccaccggcaagaccagccugcccaagugcuggcuggucuccaacggcagcuaccugaacgagacgcacuucuccgacgacaucgagcagcaggccgacaacaugaucaccgagaugcuccagaaggaguacauggagcggcaggggaagacgccccugggccugguggaccucuucguguucagcaccuccuucuaccugaucagcaucuuccugcaccuggucaagaucccgacccaccgccacaucguggggaaguccugccccaagccccaccggcucaaccacaugggcaucugcagcugcgggcuguacaagcagcccggcgugccgguccgcuggaagcggugaggacuagucccuguucccagagcccacuuuuuuuucuuuuuuugaaauaaaauagccugucuuucagaucuaaaaaaaaaaaaaaaaaaaaaaaaaaaaaaaaaaaaaaaaaaaaaaaaaaaaaaaaaaaaaaaaaaaaaaaaaaaaaaaaaaaaaaaaaaaaaaaaaaaa

SEQ ID NO: 28483 - RNA, 1724 nt, Artificial Sequence
  mRNA product Design a-1 (A100) comprising derived and/or modified sequence from LASV(Mad39;Clade IV)__ANH09722__GPCmut5 (opt1)
aggagagucccgcagucggcguccagcggcucugcuuguucgugugugugucguugcaggccuuauucaagcuuaccaugggccagaucgugaccuucuuccaggaggucccccacgugaucgaggaggugaugaacaucguccugaucgcccucagcauccuggccgugcugaaggggcucuacaacguggcgaccugcggccugaucgggcuggucacguuccuccugcugugcggccgcuccugcaccaccacccucuacaaggggguguacgagcugcaggcccuggagcucaacauggagacgcugaacaugaccaugccgcugagcugcaccaagaacaacucccaccacuacauccgggugggcaacgagaccggccucgagcugacgcugaccaacaccagccucaucaaccacaaguucugcaaccuguccgacgcccacaagaagaaccuguacgaccacgcccucaugagcaucaucuccaccuuccaccugagcauccccaacuucaaccaguacgaggccauguccugcgacuucaacgacgggaagaucagcguccaguacaaccugucccacacguacgcgggcgacaccgccaaccacugcgggaccguggccaacggcgugcuccagaccuucaugcgcauggccuggggcgggagcuacaucgcgcuggacuccggcugcgggggcugggacugcaucaugacgagcuaccaguaccugaucauccagaacaccaccugggaggaccacugccaguucucccggcccagccccaucggguaccucggccugcugucccagcggacccgcgacaucuacaucagccggcgccuccugggcacguucaccuggacccuguccgacagcgaggggaaggacaccccgggcggguacugccucacgcgguggaugcugaucgaggccgagcugaagugcuucggcaacaccgccgucgccaagugcaacgagaagcacgacgaggaguucugcgacaugcuccgccuguucgacuucaacaagcaggccauccagcggcugaaggcgcccgcccagaugagcauccagcucaucaacaaggccgugaacgcccugaucaacgaccagcugaucaugaagaaccaccuccgcgacaucaugugcauccccuacugcaacuacuccaaguacugguaccugaaccacaccgugaccggcaagacgagccugcccaagugcuggcucgucuccaacggcagcuaccugaacgagacccacuucuccgacgacaucgagcagcaggccgacaacaugaucaccgagaugcugcagaaggaguacauggagcggcaggggaagacgccccucggccugguggaccuguucguguucagcaccuccuucuaccugaucagcaucuuccuccaccuggucaagaucccgacccaccgccacgugguggggaagcccugccccaagccccaccggcugaaccacaugggcaucugcuccugcggguucuacaagcagccgggcguccccgugcgcuggaagcggugaggacuagucccuguucccagagcccacuuuuuuuucuuuuuuugaaauaaaauagccugucuuucagaucuaaaaaaaaaaaaaaaaaaaaaaaaaaaaaaaaaaaaaaaaaaaaaaaaaaaaaaaaaaaaaaaaaaaaaaaaaaaaaaaaaaaaaaaaaaaaaaaaaaaa

SEQ ID NO: 28484 - RNA, 1724 nt, Artificial Sequence
  mRNA product Design a-1 (A100) comprising derived and/or modified sequence from LASV(Z0947-SLE-2011;Clade IV)__AIT17840__GPCmut5 (opt1)
aggagagucccgcagucggcguccagcggcucugcuuguucgugugugugucguugcaggccuuauucaagcuuaccaugggccagaucgugaccuucuuccaggaggucccccacgugaucgaggaggugaugaacaucguccugaucgcccucagcauccuggccgugcugaaggggcucuacaacuucgcgaccugcggccugguggggcuggucacguuccuccugcugugcggccgcuccugcaccaucagccucuacaaggggguguacgagcugcagacccuggagcucaacauggagacccugaacaugacgaugccgcuguccugcaccaagaacaacagccaccacuacaucauggugggcaacgagaccggccucgagcugacccugacgaacaccuccaucaucaaccacaaguucugcaaccucagcgacgcccacaagaagaaccuguacgaccacgcccugauguccaucaucagcaccuuccaccucuccauccccaacuucaaccaguacgaggccaugagcugcgacuucaacgggggcaagaucuccguccaguacaaccugagccacuccuacgccggggacgcggccaaccacugcggcaccguggccaacggggugcugcagacguucaugcggauggccuggggcggcagcuacaucgcgcucgacuccgggugcgaccggugggacugcaucaugaccagcuaccaguaccugaucauccagaacaccaccugggaggaccacugccaguucucccgccccagccccaucggcuaccuggggcuccugucccagcggacgcgcgacaucuacaucagccggcgccugcucggcaccuucaccuggacccugagcgacuccgagggcaaggacacgcccgggggcuacugccugacccgguggaugcucaucgaggccgagcugaagugcuucgggaacaccgccgucgccaagugcaacgagaagcacgacgaggaguucugcgacaugcugcgccucuucgacuucaacaagcaggccauccagcggcugaaggcgcccgcccagaugagcauccagcugaucaacaaggccgugaacgcccucaucaacgaccagcugaucaugaagaaccaccuccgcgacaucaugugcauccccuacugcaacuacuccaaguacugguaccugaaccacaccacgaccgggaagaccagccugcccaagugcuggcugguguccaacggcagcuaccucaacgagacccacuucuccgacgacaucgagcagcaggccgacaacaugaucacggagaugcugcagaaggaguacauggagcggcagggcaagaccccgcuggggcucgucgaccuguucguguucagcaccuccuucuaccugaucagcaucuuccugcaccucgugaagaucccgacccaccgccacaucgucggcaagcccugccccaagccccaccggcugaaccacauggggaucugcuccugcggccuguacaagcagccgggggugcccgugaaguggaagcgcugaggacuagucccuguucccagagcccacuuuuuuuucuuuuuuugaaauaaaauagccugucuuucagaucuaaaaaaaaaaaaaaaaaaaaaaaaaaaaaaaaaaaaaaaaaaaaaaaaaaaaaaaaaaaaaaaaaaaaaaaaaaaaaaaaaaaaaaaaaaaaaaaaaaaa

SEQ ID NO: 28485 - RNA, 1724 nt, Artificial Sequence
  mRNA product Design a-1 (A100) comprising derived and/or modified sequence from LASV(Josiah;Clade IV)__NP_694870__GPCmut5 (opt1)
aggagagucccgcagucggcguccagcggcucugcuuguucgugugugugucguugcaggccuuauucaagcuuaccaugggccagaucgugaccuucuuccaggaggucccccacgugaucgaggaggugaugaacaucguccugaucgcccucagcgugcuggccgugcugaaggggcucuacaacuucgcgaccugcggccuggucgggcuggugacguuccuccugcugugcggccgcuccugcaccaccagccucuacaaggggguguacgagcugcagacccuggagcucaacauggagacgcugaacaugaccaugccgcuguccugcaccaagaacaacagccaccacuacaucauggucggcaacgagaccggccucgagcugacgcugaccaacaccuccaucaucaaccacaaguucugcaaccucagcgacgcccacaagaagaaccuguacgaccacgcccugauguccaucaucagcaccuuccaccucuccauccccaacuucaaccaguacgaggccaugagcugcgacuucaacgggggcaagaucuccgugcaguacaaccugagccacuccuacgccggggacgcggccaaccacugcggcacgguggccaacgggguccugcagaccuucaugcggauggccuggggcggcagcuacaucgcgcucgacuccgggugcggcaacugggacugcaucaugaccagcuaccaguaccugaucauccagaacaccacgugggaggaccacugccaguucucccgccccagccccaucggguaccugggccuccugucccagcggacccgcgacaucuacaucagccggcgccugcucggcaccuucaccuggacgcugagcgacuccgaggggaaggacaccccgggcggguacugccugacccgguggaugcucaucgaggccgagcugaagugcuucggcaacaccgccguggccaagugcaacgagaagcacgacgaggaguucugcgacaugcugcgccucuucgacuucaacaagcaggccauccagcggcugaaggcgcccgcccagaugagcauccagcugaucaacaaggccgugaacgcccucaucaacgaccagcugaucaugaagaaccaccuccgcgacaucaugugcauccccuacugcaacuacuccaaguacugguaccugaaccacacgaccaccgggcggaccagccugcccaagugcuggcuggucuccaacggcagcuaccucaacgagacgcacuucuccgacgacaucgagcagcaggccgacaacaugaucaccgagaugcugcagaaggaguacauggagcgccagggcaagaccccgcuggggcugguggaccucuucguguucagcaccuccuucuaccugaucagcaucuuccugcaccucgucaagauccccacgcaccggcacaucgugggcaaguccugccccaagccccaccgccugaaccacauggggaucugcagcugcggccuguacaagcagccgggggugcccgucaaguggaagcggugaggacuagucccuguucccagagcccacuuuuuuuucuuuuuuugaaauaaaauagccugucuuucagaucuaaaaaaaaaaaaaaaaaaaaaaaaaaaaaaaaaaaaaaaaaaaaaaaaaaaaaaaaaaaaaaaaaaaaaaaaaaaaaaaaaaaaaaaaaaaaaaaaaaaa

SEQ ID NO: 28486 - RNA, 1721 nt, Artificial Sequence
  mRNA product Design a-1 (A100) comprising derived and/or modified sequence from LASV(LP;Clade I)__AAF86701__GPCmut5 (opt1)
aggagagucccgcagucggcguccagcggcucugcuuguucgugugugugucguugcaggccuuauucaagcuuaccaugggccagaucaucaccuucuuccaggaggugccccacgucaucgaggaggugaugaacaucgugcugaucgcccucagccugcuggccauccucaaggggcuguacaacaucgcgaccugcggcaucaucgggcuggucgccuuccucuuccugugcggcaaguccugcagccugacgcucaagggcggguacgagcugcagacccuggagcucaacauggagacccugaacaugaccaugccgcuguccugcacgaagaacagcucccaccacuacauccgcgugggcaacgagaccgggcucgagcugacccugaccaacacgagcaucaucaaccacaaguucugcaaccucuccgacgcccacaagaagaaccuguacgaccacgcccugaugagcaucaucuccaccuuccaccucagcauccccaacuucaaccaguacgaggccauguccugcgacuucaacggcgggaagaucagcgugcaguacaaccugucccacagcuacgcgggcgacgccgccgagcacugcgggaccgucgccaacggcgugcugcagaccuucaugcggauggcguggggcgggcgcuacaucgcccucgacuccggcugcgggaacugggacugcaucaugacgagcuaccaguaccugaucauccagaacaccaccugggaggaccacugccaguucucccggcccagccccaucggcuaccugggccuccugucccagcgcacccgggacaucuacaucagccgccggcugcucgggacguucaccuggacccugagcgacuccgagggcaacgagacccccgggggcuacugccugacgcgcuggaugcucaucgaggccgagcugaagugcuucgggaacaccgccguggccaagugcaacgagaagcacgacgaggaguucugcgacaugcugcggcuguucgacuucaacaagcaggcgauccgccggcugaaggccccggcccagaugagcauccagcugaucaacaaggccgucaacgcccucaucaacgaccagcugaucaugaagaaccaccuccgcgacaucaugugcauccccuacugcaacuacuccaaguacugguaccucaaccacaccagcuccggccggaccagccugcccaagugcuggcugaucuccaacggcagcuaccucaacgagacgcaguucuccgacgacaucgagcagcaggcggacaacaugaucaccgagaugcugcagaaggaguacaucgagcgccaggggaagaccccgcugggccugguggacaucuucaucuucagcaccuccuucuaccucaucagcaucuuccugcaccugaucaagauccccacgcaccggcacaucguggggaagcccugccccaagccgcaccgccucaaccacaugggcgucugcuccugcgggcuguacaagcaccccggcgugcccaccaaguggaagcggugaggacuagucccuguucccagagcccacuuuuuuuucuuuuuuugaaauaaaauagccugucuuucagaucuaaaaaaaaaaaaaaaaaaaaaaaaaaaaaaaaaaaaaaaaaaaaaaaaaaaaaaaaaaaaaaaaaaaaaaaaaaaaaaaaaaaaaaaaaaaaaaaaaaaa

SEQ ID NO: 28487 - RNA, 1721 nt, Artificial Sequence
  mRNA product Design a-1 (A100) comprising derived and/or modified sequence from LASV(803213;Clade II)__AAF86703__GPCmut5 (opt1)
aggagagucccgcagucggcguccagcggcucugcuuguucgugugugugucguugcaggccuuauucaagcuuaccaugggccagaucaucaccuucuuccaggaggugccccacgucaucgaggaggugaugaacaucgugcugaucgcccucagccugcuggccauccucaaggggaucuacaacgucgcgaccugcggccuguucgggcugaucuccuuccuccugcugugcggccgcagcugcuccgugacguacaaggggguguacgagcuccagacccuggagcugaacauggccaaccucaacaugaccaugccgcugagcugcaccaagaacaacucccaccacuacaucauggucggcaacgagacgggccuggagcucacccugaccaacaccagcaucaucaaccacaaguucugcaaccuguccgacgcccacaagaagaaccucuacgaccacgcccugaugagcaucaucuccacguuccaccugagcauccccaacuucaaccaguacgaggccauguccugcgacuucaacgggggcaagaucagcgugcaguacaaccucucccacagcuucgcgguggacgccgccaaccacugcgggaccaucgccaacggcguccugcagaccuucaugcggauggcguggggcggguccuacaucgcccuggacagcggcugcgggaacugggacugcaucaugaccuccuaccaguaccucaucauccagaacacgaccugggaggaccacugccaguucagccgccccucccccaucggcuaccuggggcugcucagccagcggacccgcgacaucuacaucagccggcgccugcugggcaccuucacguggacccucuccgacagcgagggcaacgaggcccccgggggcuacugccugacccgguggaugcugaucgaggccgagcucaagugcuucgggaacaccgccguggcgaagugcaacgagaagcacgacgaggaguucugcgacaugcugcgccuguucgacuucaacaagcaggccaucaagcggcucaagacgccggcccagauguccauccagcugaucaacaaggccgugaacgcccugaucaacgaccagcucaucaugaagaaccaccuccgcgacaucaugugcauccccuacugcaacuacagccgguacugguaccugaaccacaccgucaccggcaagaccucccugccccgcugcuggcuggugagcaacggguccuaccugaacgagacgcacuucagcgacgacaucgagcagcaggcggacaacaugaucaccgagaugcuccagaaggaguacauggaccggcagggcaagaccccgcugggccugguggaccuguucgucuucuccaccagcuucuaccucaucuccaucuuccugcaccuggugaagauccccacgcaccgccacaucguggggaagcccugccccaagccgcaccggcucaaccacaugggcaucugcagcugcgggcuguacaagcaccccggcguccccgugaaguggaagcgcugaggacuagucccuguucccagagcccacuuuuuuuucuuuuuuugaaauaaaauagccugucuuucagaucuaaaaaaaaaaaaaaaaaaaaaaaaaaaaaaaaaaaaaaaaaaaaaaaaaaaaaaaaaaaaaaaaaaaaaaaaaaaaaaaaaaaaaaaaaaaaaaaaaaaa

SEQ ID NO: 28488 - RNA, 1721 nt, Artificial Sequence
  mRNA product Design a-1 (A100) comprising derived and/or modified sequence from LASV(GA391;Clade III)__CAA36645__GPCmut5 (opt1)
aggagagucccgcagucggcguccagcggcucugcuuguucgugugugugucguugcaggccuuauucaagcuuaccaugggccagaucgugaccuucuuccaggaggucccccacgugaucgaggaggugaugaacaucguccugaucgcccucagcauccuggccauccugaaggggcucuacaacguggcgaccugcggccugaucgggcuggugacguuccuccugcuguccggccgcagcugcucccucaucuacaaggggaccuacgagcugcagacccuggagcucaacauggagacccugaacaugacgaugccgcugagcugcaccaagaacaacucccaccacuacauccgggucggcaacgagaccggccucgagcugacccugacgaacaccagcauccucaaccacaaguucugcaaccuguccgacgcccacaagcgcaaccuguacgaccacagccucauguccaucaucagcaccuuccaccuguccauccccaacuucaaccaguacgaggccaugagcugcgacuucaacgggggcaagaucaccgugcaguacaaccugucccacagcuucgccguggacgccgcggggcacugcggcacgcucgccaacgggguccugcagaccuucaugcggauggccuggggcggcuccuacaucgcccuggacagcgggugcggcaacugggacugcaucaugaccuccuaccaguaccucaucauccagaacaccacgugggacgaccacugccaguucagccgccccucccccaucggguaccugggccugcucagccagcggacccgcgacaucuacaucagccggcgccugcugggcaccuucaccuggacgcucuccgacagcgaggggaacgagaccccgggcggguacugccugacccgguggaugcugaucgaggcggagcucaagugcuucggcaacaccgccguggccaagugcaacgagaagcacgacgaggaguucugcgacaugcugcgccuguucgacuucaacaagcaggccauccggcgccucaagacgcccgcccagauguccauccagcugaucaacaaggcggugaacgcccugaucaacgaccagcucaucaugaagaaccaccuccgggacaucaugugcauccccuacugcaacuacagccgcuacugguaccugaaccacaccuccaccgggaagaccagccugccccggugcuggcugaucuccaacggcagcuaccugaacgagacgaaguucuccgacgacaucgagcagcaggccgacaacaugaucaccgagaugcugcagaaggaguacaucgaccgccagggcaagaccccgcucgggcuggucgaccuguucguguucagcaccuccuucuaccucaucagcaucuuccugcaccuggugaagauccccacgcaccggcacaucgucggcaagcccugccccaagccgcaccgccucaaccacauggggaucugcuccugcggccuguacaagcagcccggggugcccgugcgguggaagcgcugaggacuagucccuguucccagagcccacuuuuuuuucuuuuuuugaaauaaaauagccugucuuucagaucuaaaaaaaaaaaaaaaaaaaaaaaaaaaaaaaaaaaaaaaaaaaaaaaaaaaaaaaaaaaaaaaaaaaaaaaaaaaaaaaaaaaaaaaaaaaaaaaaaaaa

SEQ ID NO: 28489 - RNA, 1724 nt, Artificial Sequence
  mRNA product Design a-1 (A100) comprising derived and/or modified sequence from LASV(AV;Clade V)__CCA30314__GPCmut5 (opt1)
aggagagucccgcagucggcguccagcggcucugcuuguucgugugugugucguugcaggccuuauucaagcuuaccaugggccagaucgugaccuucuuccaggaggucccccacgugaucgaggaggugaugaacaucguccugaucgcccucagcauccuggccgugcugaaggggcucuacaacaucgcgaccugcggccugaucgggcugaucacguuccuccugcugugcggccgcuccugcagcuccaaccucuacaaggggguguacgagcugcagagccuggaccucaacauggagacccugaacaugaccaugccgcuguccugcaccaagaacaacagccaccacuacauccgggucggcaacgacacgggccucgagcugacccugaccaacaccuccauccucaaccacaaguucugcaaccugagcgacgcccacaagaaggaccuguacgaccacgcccucauguccaucaucagcacguuccaccuguccauccccaacuucaaccaguacgaggccaugagcugcgacuucaacgggggcaagaucuccgugcaguacaaccugagccacuccuacgccaucgacgcggccaaccacugcgggaccguggccaacggcauccuccagaccuucaugcgcauggccuggggcgggagcuacaucgcgcuggacuccggcugcgggaacugggacugcaucaugaccagcuaccaguaccugaucauccagaacacgaccugggagaaccacugccaguucucccggcccagccccaucggcuaccucgggcugcugagccagcgcacccgggacaucuacaucucccgccggcuccugggcaccuucacguggacccugagcgacuccgagggcaacgccacccccgggggcuacugccucacccgcuggaugcugaucgaggccgagcugaagugcuucgggaacacggccgucgccaagugcaacgagaagcacgacgaggaguucugcgacaugcuccggcuguucgacuucaacaagcaggcgaucagccgccugaaguccccggcccagaugagcauccagcucaucaacaaggccgugaacgcccugaucaacgaccagcugaucaugaagaaccaccuccgggacaucaugugcauccccuacugcaacuacuccaaguacugguaccugaaccacaccaucaccggcaagaccagccugcccaagugcuggcucguguccaacgggagcuaccugaacgagacgcacuucuccgacgacaucgagcagcaggccgacaacaugaucaccgagaugcugcagaaggaguacauggagcgccagggcaagaccccgcugggccucgucgaccuguucguguucagcaccuccuucuaccugaucagcaucuuccuccggcuggugaagauccccacgcaccgccacaucgucgggaagcccugccccaagccgcaccggcugaaccacaugggcaucugcuccugcgggcucuacaagcagcccggcgugcccgugcgcuggaagcggugaggacuagucccuguucccagagcccacuuuuuuuucuuuuuuugaaauaaaauagccugucuuucagaucuaaaaaaaaaaaaaaaaaaaaaaaaaaaaaaaaaaaaaaaaaaaaaaaaaaaaaaaaaaaaaaaaaaaaaaaaaaaaaaaaaaaaaaaaaaaaaaaaaaaa

SEQ ID NO: 28490 - RNA, 1721 nt, Artificial Sequence
  mRNA product Design a-1 (A100) comprising derived and/or modified sequence from LASV(Togo/2016/7082;Clade VI)__AMR44577__GPCmut5 (opt1)
aggagagucccgcagucggcguccagcggcucugcuuguucgugugugugucguugcaggccuuauucaagcuuaccaugggccagaucaucaccuucuuccaggaggugccccacgucaucgaggaggugaugaacaucgugcugaucgcccucagccugcuggccauccucaagggggucuacaacguggcgaccugcggcaucaucgggcuggugacguuccuguuccucugcggccgcuccugcagccugaucuacaagggguccuacgagcugcagacccucgagcugaacauggagacccugaacaugaccaugccgcucagcugcacgaagaacuccagccaccacuacauccgggucggcaacgagaccggccuggagcugacccucaccaacacguccaucaucaaccacaaguucugcaaccugagcgacgcccacaagcgcaaccuguacgaccacgcccucauguccauccugagcaccuuccaccuguccauccccaacuucaaccaguacgaggccaugagcugcgacuucaacgggggcaagaucuccgugcaguacaaccucagccacgccuacgcgguggacgccgccgagcacugcgggaccgucgccaacggcgugcugcagaccuucaugcggauggcguggggcggguccuacaucgcccuggacagcggcugcgggaacugggacugcaucaugacguccuaccaguaccucaucauccagaacaccaccugggaggaccacugccaguucagccgccccucccccaucggcuaccuggggcugcucagccagcggacccgcgacaucuacaucagccggcgccugcugggcacguucaccuggacccucuccgacagcgagggcaacgagacccccgggggcuacugccugacgcgguggaugcugaucgaggccgagcucaagugcuucgggaacaccgccguggccaagugcaacgagaagcacgacgaggaguucugcgacaugcugcgccuguucgacuucaacaagcaggcgauccagcggcucaaguccccggcccagaugagcauccagcugaucaacaaggccgucaacgcccugaucaacgaccagcucaucaugaagaaccaccuccgcgacaugaugugcauccccuacugcaacuacuccaaguacugguaccugaaccacaccagcuccggccggaccagccugcccaagugcuggcugguguccaacgggagcuaccugaacgagacgcacuucuccgacgacaucgagcagcaggccgacaacaugaucaccgagaugcuccagaaggaguacaucgaccgccagggcaagaccccgcugggccugguggaccuguucgucuucagcaccuccuucuaccucaucagcaucuuccugcaccugaucaagauccccacgcaccggcacaucguggggaagcccugccccaagccgcaccgccucaaccacaugggcaucugcuccugcgggcuguacaagcagcccggcgugcccacccgguggaagcgcugaggacuagucccuguucccagagcccacuuuuuuuucuuuuuuugaaauaaaauagccugucuuucagaucuaaaaaaaaaaaaaaaaaaaaaaaaaaaaaaaaaaaaaaaaaaaaaaaaaaaaaaaaaaaaaaaaaaaaaaaaaaaaaaaaaaaaaaaaaaaaaaaaaaaa

SEQ ID NO: 28491 - RNA, 1721 nt, Artificial Sequence
  mRNA product Design a-1 (A100) comprising derived and/or modified sequence from LASV(KAK-428;Clade n.d. (VII))__ANH09740__GPCmut5 (opt1)
aggagagucccgcagucggcguccagcggcucugcuuguucgugugugugucguugcaggccuuauucaagcuuaccaugggccagaucgugaccuucuuccaggaggucccccacgugaucgaggaggugaugaacaucguccugaucgcccucagccugcuggccauccucaaggggcuguacaacuucgcgaccugcggcgugaucgggcugaucacguuccuccugcugugcggccgcuccugcagcgccaccuacaaggggcaguacgagcuccagacccuggagcugaacauggagucccucaacaugaccaugccgcugagcugcacgaagaacaacucccaccacuacauccgggccggcaacaacaccggccuggagcucacccugaccaacacgagcaucaucucccacaaguucugcaaccugagcgacgcccacaagaagaaccucuacgaccacacccugauguccaucaucaccaccuuccaccugagcauccccaacuucaaccaguacgaggccauguccugcgacuucaacgggggcaagaucagcauccaguacaaccucucccacagcuacgcgggggacgccgcccagcacugcggcacgguggccaacgggguccugcagaccuucaugcgcauggcguggggcggcuccuaccuggcccucgacagcgggugccggggcugggacugcaucaucuccagcuaccaguaccugaucauccagaacaccaccugggacgaccacugccaguucucccgccccagccccaucggguaccugggcuucgugagccagaagacgcgggacaucuacaucucccgccggcuccugggcaccuucaccuggacccugagcgacuccgaggggcacgacaugccgggcggguacugccucacgcgcuggaugcugaucgaggccgaccugaagugcuucggcaacaccgccguggccaagugcaacgagaagcacgacgaggaguucugcgacauguggcggcuguucgacuucaacaagcaggcgauccagcgccugaaggcccccgcccagaugaacauccagcugaucaacaaggccgucaacgcccucaucaacgaccagcugaugaugaagaaccaccuccgggacaucaugugcauccccuacugcaacuacagcaaguucugguaccucaacaacaccaccacggggcgcaccucccugccccggugcuggcugaucagcaacggcuccuaccucaacgagacccacuucagcgacgacaucgagcagcaggcggacaacaugaucaccgagaugcugcagaaggaguacauggaccgccagggcaagacgccgcuggggcucguggaccuguucguguucuccaccagcuucuaccugaucaccaucuuccugcaccucgucaagauccccacccaccggcacaucgugggcaagcccugccccaagccgcaccgccugaaccacauggggaucugcuccugcggccuguacaagcagcccggggugcccguccgguggaagcgcugaggacuagucccuguucccagagcccacuuuuuuuucuuuuuuugaaauaaaauagccugucuuucagaucuaaaaaaaaaaaaaaaaaaaaaaaaaaaaaaaaaaaaaaaaaaaaaaaaaaaaaaaaaaaaaaaaaaaaaaaaaaaaaaaaaaaaaaaaaaaaaaaaaaaa

SEQ ID NO: 28492 - RNA, 1721 nt, Artificial Sequence; identical to SEQ ID NO: 28486
  mRNA product Design a-1 (A100) comprising derived and/or modified sequence from LASV(Pinneo-NIG-1969;Clade I)__AIT17836__GPCmut5 (opt1)

SEQ ID NO: 28493 - RNA, 1721 nt, Artificial Sequence
  mRNA product Design a-1 (A100) comprising derived and/or modified sequence from LASV(ISTH0009-NIG-2011;Clade II)__AIT17404__GPCmut5 (opt1)
aggagagucccgcagucggcguccagcggcucugcuuguucgugugugugucguugcaggccuuauucaagcuuaccaugggccagaucaucaccuucuuccaggaggugccccacgucaucgaggaggugaugaacaucgugcugaucgcccucagccugcuggccauccucaaggggaucuacaacgucgcgaccugcggccuguucgggcugguguccuuccuccugcugugcggccgcagcugcuccacgaccuacaaggggguguacgagcuccagacccuggagcuggacauggccagccucaacaugaccaugccgcuguccugcacgaagaacaacagccaccacuacaucauggucggcaacgagaccggccuggagcucacccugaccaacacguccaucaucaaccacaaguucugcaaccugagcgacgcccacaagaagaaccucuacgaccacgcccugauguccaucaucagcaccuuccaccuguccauccccaacuucaaccaguacgaggccaugagcugcgacuucaacgggggcaagaucuccgugcaguacaaccucagccacgcguacgccguggacgccgccaaccacugcgggaccaucgcgaacggcguccugcagaccuucaugcggauggccuggggcggguccuacaucgcccuggacagcggcugcggguccugggacugcaucaugacgagcuaccaguaccucaucauccagaacaccaccugggaggaccacugccaguucucccgccccagccccaucggcuaccuggggcugcucagccagcggacccgcgacaucuacaucucccggcgccugcugggcacguucaccuggacccucagcgacuccgagggcaacgagacccccgggggcuacugccugacgcgguggaugcugaucgaggccgagcucaagugcuucgggaacaccgccguggcgaagugcaacgagaagcacgacgaggaguucugcgacaugcugcgccuguucgacuucaacaagcaggccauccggcgccucaagaccccggcccagaugagcauccagcugaucaacaaggccgugaacgcccugaucaacgaccagcucaucaugaagaaccaccuccgggacaucaugugcauccccuacugcaacuacuccaaguacugguaccugaaccacaccgucacgggcaagaccagccugccccgcugcuggcugguguccaacgggagcuaccugaacgagacccacuucuccgacgacaucgagcagcaggcggacaacaugaucaccgagcuccugcagaaggaguacauggaccggcagggcaagacgccgcugggccugguggaccucuucgucuucagcaccuccuucuaccugaucagcaucuuccugcaccucaucaagauccccacccaccgccacaucaccgggaagcccugccccaagccgcaccggcugaaccacaugggcaucugcuccugcgggcuguacaagcaccccggcgugcccgugaaguggaagcgcugaggacuagucccuguucccagagcccacuuuuuuuucuuuuuuugaaauaaaauagccugucuuucagaucuaaaaaaaaaaaaaaaaaaaaaaaaaaaaaaaaaaaaaaaaaaaaaaaaaaaaaaaaaaaaaaaaaaaaaaaaaaaaaaaaaaaaaaaaaaaaaaaaaaaa

SEQ ID NO: 28494 - RNA, 1721 nt, Artificial Sequence
  mRNA product Design a-1 (A100) comprising derived and/or modified sequence from LASV(ISTH2010-NIG-2012;Clade II)__AIT17482__GPCmut5 (opt1)
aggagagucccgcagucggcguccagcggcucugcuuguucgugugugugucguugcaggccuuauucaagcuuaccaugggccagaucaucaccuucuuccaggaggugccccacgucaucgaggaggugaugaacaucgugcugaucgcccucagccugcuggccauccucaaggggaucuacaacgucgcgaccugcggccuguucgggcugguguccuuccuccugcugugcggccgcagcugcuccacgaccuacaaggggguguacgagcuccagacccuggagcuggacauggccagccucaacaugaccaugccgcuguccugcacgaagaacaacagccaccacuacaucauggucggcaacgagaccggccuggagcucacccugaccaacacguccaucaucaaccacaaguucugcaaccugagcgacgcccacaagaagaaccucuacgaccacgcccugauguccaucaucagcaccuuccaccuguccauccccaacuucaaccaguacgaggccaugagcugcgacuucaacgggggcaagaucuccgugcaguacaaccucagccacgcguacgccguggacgccgccaaccacugcgggaccaucgcgaacggcguccugcagaccuucaugcggauggccuggggcggguccuacaucgcccuggacagcggcugcggguccugggacugcaucaugacgagcuaccaguaccucaucauccagaacaucaccugggaggaccacugccaguucucccgccccagccccaucggcuaccuggggcugcucagccagcggacccgcgacaucuacaucucccggcgccugcugggcaccuucacguggacccucagcgacuccgagggcaacgagacccccgggggcuacugccugacccgguggaugcugaucgaggccgagcucaagugcuucgggaacacggccguggcgaagugcaacgagaagcacgacgaggaguucugcgacaugcugcgccuguucgacuucaacaagcaggccauccggcgccucaagaccccggcccagaugagcauccagcugaucaacaaggccgugaacgcccugaucaacgaccagcucaucaugaagaaccaccuccgggacaucaugugcauccccuacugcaacuacuccaaguacugguaccugaaccacaccgucaccggcaagacgagccugccccgcugcuggcugguguccaacgggagcuaccugaacgagacccacuucuccgacgacaucgagcagcaggcggacaacaugaucaccgagcuccugcagaaggaguacaucgaccggcagggcaagaccccgcugggccugguggaccucuucgucuucagcacguccuucuaccugaucagcaucuuccugcaccucgugaagauccccacccaccgccacguggucgggaagcccugccccaagccgcaccggcugaaccacaugggcaucugcuccugcgggcuguacaagcaccccggcgugcccgugaaguggaagcgcugaggacuagucccuguucccagagcccacuuuuuuuucuuuuuuugaaauaaaauagccugucuuucagaucuaaaaaaaaaaaaaaaaaaaaaaaaaaaaaaaaaaaaaaaaaaaaaaaaaaaaaaaaaaaaaaaaaaaaaaaaaaaaaaaaaaaaaaaaaaaaaaaaaaaa

SEQ ID NO: 28495 - RNA, 1721 nt, Artificial Sequence
  mRNA product Design a-1 (A100) comprising derived and/or modified sequence from LASV(Lassa virus/H.sapiens-wt/NGA/2015/ISTH_0543;Clade II)__AVO03639__GPCmut5 (opt1)
aggagagucccgcagucggcguccagcggcucugcuuguucgugugugugucguugcaggccuuauucaagcuuaccaugggccagaucaucaccuucuuccaggaggugccccacgucaucgaggaggugaugaacaucgugcugaucgcccucagccugcuggccauccucaaggggaucuacaacgucgcgaccugcggccuguucgggcugguguccuuccuccugcugugcggccgcagcugcuccacgaccuacaaggggguguacgagcuccagacccuggagcuggacauggccaaccucaacaugaccaugccgcugagcugcacgaagaacaacucccaccacuacaucauggucggcaacgagaccggccuggagcucacccugaccaacacgagcaucaucaaccacaaguucugcaaccuguccgacgcccacaagaagaaccucuacgaccacgcccugaugagcaucaucuccaccuuccaccugagcauccccaacuucaaccaguacgaggccauguccugcgacuucaacgggggcaagaucagcgugcaguacaaccucucccacaccuacgcgguggacgccgccaaccacugcgggaccaucgccaacggcguccugcagacguucaugcggauggcguggggcgggagcuacaucgcccuggacuccggcugcgggagcugggacugcaucaugaccuccuaccaguaccucgugauccagaacaccaccugggaggaccacugccaguucagccgccccucccccaucggcuaccuggggcugcucagccagcggacgcgcgacaucuacaucagccggcgccugcugggcaccuucaccuggacccucuccgacagcgagggcaacgagacgcccgggggcuacugccugacccgguggaugcugaucgaggccgagcucaagugcuucgggaacaccgccguggccaagugcaacgagaagcacgacgaggaguucugcgacaugcugcgccuguucgacuucaacaagcaggcgauccggcgccucaagaccccggcccagauguccauccagcugaucaacaaggccgucaacgcccugaucaacgaccagcucaucaugaagaaccaccuccgggacaucaugugcauccccuacugcaacuacagcaaguacugguaccugaaccacacggugaccggcaagaccucccugccccgcugcuggcuggugagcaacggguccuaccugaacgagacccacuucagcgacgacaucgagcagcaggccgacaacaugaucacggagcuccugcagaaggaguacaucgaccggcagggcaagaccccgcugggccuggucgaccucuucguguucuccaccagcuucuaccugaucuccaucuuccugcaccucgugaagauccccacccaccgccacaucacggggaagcccugccccaagccgcaccggcugaaccacaugggcaucugcagcugcgggcuguacaagcaccccggcguccccgugaaguggaagcgcugaggacuagucccuguucccagagcccacuuuuuuuucuuuuuuugaaauaaaauagccugucuuucagaucuaaaaaaaaaaaaaaaaaaaaaaaaaaaaaaaaaaaaaaaaaaaaaaaaaaaaaaaaaaaaaaaaaaaaaaaaaaaaaaaaaaaaaaaaaaaaaaaaaaaa

SEQ ID NO: 28496 - RNA, 1721 nt, Artificial Sequence
  mRNA product Design a-1 (A100) comprising derived and/or modified sequence from LASV(Lassa virus/H.sapiens-wt/NGA/2016/ISTH_0009;Clade II)__AVO03571__GPCmut5 (opt1)
aggagagucccgcagucggcguccagcggcucugcuuguucgugugugugucguugcaggccuuauucaagcuuaccaugggccagaucaucaccuucuuccaggaggugccccacgucaucgaggaggugaugaacaucgugcugaucgcccucagccugcuggccauccucaaggggaucuacaacgucgcgaccugcggccugcuggggcucguguccuuccugcugcucugcggccgcagcugcuccacgaccuacaaggggguguacgagcugcagacccuggagcucgacauggccagccugaacaugaccaugccgcuguccugcacgaagaacaacagccaccacuacaucauggucggcaacgagaccggccucgagcugacccugaccaacacguccaucaucaaccacaaguucugcaaccucagcgacgcccacaagaagaaccuguacgaccacgcccugauguccaucaucagcaccuuccaccucuccauccccaacuucaaccaguacgaggccaugagcugcgacuucaacgggggccggaucuccgugcaguacaaccugagccacuccuacgcgguggacgccgccaaccacugcgggaccaucgccaacggcguccugcagaccuucaugcgcauggcguggggcgggagcuacaucgcccucgacuccggcugcgggagcugggacugcaucaugacguccuaccaguaccugaucauccagaacaccaccugggaggaccacugccaguucagccggcccagccccaucggcuaccuggggcuccugucccagcgcacccgggacaucuacaucagccgccggcugcucggcacguucaccuggacccuguccgacagcgagggcaacgagacccccgggggcuacugccugacgcgcuggaugcucaucgaggccgagcugaagugcuucgggaacaccgccguggccaagugcaacgagaagcacgacgaggaguucugcgacaugcugcggcuguucgacuucaacaagcaggcgauccgccggcugaagaccccggcccagauguccauccagcugaucaacaaggccgugaacgcccucaucaacgaccagcugaucaugaagaaccaccuccgcgacaucaugugcauccccuacugcaacuacagcaaguacugguaccucaaccacaccgucacgggcaagaccucccugccccggugcuggcuggugagcaacggguccuaccucaacgagacccacuucagcgacgacaucgagcagcaggccgacaacaugaucaccgagcugcugcagaaggaguacaucgaccgccagggcaagacgccgcugggccucguggaccuguucgucuucuccaccagcuucuaccugaucuccaucuuccuccaccuggugaagauccccacccaccggcacaucaccgggaagcccugccccaagccgcaccgccugaaccacaugggcaucugcagcugcgggcucuacaaccaccccggcgugcccgucaaguggaagcggugaggacuagucccuguucccagagcccacuuuuuuuucuuuuuuugaaauaaaauagccugucuuucagaucuaaaaaaaaaaaaaaaaaaaaaaaaaaaaaaaaaaaaaaaaaaaaaaaaaaaaaaaaaaaaaaaaaaaaaaaaaaaaaaaaaaaaaaaaaaaaaaaaaaaa

SEQ ID NO: 28497 - RNA, 1721 nt, Artificial Sequence
  mRNA product Design a-1 (A100) comprising derived and/or modified sequence from LASV(Lassa virus/H.sapiens-wt/NGA/2016/ISTH_0017;Clade II)__AVO03567__GPCmut5 (opt1)
aggagagucccgcagucggcguccagcggcucugcuuguucgugugugugucguugcaggccuuauucaagcuuaccaugggccagaucaucaccuucuuccaggaggugccccacgucaucgaggaggugaugaacaucgugcugaucgcccucagccugcuggccauccucaaggggaucuacaacgucgcgaccugcggccuguucgggcugguguccuuccuccugcugugcggccgcagcugcuccacgaccuacaaggggguguacgagcuccagacccuggagcuggacauggccagccucaacaugaccaugccgcuguccugcacgaagaacaacagccaccacuacaucauggucggcaacgagaccggccuggagcucacccugaccaacacguccaucaucaaccacaaguucugcaaccugagcgacgcccacaagaagaaccucuacgaccacgcccugauguccaucaucagcaccuuccaccuguccauccccaacuucaaccaguacgaggccaugagcugcgacuucaacgggggcaagaucuccgugcaguacaaccucagccacaccuacgcgaucgacgccgccaaccacugcgggaccaucgccaacggcgugcugcagacguucaugcggauggcguggggcggguccuacaucgcccuggacagcggcugcggguccugggacugcaucaugaccagcuaccaguaccucaucauccagaacaccaccugggaggaccacugccaguucucccgccccagccccaucggcuaccuggggcugcucagccagcggacgcgcgacaucuacaucucccggcgccugcugggcaccuucaccuggacccucagcgacuccgagggcaacgagacgcccgggggcuacugccugacccgguggaugcugaucgaggccgagcucaagugcuucgggaacaccgccgucgccaagugcaacgagaagcacgacgaggaguucugcgacaugcugcgccuguucgacuucaacaagcaggcgauccggcgccucaagaccccggcccagaugagcauccagcugaucaacaaggccgugaacgcccugaucaacgaccagcucaucaugaagaaccaccuccgggacaucaugugcauccccuacugcaacuacuccaaguacugguaccugaaccacacggugaccggcaagaccagccugccccgcugcuggcuggucuccaacgggagcuaccugaacgagacccacuucuccgacgacaucgagcagcaggccgacaacaugaucacggagcuccugcagaaggaguacauggaccggcagggcaagaccccgcugggccugguggaccucuucguguucagcaccuccuucuaccugaucagcaucuuccugcaccucguccgcauccccacccaccggcacgugaucgggaagcccugccccaagccgcaccgccugaaccacaugggcaucugcuccugcgggcuguacaagcaccccggcgugcccgucaaguggaagcggugaggacuagucccuguucccagagcccacuuuuuuuucuuuuuuugaaauaaaauagccugucuuucagaucuaaaaaaaaaaaaaaaaaaaaaaaaaaaaaaaaaaaaaaaaaaaaaaaaaaaaaaaaaaaaaaaaaaaaaaaaaaaaaaaaaaaaaaaaaaaaaaaaaaaa

SEQ ID NO: 28498 - RNA, 1721 nt, Artificial Sequence
  mRNA product Design a-1 (A100) comprising derived and/or modified sequence from LASV(Lassa virus/H.sapiens-wt/NGA/2018/ISTH_0959;Clade II)__AVV65099__GPCmut5 (opt1)
aggagagucccgcagucggcguccagcggcucugcuuguucgugugugugucguugcaggccuuauucaagcuuaccaugggccagaucaucaccuucuuccaggaggugccccacgucaucgaggaggugaugaacaucgugcugaucgcccucagccugcuggccauccucaaggggaucuacaacgucgugaccugcggccuguucgggcugguguccuuccuccugcugugcggccgcagcugcuccacgaccuacaagggggucuacgagcuccagacccuggagcuggacauggcgagccucaacaugaccaugccgcuguccugcacgaagaacaacagccaccacuacaucauggugggcaacgagaccggccuggagcucacccugaccaacacguccaucaucaaccacaaguucugcaaccugagcgacgcccacaagaagaaccucuacgaccacgcccugauguccaucaucagcaccuuccaccuguccauccccaacuucaaccaguacgaggccaugagcugcgacuucaacgggggcaagaucuccgugcaguacaaccucagccacgccuacgcgaucgacgccgccaaccacugcgggaccaucgccaacggcguccugcagaccuucaugcggauggcguggggcggguccuacaucgcccuggacagcggcugcggguccugggacugcaucaugacgagcuaccaguaccucaucauccagaacaccaccugggaggaccacugccaguucucccgccccagccccaucggcuaccuggggcugcucagccagcggacccgcgacaucuacaucucccggcgccugcugggcacguucaccuggacccucagcgacuccgagggcaacgagacccccgggggcuacugccugacgcgguggaugcugaucgaggccgagcucaagugcuucgggaacaccgccguggccaagugcaacgagaagcacgacgaggaguucugcgacaugcugcgccuguucgacuucaacaagcaggcgauccggcgccucaagaccccggcccagaugagcauccagcugaucaacaaggccgugaacgcccugaucaacgaccagcucaucaugaagaaccaccuccgggacaucaugugcauccccuacugcaacuacuccaaguacugguaccugaaccacaccgucacgggcaagaccagccugccccgcugcuggcugguguccaacgggagcuaccugaacgagacccacuucuccgacgacaucgagcagcaggccgacaacaugaucaccgagcuccugcagaaggaguacaucgaccggcagggcaagacgccgcugggccugguggaccucuucgucuucagcaccuccuucuaccugaucagcaucuuccugcaccucgugaagauccccacccaccgccacgugaucgggaagcccugccccaagccgcaccggcugaaccacaugggcaucugcuccugcgggcuguacaagcaccccggcguccccgugaaguggaagcgcugaggacuagucccuguucccagagcccacuuuuuuuucuuuuuuugaaauaaaauagccugucuuucagaucuaaaaaaaaaaaaaaaaaaaaaaaaaaaaaaaaaaaaaaaaaaaaaaaaaaaaaaaaaaaaaaaaaaaaaaaaaaaaaaaaaaaaaaaaaaaaaaaaaaaa

SEQ ID NO: 28499 - RNA, 1721 nt, Artificial Sequence
  mRNA product Design a-1 (A100) comprising derived and/or modified sequence from LASV(LASV003-NIG-2008;Clade II)__AIT17580__GPCmut5 (opt1)
aggagagucccgcagucggcguccagcggcucugcuuguucgugugugugucguugcaggccuuauucaagcuuaccaugggccagaucaucaccuucuuccaggaggugccccacgucaucgaggaggugaugaacaucgugcugaucgcccucagccugcuggccauccucaaggggaucuacaacgucgcgaccugcggccuguucgggcugguguccuuccuccugcugugcggccgcagcugcuccacgaccuacaaggggguguacgagcuccagacccuggagcuggacauggccagccucaacaugaccaugccgcuguccugcacgaagaacaacagccaccacuacaucauggucggcaacgagaccggccuggagcucacccugaccaacacguccaucaucaaccacaaguucugcaaccugagcgacgcccacaagaagaaccucuacgaccacgcccugauguccaucaucagcaccuuccaccuguccauccccaacuucaaccaguacgaggccaugagcugcgacuucaacgggggcaagaucuccgugcaguacaaccucagccacaccuacgcgguggacgccgccaaccacugcgggaccaucgccaacggcguccugcagacguucaugcggauggcguggggcggguccuacaucgcccuggacagcggcugcggguccugggacugcaucaugaccagcuaccaguaccucaucauccagaacaccaccugggaggaccacugccaguucucccgccccagccccaucggcuaccuggggcugcucagccagcggacgcgcgacaucuacaucucccggcgccugcugggcaccuucaccuggacccucagcgacuccgagagcaacgagacgccgggcggguacugccugacccgguggaugcugaucgaggccgagcucaagugcuucggcaacaccgccguggccaagugcaacgagaagcacgacgaggaguucugcgacaugcugcgccuguucgacuucaacaagcaggcgauccggcgccucaaggcccccgcccagauguccauccagcugaucaacaaggccgugaacgcccugaucaacgaccagcucaucaugaagaaccaccuccgggacaucaugugcauccccuacugcaacuacagcaaguacugguaccugaaccacaccgucacggggcgcaccucccugccccggugcuggcuggugagcaacggcuccuaccugaacgagacccacuucagcgacgacaucgagcagcaggcggacaacaugaucaccgagcuccugcagaaggaguacauggaccgccaggggaagacgccgcugggccugguggaccucuucgucuucuccaccagcuucuaccugaucuccaucuuccugcaccucgugaagauccccacccaccggcacgugaucggcaagcccugccccaagccgcaccgccugaaccacauggggaucugcagcugcggccuguacaagcaccccgggguccccgugaaguggaagcggugaggacuagucccuguucccagagcccacuuuuuuuucuuuuuuugaaauaaaauagccugucuuucagaucuaaaaaaaaaaaaaaaaaaaaaaaaaaaaaaaaaaaaaaaaaaaaaaaaaaaaaaaaaaaaaaaaaaaaaaaaaaaaaaaaaaaaaaaaaaaaaaaaaaaa

SEQ ID NO: 28500 - RNA, 1721 nt, Artificial Sequence
  mRNA product Design a-1 (A100) comprising derived and/or modified sequence from LASV(LASV035-NIG-2009;Clade II)__AIT17588__GPCmut5 (opt1)
aggagagucccgcagucggcguccagcggcucugcuuguucgugugugugucguugcaggccuuauucaagcuuaccaugggccagaucaucaccuucuuccaggaggugccccacgucaucgaggaggugaugaacaucgugcugaucgcccucagccugcuggccauccucaaggggaucuacaacgucgcgaccugcggccuguucgggcugguguccuuccuccugcugugcggccgcagcugcuccacgaccuacaaggggguguacgagcuccagacccuggagcuggacauggccagccucaacaugaccaugccgcuguccugcacgaagaacaacagccaccacuacaucauggucggcaacgagaccggccuggagcucacccugaccaacacguccaucaucaaccacaaguucugcaaccugagcgacgcccacaagaagaaccucuacgaccacgcccugauguccaucaucagcaccuuccaccuguccauccccaacuucaaccaguacgaggccaugagcugcgacuucaacgggggcaagaucuccgugcaguacaaccucagccacgcguacgccguggacgccgccaaccacugcgggaccaucgcgaacggcguccugcagaccuucaugcggauggccuggggcggguccuacaucgcccuggacagcggcugcggguccugggacugcaucaugacgagcuaccaguaccucaucauccagaacaccaccugggaggaccacugccaguucucccgccccagccccaucggcuaccuggggcugcucagccagcggacccgcgacaucuacaucucccggcgccugcugggcacguucaccuggacccucagcgacuccgagggcaacgagacccccgggggcuacugccugacgcgguggaugcugaucgaggccgagcucaagugcuucgggaacaccgccguggcgaagugcaacgagaagcacgacgaggaguucugcgacaugcugcgccuguucgacuucaacaagcaggccauccggcgccucaaggccccggcccagaugagcauccagcugaucaacaaggccgugaacgcgcugaucaacgaccagcucaucaugaagaaccaccuccgggacaucaugugcauccccuacugcaacuacuccaaguacugguaccugaaccacaccgucaccggcaagacgagccugccccgcugcuggcugguguccaacgggagcuaccugaacgagacccacuucuccgacgacaucgagcagcaggccgacaacaugaucaccgagcuccugcagaaggaguacaucgaccggcagggcaagaccccgcugggccugguggaccucuucgucuucagcacguccuucuaccugaucagcaucuuccugcaccucgugaagauccccacccaccgccacgugaucgggaagcccugccccaagccgcaccggcugaaccacaugggcaucugcuccugcgggcuguacaagcaccccggcguccccgugaaguggaagcgcugaggacuagucccuguucccagagcccacuuuuuuuucuuuuuuugaaauaaaauagccugucuuucagaucuaaaaaaaaaaaaaaaaaaaaaaaaaaaaaaaaaaaaaaaaaaaaaaaaaaaaaaaaaaaaaaaaaaaaaaaaaaaaaaaaaaaaaaaaaaaaaaaaaaaa

SEQ ID NO: 28501 - RNA, 1721 nt, Artificial Sequence
  mRNA product Design a-1 (A100) comprising derived and/or modified sequence from LASV(LASV1000-NIG-2009;Clade II)__AIT17782__GPCmut5 (opt1)
aggagagucccgcagucggcguccagcggcucugcuuguucgugugugugucguugcaggccuuauucaagcuuaccaugggccagaucaucaccuucuuccaggaggugccccacgucaucgaggaggugaugaacaucgugcugaucgcccucagccugcuggccauccucaaggggaucuacaacgucgcgaccugcggccuguucgggcugguguccuuccuccugcugugcggccgcagcugcuccacgaccuacaaggggguguacgagcuccagacccuggagcuggacauggccagccucaacaugaccaugccgcuguccugcacgaagaacaacagccaccacuacaucauggucggcaacgagaccggccuggagcucacccugaccaacacguccaucaucaaccacaaguucugcaaccugagcgacgcccacaagaagaaccucuacgaccacgcccugauguccaucaucagcaccuuccaccuguccauccccaacuucaaccaguacgaggccaugagcugcgacuucaacgggggcaagaucuccgugcaguacaaccucagccacaccuacgcgguggacgccgccaaccacugcgggaccaucgccaacggcguccugcagacguucaugcggauggcguggggcggguccuacaucgcccuggacagcggcugcggguccugggacugcaucaugaccagcuaccaguaccucaucauccagaacaccaccugggaggaccacugccaguucucccgccccagccccaucggcuaccuggggcugcucagccagcggacgcgcgacaucuacaucucccggcgccugcugggcaccuucaccuggacccucagcgacuccgagggcaacgagacgcccgggggcuacugccugacccgguggaugcugaucgaggccgagcucaagugcuucgggaacaccgccguggccaagugcaacgagaagcacgacgaggaguucugcgacaugcugcgccuguucgacuucaacaagcaggcgaucaagcggcucaagaccccggcccagaugagcauccagcugaucaacaaggccgugaacgcccugaucaacgaccagcucaucaugaagaaccaccuccgcgacaucaugugcauccccuacugcaacuacuccaaguacugguaccugaaccacacggucaccggcaagaccagccugccccggugcuggcugguguccaacgggagcuaccugaacgagacccacuucuccgacgacaucgagcagcaggccgacaacaugaucacggagcuccugcagaaggaguacaucgaccgccagggcaagaccccgcugggccugguggaccucuucgucuucagcaccuccuucuaccugaucagcaucuuccugcaccucgugaagauccccacccaccggcacguggucgggaagcccugccccaagccgcaccgccugaaccacaugggcaucugcuccugcgggcuguacaagcaccccggcgugcccgugaaguggaagcggugaggacuagucccuguucccagagcccacuuuuuuuucuuuuuuugaaauaaaauagccugucuuucagaucuaaaaaaaaaaaaaaaaaaaaaaaaaaaaaaaaaaaaaaaaaaaaaaaaaaaaaaaaaaaaaaaaaaaaaaaaaaaaaaaaaaaaaaaaaaaaaaaaaaaa

SEQ ID NO: 28502 - RNA, 1721 nt, Artificial Sequence
  mRNA product Design a-1 (A100) comprising derived and/or modified sequence from LASV(LASV221-NIG-2010;Clade II)__AIT17624__GPCmut5 (opt1)
aggagagucccgcagucggcguccagcggcucugcuuguucgugugugugucguugcaggccuuauucaagcuuaccaugggccagaucaucaccuucuuccaggaggugccccacgucaucgaggaggugaugaacaucgugcugaucgcccucagccugcuggccauccucaaggggaucuacaacgucgcgaccugcggccuguucgggcugguguccuuccuccugcugugcggccgcagcugcuccacgaccuacaaggggguguacgagcuccagacccuggagcuggacauggccagccucaacaugaccaugccgcuguccugcacgaagaacaacagccaccacuacaucauggucggcaacgagaccggccuggagcucacccugaccaacacguccaucaucaaccacaaguucugcaaccugagcgacgcccacaagaagaaccucuacgaccacgcccugauguccaucaucagcaccuuccaccuguccauccccaacuucaaccaguacgaggccaugagcugcgacuucaacgggggcaagaucuccgugcaguacaaccucagccacaccuacgcgaucgacgccgccaaccacugcgggaccaucgccaacggcgugcugcagacguucaugcggauggcguggggcggguccuacaucgcccuggacagcggcugcggguccugggacugcaucaugaccagcuaccaguaccucaucauccagaacaccaccugggaggaccacugccaguucucccgccccagccccaucggcuaccuggggcugcucagccagcggacgcgcgacaucuacaucucccggcgccugcugggcaccuucaccuggacccucagcgacuccgagggcaacgagacgcccgggggcuacugccugacccgguggaugcugaucgaggccgagcucaagugcuucgggaacaccgccgucgccaagugcaacgagaagcacgacgaggaguucugcgacaugcugcgccuguucgacuucaacaagcaggcgauccggcgccucaagaccccggcccagaugagcauccagcugaucaacaaggccgugaacgcccugaucaacgaccagcucaucaugaagaaccaccuccgggacaucaugugcauccccuacugcaacuacuccaaguacugguaccugaaccacacggugaccggcaagaccagccugccccgcugcuggcuggucuccaacgggagcuaccugaacgagacccacuucuccgacgacaucgagcagcaggccgacaacaugaucacggagaugcuccagaaggaguacauggaccggcagggcaagaccccgcugggccugguggaccuguucguguucagcaccuccuucuaccucaucagcaucuuccugcaccuggucaagauccccacccaccgccacgugaucgggaagcccugccccaagccgcaccggcucaaccacaugggcaucugcuccugcgggcuguacaagcaccccggcgugcccgucaaguggaagcgcugaggacuagucccuguucccagagcccacuuuuuuuucuuuuuuugaaauaaaauagccugucuuucagaucuaaaaaaaaaaaaaaaaaaaaaaaaaaaaaaaaaaaaaaaaaaaaaaaaaaaaaaaaaaaaaaaaaaaaaaaaaaaaaaaaaaaaaaaaaaaaaaaaaaaa

SEQ ID NO: 28503 - RNA, 1721 nt, Artificial Sequence
  mRNA product Design a-1 (A100) comprising derived and/or modified sequence from LASV(LASV237-NIG-2010;Clade II)__AIT17638__GPCmut5 (opt1)
aggagagucccgcagucggcguccagcggcucugcuuguucgugugugugucguugcaggccuuauucaagcuuaccaugggccagaucaucaccuucuuccaggaggugccccacgucaucgaggaggugaugaacaucgugcugaucgcccucagccugcuggccauccucaaggggaucuacaacgucgcgaccugcggccuguucgggcugguguccuuccuccugcugugcggccgcagcugcuccacgaccuacaaggggguguacgagcuccagacccuggagcuggacauggccagccucaacaugaccaugccgcuguccugcacgaagaacaacagccaccacuacaucauggucggcaacgagaccggccuggagcucacccugaccaacacguccaucaucaaccacaaguucugcaaccugagcgacgcccacaagaaggaccucuacgaccacgcccugauguccaucaucagcaccuuccaccuguccauccccaacuucaaccaguacgaggccaugagcugcgacuucaacgggggcaagaucuccgugcaguacaaccucagccacaccuacgcgguggacgccgccaaccacugcgggaccaucgccaacggcguccugcagacguucaugcggauggcguggggcggguccuacaucgcccuggacagcggcugcggguccugggacugcaucaugaccagcuaccaguaccucaucauccagaacaccaccugggaggaccacugccaguucucccgccccagccccaucggcuaccuggggcugcucagccagcggacgcgcgacaucuacaucucccggcgccugcugggcaccuucaccuggacccucagcgacuccgagggcaacgagacgcccgggggcuacugccugacccgguggaugcugaucgaggccgagcucaagugcuucgggaacaccgccguggccaagugcaacgagaagcacgacgaggaguucugcgacaugcugcgccuguucgacuucaacaagcaggcgauccggcgccucaagaccccggcccagaugagcauccagcugaucaacaaggccgugaacgcccugaucaacgaccagcucaucaugaagaaccaccuccgggacaucaugugcauccccuacugcaacuacuccaaguacugguaccugaaccacacggucaccggcaagaccagccugccccgcugcuggcugguguccaacgggagcuaccugaacgagacccacuucuccgacgacaucgagcagcaggccgacaacaugaucacggagcuccugcagaaggaguacauggaccggcagggcaagaccccgcugggccugguggaccucuucgucuucagcaccuccuucuaccugaucagcaucuuccugcaccucaucaagauccccacccaccgccacaucacggggaagcccugccccaagccgcaccggcugaaccacaugggcaucugcuccugcgggcuguacaagcaccccggcgugcccgugaaguggaagcgcugaggacuagucccuguucccagagcccacuuuuuuuucuuuuuuugaaauaaaauagccugucuuucagaucuaaaaaaaaaaaaaaaaaaaaaaaaaaaaaaaaaaaaaaaaaaaaaaaaaaaaaaaaaaaaaaaaaaaaaaaaaaaaaaaaaaaaaaaaaaaaaaaaaaaa

SEQ ID NO: 28504 - RNA, 1721 nt, Artificial Sequence
  mRNA product Design a-1 (A100) comprising derived and/or modified sequence from LASV(LASV253-NIG-2011;Clade II)__AIT17670__GPCmut5 (opt1)
aggagagucccgcagucggcguccagcggcucugcuuguucgugugugugucguugcaggccuuauucaagcuuaccaugggccagaucaucaccuucuuccaggaggugccccacgucaucgaggaggugaugaacaucgugcugaucgcccucagccugcuggccauccucaaggggaucuacaacgucgcgaccugcggccuguucgggcugguguccuuccuccugcugugcggccgcagcugcuccacgaccuacaaggggguguacgagcuccagacccuggagcuggacauggccagccucaacaugaccaugccgcuguccugcacgaagaacaacagccaccacuacaucauggucggcaacgagaccggccuggagcucacccugaccaacacguccaucaucaaccacaaguucugcaaccugagcgacgcccacaagaagaaccucuacgaccacgcccugauguccaucaucagcaccuuccaccuguccauccccaacuucaaccaguacgaggccaugagcugcgacuucaacgggggcaagaucuccgugcaguacaaccucagccacaccuacgcgguggacgccgccaaccacugcgggaccaucgccaacggcguccugcagacguucaugcggauggcguggggcggguccuacaucgcccuggacagcggcugcggguccugggacugcaucaugaccagcuaccaguaccucaucauccagaacaccaccugggaggaccacugccaguucucccgccccagccccaucggcuaccuggggcugcucagccagcggacgcgcgacaucuacaucucccggcgccugcugggcaccuucaccuggacccucagcgacuccgagggcaacgagacgcccgggggcuacugccugacccgguggaugcugaucgaggccgagcucaagugcuucgggaacaccgccguggccaagugcaacgagaagcacgacgaggaguucugcgacaugcugcgccuguucgacuucaacaagcaggcgauccggcgccucaaggccccggcccagaugagcauccagcugaucaacaaggccgugaacgcccugaucaacgaccagcucaucaugaagaaccaccuccgggacaucaugugcauccccuacugcaacuacuccaaguacugguaccugaaccacaccgucacgggccgcaccagccugccccggugcuggcugguguccaacgggagcuaccugaacgagacccacuucuccgacgacaucgagcagcaggcggacaacaugaucaccgagcuccugcagaaggaguacaucgaccgccagggcaagacgccgcugggccugguggaccucuucgucuucagcaccuccuucuaccugaucagcaucuuccugcaccucgugaagauccccacccaccggcacaucaucgggaagcccugccccaagccgcaccgccugaaccacaugggcaucugcuccugcgggcuguacaagcaccccggcgugcccgucaaguggaagcggugaggacuagucccuguucccagagcccacuuuuuuuucuuuuuuugaaauaaaauagccugucuuucagaucuaaaaaaaaaaaaaaaaaaaaaaaaaaaaaaaaaaaaaaaaaaaaaaaaaaaaaaaaaaaaaaaaaaaaaaaaaaaaaaaaaaaaaaaaaaaaaaaaaaaa

SEQ ID NO: 28505 - RNA, 1721 nt, Artificial Sequence
  mRNA product Design a-1 (A100) comprising derived and/or modified sequence from LASV(LASV254-NIG-2011;Clade II)__AIT17674__GPCmut5 (opt1)
aggagagucccgcagucggcguccagcggcucugcuuguucgugugugugucguugcaggccuuauucaagcuuaccaugggccagaucaucaccuucuuccaggaggugccccacgucaucgaggaggugaugaacaucgugcugaucgcccucagccugcuggccauccucaaggggaucuacaacgucgcgaccugcggccuguucgggcugguguccuuccuccugcugugcggccgcagcugcuccacgaccuacaaggggguguacgagcuccagacccuggagcuggacaugaccaaccucaacaugacgaugccgcugagcugcaccaagaacaacucccaccacuacaucauggucggcaacgagaccggccuggagcucacccugacgaacaccagcaucaucaaccacaaguucugcaaccuguccgacgcccacaagaagaaccucuacaaccacgcccugaugagcaucaucuccaccuuccaccugagcauccccaacuucaaccaguacgaggccauguccugcgacuucaacgggggcaagaucagcgugcaguacaaccucucccacagcuacgccguggacgcggccaaccacugcgggaccaucgccaacggcguccugcagacguucaugcggauggccuggggcggguccuacaucgcgcuggacagcggcugcgggaacugggacugcaucaugaccuccuaccaguaccucaucauccagaacaccaccugggaggaccacugccaguucagccgccccucccccaucggcuaccuggggcugcucagccagcggacgcgcgacaucuacaucagccggcgccugcugggcaccuucaccuggacccucuccgacagcgagggcaacgagacgcccgggggcuacugccugacccgguggaugcugaucgaggccgagcucaagugcuucgggaacaccgccguggccaagugcaacgagaagcacgacgaggaguucugcgacaugcugcgccuguucgacuucaacaagcaggccauccggcgccucaagaccccggcgcaggccaacauccagcugaucaacaaggccgugaacgcccugaucaacgaccagcucaucaugaagaaccaccuccgggacaucaugugcauccccuacugcaacuacuccaaguacugguaccugaaccacacggucaccggcaagaccagccugccccgcugcuggcugguguccaacgggagcuaccugaacgagacccacuucuccgacgacaucgagcagcaggccgacaacaugaucacggagcuccugcagaaggaguacauggaccggcagggcaagaccccgcugggccugguggaccucuucgucuucagcaccuccuucuaccugaucagcaucuuccugcaccucgugaagauccccacccaccgccacgugaucgggaagcccugccccaagccgcaccggcugaaccacaugggcaucugcuccugcgggcuguacaagcaccccggcguccccgugaaguggaagcgcugaggacuagucccuguucccagagcccacuuuuuuuucuuuuuuugaaauaaaauagccugucuuucagaucuaaaaaaaaaaaaaaaaaaaaaaaaaaaaaaaaaaaaaaaaaaaaaaaaaaaaaaaaaaaaaaaaaaaaaaaaaaaaaaaaaaaaaaaaaaaaaaaaaaaa

SEQ ID NO: 28506 - RNA, 1721 nt, Artificial Sequence
  mRNA product Design a-1 (A100) comprising derived and/or modified sequence from LASV(Nig08-A19;Clade III)__ADU56618__GPCmut5 (opt1)
aggagagucccgcagucggcguccagcggcucugcuuguucgugugugugucguugcaggccuuauucaagcuuaccaugggccagaucgugaccuucuuccaggaggucccccacgugaucgaggaggugaugaacaucguccugaucgcccucagcauccuggccauccugaaggggcucuacaacaucgcgaccugcggccugaucgggcuggugacguuccuccugcuguccggccgcagcugcuccaugaccuacaaggggguguacgagcuccagacccuggagcugaacaugaacacccucaacaugacgaugccgcugagcugcaccaagaacaacucccaccacuacaucauggucggcaacgagaccggccuggagcucacccugacgaacaccagccugcuccaccacaaguucugcaaccuguccgacgcccacaagaagaaccuguacgaccacacccucaugagcaucaucuccaccuuccaccugagcauccccaacuucaaccaguacgaggccauguccugcgacuucaacgggggcaagaucacggugcaguacaaccugagccacuccuacgccaucgacgccgcgaaccacugcgggaccguggccaacggcguccuccagaccuucaugcggauggccuggggcgggagcuacaucgcccuggacuccggcugcgggaagugggacugcaucaugaccagcuaccaguaccugaucauccagaacacgaccugggaggaccacugccaguucucccgccccagccccaucggcuaccucgggcugcugucccagcggacccgcgacaucuacaucagccggcgccuccugggcaccuucacguggacccugagcgacuccgagggcaacgagacccccgggggcuacugccucacccgguggaugcugaucgaggcggagcugaagugcuucgggaacacggccguggccaagugcaacgagaagcacgacgaggaguucugcgacaugcuccgccuguucgacuucaacaagcaggccauccggcgccugaaggccccggcgcagaugagcauccagcucaucaacaaggccgugaacgcccugaucaacgaccagcugaucaugaagaaccaccuccgggacaucaugugcauccccuacugcaacuacuccaaguacugguaccugaaccacaccagcaccggccgcaccucccugccccggugcuggcucgucagcaacggguccuaccugaacgagacgcacuucagcgacgacaucgagcagcaggccgacaacaugaucaccgagaugcugcagaaggaguaccuggaccgccagggcaagaccccgcucggccugguggaccuguucguguucuccaccagcuucuaccucaucuccaucuuccugcaccuggucaagauccccacgcaccggcacaucguggggaagcccugccccaagccgcaccgccucaaccacaugggcaucugcagcugcgggcuguacaagcagcccggcgugcccguccgguggaagcgcugaggacuagucccuguucccagagcccacuuuuuuuucuuuuuuugaaauaaaauagccugucuuucagaucuaaaaaaaaaaaaaaaaaaaaaaaaaaaaaaaaaaaaaaaaaaaaaaaaaaaaaaaaaaaaaaaaaaaaaaaaaaaaaaaaaaaaaaaaaaaaaaaaaaaa

SEQ ID NO: 28507 - RNA, 1724 nt, Artificial Sequence
  mRNA product Design a-1 (A100) comprising derived and/or modified sequence from LASV(G1180-SLE-2010;Clade IV)__AIT17168__GPCmut5 (opt1)
aggagagucccgcagucggcguccagcggcucugcuuguucgugugugugucguugcaggccuuauucaagcuuaccaugggccagaucgugaccuucuuccaggaggucccccacgugaucgaggaggugaugaacaucguccugaucgcccucagcauccuggccgugcugaaggggcucuacaacuucgcgaccugcggccugguggggcugcucacguuccugcugcucugcggccgcuccugcaccgccagccgguacaagggggucuacgagcugcagacccuggagcucaacauggagacccugaacaugacgaugccgcuguccugcaccaagaacaacagccaccacuacaucauggugggcaacgagaccggccucgagcugacccugacgaacaccuccaucaucaaccacaaguucugcaaccucagcgacgcccacaagaagaaccuguacgaccacgcccugauguccaucaucagcaccuuccaccucuccauccccaacuucaaccaguacgaggccaugagcugcgacuucaacgggggcaagaucuccgugcaguacaaccugagccacuccuacgcgggggacgccgccaaccacugcggcaccgucgccaacggggugcugcagacguucaugcgcauggcguggggcggcagcuacaucgcccucgacuccgggugcggcagcugggacugcaucaugaccuccuaccaguaccugaucauccagaacaccaccugggaggaccacugccaguucagccggcccucccccaucggguaccugggccuccugagccagcgcacgcgggacaucuacaucagccgccggcugcucggcaccuucaccuggacccuguccgacagcgaggggaaggacacgccgggcggguacugccugacccgcuggaugcucaucgaggccgagcugaagugcuucggcaacaccgccguggccaagugcaacgagaagcacgacgaggaguucugcgacaugcugcggcuguucgacuucaacaagcaggcgauccagcgccugaaggcccccgcccagauguccauccagcugaucaacaaggccgucaacgcccucaucaacgaccagcugaucaugaagaaccaccuccgggacaucaugugcauccccuacugcaacuacagcaaguacugguaccucaaccacaccacgaccgggaagaccucccugcccaagugcuggcuggugagcaacggcuccuaccucaacgagacccacuucagcgacgacaucgagcagcaggcggacaacaugaucacggagaugcugcagaaggaguacauggagcgccagggcaagaccccgcuggggcugguggaccucuucgucuucuccaccagcuucuaccugaucuccaucuuccugcaccucgugaagauccccacccaccggcacaucgugggcaagagcugccccaagccccaccgccugaaccacauggggaucugcuccugcggccuguacaagcagccggggguccccgugaaguggaagcggugaggacuagucccuguucccagagcccacuuuuuuuucuuuuuuugaaauaaaauagccugucuuucagaucuaaaaaaaaaaaaaaaaaaaaaaaaaaaaaaaaaaaaaaaaaaaaaaaaaaaaaaaaaaaaaaaaaaaaaaaaaaaaaaaaaaaaaaaaaaaaaaaaaaaa

SEQ ID NO: 28508 - RNA, 1724 nt, Artificial Sequence
  mRNA product Design a-1 (A100) comprising derived and/or modified sequence from LASV(G1442-SLE-2011;Clade IV)__AIT17180__GPCmut5 (opt1)
aggagagucccgcagucggcguccagcggcucugcuuguucgugugugugucguugcaggccuuauucaagcuuaccaugggccagaucgugaccuucuuccaggaggucccccacgugaucgaggaggugaugaacaucguccugaucgcccucagcauccuggccgugcugaaggggcucuacaacguggcgaccugcggccugaucgggcuggucacguuccuccugcugugcggccgcuccugcaccaccacccucuacaaggggguguacgagcugcagacgcuggagcucaacauggagacccugaacaugaccaugccgcugagcugcaccaagaacaacucccaccacuacauccgggugggcaacgagacgggccucgagcugacccugaccaacaccagcaucaucaaccacaaguucugcaaccucuccgacgcccacaagaagaaccuguacgaccacgcccugaugagcaucaucuccacguuccaccucagcauccccaacuucaaccaguacgaggccauguccugcgacuucaacgggggcaagaucagcguccaguacaaccugucccacagcuacgccggggacgcggccaaccacugcggcaccguggccaacggggugcugcagaccuucaugcgcauggccuggggcggcuccuacaucgcgcucgacagcgggugcggcaacugggacugcaucaugaccuccuaccaguaccugaucauccagaacacgaccugggacgaccacugccaguucagccggcccucccccaucggguaccugggccuccugagccagcgcacccgggacgucuacaucucccgccggcugcucggcaccuucacguggacccugagcgacagcgaggggaaggacaccccgggcggguacugccugacccgcuggaugcucaucgaggccgagcugaagugcuucggcaacacggccguggccaagugcaacgagaagcacgacgaggaguucugcgacaugcugcggcuguucgacuucaacaagcaggccauccagcgccugaaggcgcccgcccagauguccauccagcugaucaacaaggccgugaacgcccucaucaacgaccagcugaucaugaagaaccaccuccgggacaucaugugcauccccuacugcaacuacagcaaguacugguaccucaacaacaccgccaccgggaagaccucccugcccaagugcuggcugaucagcaacggcuccuaccucaacgagacgcacuucagcgacgacaucgagcaggaggcggacaacaugaucaccgagaugcugcagaaggaguacauggagcgccagggcaagaccccgcuggggcuggucgaccucuucguguucuccaccagcuucuaccugaucuccaucuuccugcaccucgugaagauccccacgcaccggcacaucgucggcaagagcugccccaagccccaccgccugaaccacauggggaucugcuccugcggccuguacaagcagccgggggugcccgugcgguggaagcgcugaggacuagucccuguucccagagcccacuuuuuuuucuuuuuuugaaauaaaauagccugucuuucagaucuaaaaaaaaaaaaaaaaaaaaaaaaaaaaaaaaaaaaaaaaaaaaaaaaaaaaaaaaaaaaaaaaaaaaaaaaaaaaaaaaaaaaaaaaaaaaaaaaaaaa

SEQ ID NO: 28509 - RNA, 1724 nt, Artificial Sequence
  mRNA product Design a-1 (A100) comprising derived and/or modified sequence from LASV(G3010-SLE-2013;Clade IV)__AIT17344__GPCmut5 (opt1)
aggagagucccgcagucggcguccagcggcucugcuuguucgugugugugucguugcaggccuuauucaagcuuaccaugggccagaucgugaccuucuuccaggaggucccccacgugaucgaggaggugaugaacaucguccugaucgcccucagcauccuggccgugcugaaggggcucuacaacuucgcgaccugcggccugguggggcuggucacguuccuccugcugugcggccgcuccugcaccaccagccucuacaaggggguguacgagcugcagacccuggagcucaacauggagacgcugaacaugaccaugccgcuguccugcaccaagaacaacagccaccacuacaucauggugggcaacgagaccggccucgagcugacgcugaccaacaccuccaucaucaaccacaaguucugcaaccucagcgacgcccacaagaagaaccuguacaaccacgcccugauguccaucaucagcaccuuccaccucuccauccccaacuucaaccaguacgaggccaugagcugcgacuucaacgggggcaagaucuccguccaguacaaccugagccacuccuacgccggggacgcggccagccacugcggcacgguggccaacggggugcugcagaccuucaugcggauggccuggggcggcuccuacaucgcgcucgacagcgggugcggcaagugggacugcaucaugaccuccuaccaguaccugaucauccagaacaccacgugggaggaccacugccaguucagccgccccucccccaucggguaccugggccuccugagccagcggacccgcgacaucuacaucagccggcgccugcucggcaccuucaccuggacgcuguccgacagcgaggggaaggacaccccgggcggguacugccugacccgguggaugcucaucgaggccgagcugaagugcuucggcaacaccgccgucgccaagugcaacgagaagcacgacgaggaguucugcgacaugcugcgccucuucgacuucaacaagcaggccauccagcggcugaagacgcccgcgcagauguccauccagcugaucaacaaggccgugaacgcccucaucaacgaccagcugaucaugaagaaccaccuccgcgacaucaugugcauccccuacugcaacuacagcaaguacugguaccugaaccacaccaccaccgggaagacgucccugcccaagugcuggcuggugagcaacggcuccuaccucaacgagacccacuucagcgacgacaucgagcagcaggccgacaacaugaucaccgagaugcugcagaaggaguacauggagcggcagggcaagaccccgcuggggcuggucgaccucuucguguucuccacgagcuucuaccugaucuccaucuuccugcaccucgugaagauccccacccaccgccacaucgucggcaagagcugccccaagccccaccggcugaaccacauggggaucugcuccugcggccuguacaagcagccgggggugcccgugcgcuggaagcggugaggacuagucccuguucccagagcccacuuuuuuuucuuuuuuugaaauaaaauagccugucuuucagaucuaaaaaaaaaaaaaaaaaaaaaaaaaaaaaaaaaaaaaaaaaaaaaaaaaaaaaaaaaaaaaaaaaaaaaaaaaaaaaaaaaaaaaaaaaaaaaaaaaaaa

SEQ ID NO: 28510 - RNA, 1724 nt, Artificial Sequence
  mRNA product Design a-1 (A100) comprising derived and/or modified sequence from LASV(G502-SLE-2009;Clade IV)__AIT17126__GPCmut5 (opt1)
aggagagucccgcagucggcguccagcggcucugcuuguucgugugugugucguugcaggccuuauucaagcuuaccaugggccagaucgugaccuucuuccaggaggucccccacgugaucgaggaggugaugaacaucguccugaucgcccucagcauccuggccgugcugaaggggcucuacaacuucgcgaccugcggccugguggggcugcucacguuccugcugcucugcggccgcuccugcaccaccgggcuguacaagggcgucuacgagcugcagacccucgagcugaacauggagacgcugaacaugaccaugccgcucagcugcaccaagaacaacucccaccacuacaucauggugggcaacgagaccgggcuggagcugacgcucaccaacaccagcaucaucaaccacaaguucugcaaccuguccgacgcccacaagaagaaccuguacgaccacgcccucaugagcaucaucuccaccuuccaccugagcauccccaacuucaaccaguacgaggccauguccugcgacuucaacggcgggaagaucagcgugcaguacaaccugucccacagcuacgccggcgacgcggccgaccacugcgggacggucgccaacggcgugcuccagaccuucaugcggauggccuggggcggguccuacaucgcgcuggacagcggcugcgggcgcugggacugcaucaugaccuccuaccaguaccugaucauccagaacaccacgugggaggaccacugccaguucagccggcccucccccaucggcuaccucggccugcugagccagcgcacccgggacaucuacaucucccgccggcuccuggggaccuucaccuggacgcugagcgacagcgagggcaaggacacccccgggggcuacugccucacccgcuggaugcugaucgaggccgagcugaagugcuucgggaacaccgccguggccaagugcaacgagaagcacgacgaggaguucugcgacaugcuccggcuguucgacuucaacaagcaggccauccagcgccugaaggcgccggcccagauguccauccagcucaucaacaaggccgucaacgcccugaucaacgaccagcuggugaugaagaaccaccuccgggacaucaugugcauccccuacugcaacuacagccgcuacugguaccugaaccacacgaccaccggccggaccucccugcccaagugcuggcucgugagcaacggcuccuaccugaacgagacgcacuucagcgacgacaucgagcagcaggccgacaacaugaucaccgagaugcugcagaaggaguacauggagcgccaggggaagaccccgcugggccucgucgaccuguucguguucuccaccagcuucuaccugaucuccaucuuccuccaccuggugaagauccccacgcaccggcacaucgucggcaagagcugccccaagccccaccgccugaaccacauggggaucugcuccugcgggcucuacaagcagccgggcgugcccgugaaguggaagcggugaggacuagucccuguucccagagcccacuuuuuuuucuuuuuuugaaauaaaauagccugucuuucagaucuaaaaaaaaaaaaaaaaaaaaaaaaaaaaaaaaaaaaaaaaaaaaaaaaaaaaaaaaaaaaaaaaaaaaaaaaaaaaaaaaaaaaaaaaaaaaaaaaaaaa

SEQ ID NO: 28511 - RNA, 1724 nt, Artificial Sequence
  mRNA product Design a-1 (A100) comprising derived and/or modified sequence from LASV(G733-SLE-2010;Clade IV)__AIT17154__GPCmut5 (opt1)
aggagagucccgcagucggcguccagcggcucugcuuguucgugugugugucguugcaggccuuauucaagcuuaccaugggccagaucgugaccuucuuccaggaggucccccacgugaucgaggaggugaugaacaucguccugaucgcccucagcauccuggccgugcugaaggggcucuacaacuucgcgaccugcggcaucguggggcuggucuccuuccugcuccugugcggccgcagcugcacgaccucccuguacaaggggguguacgagcuccagacccuggagcugaacauggagacccucaacaugacgaugccgcugagcugcaccaagaacaacucccaccacuacaucauggugggcaacgagaccggccuggagcucacccugacgaacaccagcaucaucaaccacaaguucugcaaccuguccgacgcccacaagaagaaccucuacgaccacgcccugaugagcaucaucuccaccuuccaccugagcauccccaacuucaaccaguacgaggccauguccugcgacuucaacgggggcaagaucagcguccaguacaaccucucccacagcuacgccggggacgcggccaaccacugcggcaccaucgccaacggggugcugcagacguucaugcggauggccuggggcggcuccuacaucgcgcuggacagcgggugcgaccgcugggacugcaucaugaccuccuaccaguaccucaucauccagaacaccaccugggaggaccacugccaguucagccggcccucccccaucggcuaccuggggcugcucagccagcgcacgcgggacaucuacaucagccgccggcugcugggcaccuucaccuggacccucuccgacagcgagggcaaggacacgcccgggggcuacugccugacccgcuggaugcugaucgaggccgagcucaagugcuucgggaacaccgccguggccaagugcaacgagaagcacgacgaggaguucugcgacaugcugcggcuguucgacuucaacaagcaggccauccagcgccucaaggcgccggcccagauguccauccagcugaucaacaaggccgucaacgcccugaucaacgaccagcucaucaugaagaaccaccuccgggacaucaugugcauccccuacugcaacuacagcaaguacugguaccugaaccacaccacgaccggcaagaccucccugcccaagugcuggcuggugagcaacggguccuaccugaacgagacccacuucagcgacgacaucgagcagcaggccgacaacaugaucacggagaugcuccagaaggaguacauggagcgccagggcaagaccccgcugggccugguggaccuguucgucuucuccaccagcuucuaccucaucuccaucuuccugcaccuggugaagauccccacccaccggcacguggucggcaagagcugccccaagccccaccgccucaaccacauggggaucugcuccugcgggcuguacggccagccgggggugcccgugaaguggaagcggugaggacuagucccuguucccagagcccacuuuuuuuucuuuuuuugaaauaaaauagccugucuuucagaucuaaaaaaaaaaaaaaaaaaaaaaaaaaaaaaaaaaaaaaaaaaaaaaaaaaaaaaaaaaaaaaaaaaaaaaaaaaaaaaaaaaaaaaaaaaaaaaaaaaaa

SEQ ID NO: 28512 - RNA, 1724 nt, Artificial Sequence
  mRNA product Design a-1 (A100) comprising derived and/or modified sequence from MOPV/LASV reassortant(IGS-1;Clade IV)__AFY05576__GPCmut5 (opt1)
aggagagucccgcagucggcguccagcggcucugcuuguucgugugugugucguugcaggccuuauucaagcuuaccaugggccagaucgugaccuucuuccaggaggucccccacgugaucgaggaggugaugaacaucguccugaucgcccucagcgugcuggccgugcugaaggggcucuacaacuucgcgaccugcggccuggucgggcuggugacguuccuccugcugugcggccgcuccugcaccaccagccucuacaaggggguguacgagcugcagacccuggagcucaacauggagacgcugaacaugaccaugccgcuguccugcaccaagaacaacagccaccacuacaucauggucggcaacgagaccggccucgagcugacgcugaccaacaccuccaucaucaaccacaaguucugcaaccucagcgacgcccacaagaagaaccuguacgaccacgcccugauguccaucaucagcaccuuccaccucuccauccccaacuucaaccaguacgaggccaugagcugcgacuucaacgggggcaagaucuccgugcaguacaaccugagccacuccuacgccggggacgcggccaaccacugcggcacgguggccaacgggguccugcagaccuucaugcggauggccuggggcggcagcuacaucgcgcucgacuccgggugcggcaacugggacugcaucaugaccagcuaccaguaccugaucauccagaacaccacgugggaggaccacugccaguucucccgccccagccccaucggguaccugggccuccugucccagcggacccgcgacaucuacaucagccggcgccugcucggcaccuucaccuggacgcugagcgacuccgagggggaggacaccccgggcggguacugccugacccgguggaugcucaucgaggccgagcugaagugcuucggcaacaccgccguggccaagugcaacgagaagcacgacgaggaguucugcgacaugcugcgccucuucgacuucaacaagcaggccauccagcggcugaaggcgcccgcccagaugagcauccagcugaucaacaaggccgugaacgcccucaucaacgaccagcugaucaugaagaaccaccuccgcgacaucaugugcauccccuacugcaacuacuccaaguacugguaccugaaccacacgaccaccgggcggaccagccugcccaagugcuggcuggucuccaacggcagcuaccucaacgagacgcacuucuccgacgacaucgagcagcaggccgacaacaugaucaccgagaugcugcagaaggaguacauggagcgccagggcaagaccccgcuggggcugguggaccucuucguguucagcaccuccuucuaccugaucagcaucuuccugcaccucgucaagauccccacgcaccggcacaucgugggcaaguccugccccaagccccaccgccugaaccacauggggaucugcagcugcggccuguacaagcagccgggggugcccgucaaguggaagcggugaggacuagucccuguucccagagcccacuuuuuuuucuuuuuuugaaauaaaauagccugucuuucagaucuaaaaaaaaaaaaaaaaaaaaaaaaaaaaaaaaaaaaaaaaaaaaaaaaaaaaaaaaaaaaaaaaaaaaaaaaaaaaaaaaaaaaaaaaaaaaaaaaaaaa

SEQ ID NO: 28513 - RNA, 1724 nt, Artificial Sequence
  mRNA product Design a-1 (A100) comprising derived and/or modified sequence from LASV(LM765-SLE-2012;Clade IV)__AIT17814__GPCmut5 (opt1)
aggagagucccgcagucggcguccagcggcucugcuuguucgugugugugucguugcaggccuuauucaagcuuaccaugggccagaucgugaccuucuuccaggaggucccccacgugaucgaggaggugaugaacaucguccugaucgcccucagcauccuggccgugcugaaggggcucuacaacuucgcgaccugcggccugguggggcuggucacguuccuccugcugugcggccgcuccugcaccaccagccucuacaaggggguguacgagcugcagacccuggagcucaacauggagacgcugaacaugaccaugccgcuguccugcaccaagaacaacagccaccacuacaucauggugggcaacgagaccggccucgagcugacgcugaccaacaccuccaucaucgaccacaaguucugcaaccucagcgacgcccaccggaagaaccuguacgaccacgcccugauguccaucaucagcaccuuccaccucuccauccccaacuucaaccaguacgaggccaugagcugcgacuucaacgggggcaagaucuccguccaguacaaccugagccacuccuacgccaaggacgcggccgaccacugcgggacgguggccaacggcgugcugcagaccuucaugcgcauggccuggggcgggagcuacaucgcgcucgacuccggcugcgggcggugggacugcaucaugaccagcuaccaguaccugaucauccagaacaccacgugggaggaccacugccaguucucccgccccagccccaucggcuaccuggggcuccugucccagcggacccgcgacaucuacaucagccggcgccugcucggcaccuucaccuggacgcugagcgacuccgagggcaaggacacccccgggggcuacugccugacccgguggaugcucaucgaggccgagcugaagugcuucgggaacaccgccgucgccaagugcaacgagaagcacgacgaggaguucugcgacaugcugcgccucuucgacuucaacaagcaggccauccagcggcugaaggcgccggcccagaugagcauccagcugaucaacaaggccgugaacgcccucaucaacgaccagcugaucaugaagaaccaccuccgcgacaucaugugcauccccuacugcaacuacuccaaguacugguaccugaaccacacgaccaccggcaagaccagccugcccaagugcuggcugguguccaacgggagcuaccucaacgagacgcacuucuccgacgacaucgagcagcaggccgacaacaugaucaccgagaugcugcagaaggaguacauggagcggcagggcaagaccccgcugggccuggucgaccucuucguguucagcaccuccuucuaccugaucagcaucuuccugcaccucgugaagauccccacgcaccgccacaucgucgggaagcccugccccaagccgcaccggcugaaccacaugggcaucugcuccugcgggcuguacaagcagcccggcgugcccgugaaguggaagcgcugaggacuagucccuguucccagagcccacuuuuuuuucuuuuuuugaaauaaaauagccugucuuucagaucuaaaaaaaaaaaaaaaaaaaaaaaaaaaaaaaaaaaaaaaaaaaaaaaaaaaaaaaaaaaaaaaaaaaaaaaaaaaaaaaaaaaaaaaaaaaaaaaaaaaa

SEQ ID NO: 28514 - RNA, 1724 nt, Artificial Sequence
  mRNA product Design a-1 (A100) comprising derived and/or modified sequence from LASV(LM776-SLE-2012;Clade IV)__AIT17824__GPCmut5 (opt1)
aggagagucccgcagucggcguccagcggcucugcuuguucgugugugugucguugcaggccuuauucaagcuuaccaugggccagaucgugaccuucuuccaggaggucccccacgugaucgaggaggugaugaacaucguccugaucgcccucagcauccuggccgugcugaaggggcucuacaacuucgcgaccugcggccugguggggcuggucacguuccuccugcugugcggccgcuccugcaccaccagcguguacaaggggguguacgagcuccagacccuggagcugaacauggagacgcucaacaugaccaugccgcuguccugcaccaagaacaacagccaccacuacaucauggucggcaacgagaccggccuggagcucacgcugaccaacaccuccaucaucaaccacaaguucugcaaccugagcgacgcccacaagaagaaccucuacgaccacgcccugauguccaucaucagcaccuuccaccuguccauccccaacuucaaccaguacgaggccaugagcugcgacuucaacgggggcaagaucuccgugcaguacaaccucagccacuccuacgccggggacgcggccaaccacugcggcacgguggccaacgggguccugcagaccuucaugcggauggccuggggcggcagcuacaucgcgcuggacuccgggugcggcaagugggacugcaucaugaccagcuaccaguaccucaucauccagaacaccacgugggaggaccacugccaguucucccgccccagccccaucggguaccugggccugcucucccagcggacccgcgacaucuacaucagccggcgccugcugggcaccuucaccuggacgcucagcgacuccgaggggaaggacaccccgggcggguacugccugacccgguggaugcugaucgaggccgagcucaagugcuucggcaacaccgccguggccaagugcaacgagaagcacgacgaggaguucugcgacaugcugcgccuguucgacuucaacaagcaggccauccagcggcucaaggcgcccgcccagaugagcauccagcugaucaacaaggccgugaacgcccugaucaacgaccagcucaucaugaagaaccaccuccgcgacaucaugugcauccccuacugcaacuacuccaaguacugguaccugaaccacacgaccaccgggaagaccagccugcccaagugcuggcuggucuccaacggcagcuaccugaacgagacgcacuucuccgacgacaucgagcagcaggccgacaacaugaucaccgagaugcuccagaaggaguacauggagcggcagggcaagaccccgcuggggcugguggaccuguucguguucagcaccuccuucuaccucaucagcaucuuccugcaccuggucaagauccccacgcaccgccacaucgugggcaaguccugccccaagccccaccggcucaaccacauggggaucugcagcugcggccuguacaagcagccgggggugcccguccgcuggaagcggugaggacuagucccuguucccagagcccacuuuuuuuucuuuuuuugaaauaaaauagccugucuuucagaucuaaaaaaaaaaaaaaaaaaaaaaaaaaaaaaaaaaaaaaaaaaaaaaaaaaaaaaaaaaaaaaaaaaaaaaaaaaaaaaaaaaaaaaaaaaaaaaaaaaaa

SEQ ID NO: 28515 - RNA, 1724 nt, Artificial Sequence
  mRNA product Design a-1 (A100) comprising derived and/or modified sequence from LASV(Mad39;Clade IV)__ANH09722__GPCmut5 (opt1)
aggagagucccgcagucggcguccagcggcucugcuuguucgugugugugucguugcaggccuuauucaagcuuaccaugggccagaucgugaccuucuuccaggaggucccccacgugaucgaggaggugaugaacaucguccugaucgcccucagcauccuggccgugcugaaggggcucuacaacguggcgaccugcggccugaucgggcuggucacguuccuccugcugugcggccgcuccugcaccaccacccucuacaaggggguguacgagcugcaggcccuggagcucaacauggagacgcugaacaugaccaugccgcugagcugcaccaagaacaacucccaccacuacauccgggugggcaacgagaccggccucgagcugacgcugaccaacaccagccucaucaaccacaaguucugcaaccuguccgacgcccacaagaagaaccuguacgaccacgcccucaugagcaucaucuccaccuuccaccugagcauccccaacuucaaccaguacgaggccauguccugcgacuucaacgacgggaagaucagcguccaguacaaccugucccacacguacgcgggcgacaccgccaaccacugcgggaccguggccaacggcgugcuccagaccuucaugcgcauggccuggggcgggagcuacaucgcgcuggacuccggcugcgggggcugggacugcaucaugacgagcuaccaguaccugaucauccagaacaccaccugggaggaccacugccaguucucccggcccagccccaucggguaccucggccugcugucccagcgcacccgggacaucuacaucagccgccggcuccugggcacguucaccuggacccuguccgacagcgaggggaaggacaccccgggcggguacugccucacgcgcuggaugcugaucgaggccgagcugaagugcuucggcaacaccgccgucgccaagugcaacgagaagcacgacgaggaguucugcgacaugcuccggcuguucgacuucaacaagcaggccauccagcgccugaaggcgcccgcccagaugagcauccagcucaucaacaaggccgugaacgcccugaucaacgaccagcugaucaugaagaaccaccuccgggacaucaugugcauccccuacugcaacuacuccaaguacugguaccugaaccacaccgugaccgggaagacgagccugcccaagugcuggcucgucuccaacggcagcuaccugaacgagacccacuucuccgacgacaucgagcagcaggccgacaacaugaucaccgagaugcugcagaaggaguacauggagcgccagggcaagaccccgcuggggcucguggaccuguucguguucagcacguccuucuaccugaucagcaucuuccuccaccuggucaagauccccacccaccggcacguggugggcaagcccugccccaagccgcaccgccugaaccacauggggaucugcuccugcggcuucuacaagcagcccgggguccccgugcgguggaagcgcugaggacuagucccuguucccagagcccacuuuuuuuucuuuuuuugaaauaaaauagccugucuuucagaucuaaaaaaaaaaaaaaaaaaaaaaaaaaaaaaaaaaaaaaaaaaaaaaaaaaaaaaaaaaaaaaaaaaaaaaaaaaaaaaaaaaaaaaaaaaaaaaaaaaaa

SEQ ID NO: 28516 - RNA, 1724 nt, Artificial Sequence
  mRNA product Design a-1 (A100) comprising derived and/or modified sequence from LASV(Z0947-SLE-2011;Clade IV)__AIT17840__GPCmut5 (opt1)
aggagagucccgcagucggcguccagcggcucugcuuguucgugugugugucguugcaggccuuauucaagcuuaccaugggccagaucgugaccuucuuccaggaggucccccacgugaucgaggaggugaugaacaucguccugaucgcccucagcauccuggccgugcugaaggggcucuacaacuucgcgaccugcggccugguggggcuggucacguuccuccugcugugcggccgcuccugcaccaucagccucuacaaggggguguacgagcugcagacccuggagcucaacauggagacccugaacaugacgaugccgcuguccugcaccaagaacaacagccaccacuacaucauggugggcaacgagaccggccucgagcugacccugacgaacaccuccaucaucaaccacaaguucugcaaccucagcgacgcccacaagaagaaccuguacgaccacgcccugauguccaucaucagcaccuuccaccucuccauccccaacuucaaccaguacgaggccaugagcugcgacuucaacgggggcaagaucuccguccaguacaaccugagccacuccuacgccggggacgcggccaaccacugcggcaccguggccaacggggugcugcagacguucaugcggauggccuggggcggcagcuacaucgcgcucgacuccgggugcgaccgcugggacugcaucaugaccagcuaccaguaccugaucauccagaacaccaccugggaggaccacugccaguucucccggcccagccccaucggcuaccuggggcuccugucccagcgcacgcgggacaucuacaucagccgccggcugcucggcaccuucaccuggacccugagcgacuccgagggcaaggacacgcccgggggcuacugccugacccgcuggaugcucaucgaggccgagcugaagugcuucgggaacaccgccgucgccaagugcaacgagaagcacgacgaggaguucugcgacaugcugcggcuguucgacuucaacaagcaggccauccagcgccugaaggcgccggcccagaugagcauccagcugaucaacaaggccgugaacgcccucaucaacgaccagcugaucaugaagaaccaccuccgggacaucaugugcauccccuacugcaacuacuccaaguacugguaccucaaccacaccacgaccggcaagaccagccugcccaagugcuggcugguguccaacgggagcuaccucaacgagacccacuucuccgacgacaucgagcagcaggccgacaacaugaucacggagaugcugcagaaggaguacauggagcgccagggcaagaccccgcugggccuggucgaccucuucguguucagcaccuccuucuaccugaucagcaucuuccugcaccucgugaagauccccacccaccggcacaucgucgggaagcccugccccaagccgcaccgccugaaccacaugggcaucugcuccugcgggcuguacaagcagcccggcgugcccgugaaguggaagcggugaggacuagucccuguucccagagcccacuuuuuuuucuuuuuuugaaauaaaauagccugucuuucagaucuaaaaaaaaaaaaaaaaaaaaaaaaaaaaaaaaaaaaaaaaaaaaaaaaaaaaaaaaaaaaaaaaaaaaaaaaaaaaaaaaaaaaaaaaaaaaaaaaaaaa

SEQ ID NO: 28517 - RNA, 1724 nt, Artificial Sequence
  mRNA product Design a-1 (A100) comprising derived and/or modified sequence from LASV(Josiah;Clade IV)__NP_694870__GPCmut5 (opt4)
aggagagucccgcagucggcguccagcggcucugcuuguucgugugugugucguugcaggccuuauucaagcuuaccaugggccagaucgugaccuucuuccaggaggugccccacgugaucgaggaggugaugaacaucgugcugaucgcccugagcgugcuggccgugcugaagggccuguacaacuucgccaccugcggccuggugggccuggugaccuuccugcugcugugcggcagaagcugcaccaccagccuguacaagggcguguacgagcugcagacccuggagcugaacauggagacccugaacaugaccaugccccugagcugcaccaagaacaacagccaccacuacaucauggugggcaacgagaccggccuggagcugacccugaccaacaccagcaucaucaaccacaaguucugcaaccugagcgacgcccacaagaagaaccuguacgaccacgcccugaugagcaucaucagcaccuuccaccugagcauccccaacuucaaccaguacgaggccaugagcugcgacuucaacggcggcaagaucagcgugcaguacaaccugagccacagcuacgccggcgacgccgccaaccacugcggcaccguggccaacggcgugcugcagaccuucaugagaauggccuggggcggcagcuacaucgcccuggacagcggcugcggcaacugggacugcaucaugaccagcuaccaguaccugaucauccagaacaccaccugggaggaccacugccaguucagcagacccagccccaucggcuaccugggccugcugagccagagaaccagagacaucuacaucagcagaagacugcugggcaccuucaccuggacccugagcgacagcgagggcaaggacacccccggcggcuacugccugaccagauggaugcugaucgaggccgagcugaagugcuucggcaacaccgccguggccaagugcaacgagaagcacgacgaggaguucugcgacaugcugagacuguucgacuucaacaagcaggccauccagagacugaaggcccccgcccagaugagcauccagcugaucaacaaggccgugaacgcccugaucaacgaccagcugaucaugaagaaccaccugagagacaucaugugcauccccuacugcaacuacagcaaguacugguaccugaaccacaccaccaccggcagaaccagccugcccaagugcuggcuggugagcaacggcagcuaccugaacgagacccacuucagcgacgacaucgagcagcaggccgacaacaugaucaccgagaugcugcagaaggaguacauggagagacagggcaagaccccccugggccugguggaccuguucguguucagcaccagcuucuaccugaucagcaucuuccugcaccuggugaagauccccacccacagacacaucgugggcaagagcugccccaagccccacagacugaaccacaugggcaucugcagcugcggccuguacaagcagcccggcgugcccgugaaguggaagagaugaggacuagucccuguucccagagcccacuuuuuuuucuuuuuuugaaauaaaauagccugucuuucagaucuaaaaaaaaaaaaaaaaaaaaaaaaaaaaaaaaaaaaaaaaaaaaaaaaaaaaaaaaaaaaaaaaaaaaaaaaaaaaaaaaaaaaaaaaaaaaaaaaaaaa

SEQ ID NO: 28518 - RNA, 1721 nt, Artificial Sequence
  mRNA product Design a-1 (A100) comprising derived and/or modified sequence from LASV(LP;Clade I)__AAF86701__GPCmut5 (opt4)
aggagagucccgcagucggcguccagcggcucugcuuguucgugugugugucguugcaggccuuauucaagcuuaccaugggccagaucaucaccuucuuccaggaggugccccacgugaucgaggaggugaugaacaucgugcugaucgcccugagccugcuggccauccugaagggccuguacaacaucgccaccugcggcaucaucggccugguggccuuccuguuccugugcggcaagagcugcagccugacccugaagggcggcuacgagcugcagacccuggagcugaacauggagacccugaacaugaccaugccccugagcugcaccaagaacagcagccaccacuacaucagagugggcaacgagaccggccuggagcugacccugaccaacaccagcaucaucaaccacaaguucugcaaccugagcgacgcccacaagaagaaccuguacgaccacgcccugaugagcaucaucagcaccuuccaccugagcauccccaacuucaaccaguacgaggccaugagcugcgacuucaacggcggcaagaucagcgugcaguacaaccugagccacagcuacgccggcgacgccgccgagcacugcggcaccguggccaacggcgugcugcagaccuucaugagaauggccuggggcggcagauacaucgcccuggacagcggcugcggcaacugggacugcaucaugaccagcuaccaguaccugaucauccagaacaccaccugggaggaccacugccaguucagcagacccagccccaucggcuaccugggccugcugagccagagaaccagagacaucuacaucagcagaagacugcugggcaccuucaccuggacccugagcgacagcgagggcaacgagacccccggcggcuacugccugaccagauggaugcugaucgaggccgagcugaagugcuucggcaacaccgccguggccaagugcaacgagaagcacgacgaggaguucugcgacaugcugagacuguucgacuucaacaagcaggccaucagaagacugaaggcccccgcccagaugagcauccagcugaucaacaaggccgugaacgcccugaucaacgaccagcugaucaugaagaaccaccugagagacaucaugugcauccccuacugcaacuacagcaaguacugguaccugaaccacaccagcagcggcagaaccagccugcccaagugcuggcugaucagcaacggcagcuaccugaacgagacccaguucagcgacgacaucgagcagcaggccgacaacaugaucaccgagaugcugcagaaggaguacaucgagagacagggcaagaccccccugggccugguggacaucuucaucuucagcaccagcuucuaccugaucagcaucuuccugcaccugaucaagauccccacccacagacacaucgugggcaagcccugccccaagccccacagacugaaccacaugggcgugugcagcugcggccuguacaagcaccccggcgugcccaccaaguggaagagaugaggacuagucccuguucccagagcccacuuuuuuuucuuuuuuugaaauaaaauagccugucuuucagaucuaaaaaaaaaaaaaaaaaaaaaaaaaaaaaaaaaaaaaaaaaaaaaaaaaaaaaaaaaaaaaaaaaaaaaaaaaaaaaaaaaaaaaaaaaaaaaaaaaaaa

SEQ ID NO: 28519 - RNA, 1721 nt, Artificial Sequence
  mRNA product Design a-1 (A100) comprising derived and/or modified sequence from LASV(803213;Clade II)__AAF86703__GPCmut5 (opt4)
aggagagucccgcagucggcguccagcggcucugcuuguucgugugugugucguugcaggccuuauucaagcuuaccaugggccagaucaucaccuucuuccaggaggugccccacgugaucgaggaggugaugaacaucgugcugaucgcccugagccugcuggccauccugaagggcaucuacaacguggccaccugcggccuguucggccugaucagcuuccugcugcugugcggcagaagcugcagcgugaccuacaagggcguguacgagcugcagacccuggagcugaacauggccaaccugaacaugaccaugccccugagcugcaccaagaacaacagccaccacuacaucauggugggcaacgagaccggccuggagcugacccugaccaacaccagcaucaucaaccacaaguucugcaaccugagcgacgcccacaagaagaaccuguacgaccacgcccugaugagcaucaucagcaccuuccaccugagcauccccaacuucaaccaguacgaggccaugagcugcgacuucaacggcggcaagaucagcgugcaguacaaccugagccacagcuucgccguggacgccgccaaccacugcggcaccaucgccaacggcgugcugcagaccuucaugagaauggccuggggcggcagcuacaucgcccuggacagcggcugcggcaacugggacugcaucaugaccagcuaccaguaccugaucauccagaacaccaccugggaggaccacugccaguucagcagacccagccccaucggcuaccugggccugcugagccagagaaccagagacaucuacaucagcagaagacugcugggcaccuucaccuggacccugagcgacagcgagggcaacgaggcccccggcggcuacugccugaccagauggaugcugaucgaggccgagcugaagugcuucggcaacaccgccguggccaagugcaacgagaagcacgacgaggaguucugcgacaugcugagacuguucgacuucaacaagcaggccaucaagagacugaagacccccgcccagaugagcauccagcugaucaacaaggccgugaacgcccugaucaacgaccagcugaucaugaagaaccaccugagagacaucaugugcauccccuacugcaacuacagcagauacugguaccugaaccacaccgugaccggcaagaccagccugcccagaugcuggcuggugagcaacggcagcuaccugaacgagacccacuucagcgacgacaucgagcagcaggccgacaacaugaucaccgagaugcugcagaaggaguacauggacagacagggcaagaccccccugggccugguggaccuguucguguucagcaccagcuucuaccugaucagcaucuuccugcaccuggugaagauccccacccacagacacaucgugggcaagcccugccccaagccccacagacugaaccacaugggcaucugcagcugcggccuguacaagcaccccggcgugcccgugaaguggaagagaugaggacuagucccuguucccagagcccacuuuuuuuucuuuuuuugaaauaaaauagccugucuuucagaucuaaaaaaaaaaaaaaaaaaaaaaaaaaaaaaaaaaaaaaaaaaaaaaaaaaaaaaaaaaaaaaaaaaaaaaaaaaaaaaaaaaaaaaaaaaaaaaaaaaaa

SEQ ID NO: 28520 - RNA, 1721 nt, Artificial Sequence
  mRNA product Design a-1 (A100) comprising derived and/or modified sequence from LASV(GA391;Clade III)__CAA36645__GPCmut5 (opt4)
aggagagucccgcagucggcguccagcggcucugcuuguucgugugugugucguugcaggccuuauucaagcuuaccaugggccagaucgugaccuucuuccaggaggugccccacgugaucgaggaggugaugaacaucgugcugaucgcccugagcauccuggccauccugaagggccuguacaacguggccaccugcggccugaucggccuggugaccuuccugcugcugagcggcagaagcugcagccugaucuacaagggcaccuacgagcugcagacccuggagcugaacauggagacccugaacaugaccaugccccugagcugcaccaagaacaacagccaccacuacaucagagugggcaacgagaccggccuggagcugacccugaccaacaccagcauccugaaccacaaguucugcaaccugagcgacgcccacaagagaaaccuguacgaccacagccugaugagcaucaucagcaccuuccaccugagcauccccaacuucaaccaguacgaggccaugagcugcgacuucaacggcggcaagaucaccgugcaguacaaccugagccacagcuucgccguggacgccgccggccacugcggcacccuggccaacggcgugcugcagaccuucaugagaauggccuggggcggcagcuacaucgcccuggacagcggcugcggcaacugggacugcaucaugaccagcuaccaguaccugaucauccagaacaccaccugggacgaccacugccaguucagcagacccagccccaucggcuaccugggccugcugagccagagaaccagagacaucuacaucagcagaagacugcugggcaccuucaccuggacccugagcgacagcgagggcaacgagacccccggcggcuacugccugaccagauggaugcugaucgaggccgagcugaagugcuucggcaacaccgccguggccaagugcaacgagaagcacgacgaggaguucugcgacaugcugagacuguucgacuucaacaagcaggccaucagaagacugaagacccccgcccagaugagcauccagcugaucaacaaggccgugaacgcccugaucaacgaccagcugaucaugaagaaccaccugagagacaucaugugcauccccuacugcaacuacagcagauacugguaccugaaccacaccagcaccggcaagaccagccugcccagaugcuggcugaucagcaacggcagcuaccugaacgagaccaaguucagcgacgacaucgagcagcaggccgacaacaugaucaccgagaugcugcagaaggaguacaucgacagacagggcaagaccccccugggccugguggaccuguucguguucagcaccagcuucuaccugaucagcaucuuccugcaccuggugaagauccccacccacagacacaucgugggcaagcccugccccaagccccacagacugaaccacaugggcaucugcagcugcggccuguacaagcagcccggcgugcccgugagauggaagagaugaggacuagucccuguucccagagcccacuuuuuuuucuuuuuuugaaauaaaauagccugucuuucagaucuaaaaaaaaaaaaaaaaaaaaaaaaaaaaaaaaaaaaaaaaaaaaaaaaaaaaaaaaaaaaaaaaaaaaaaaaaaaaaaaaaaaaaaaaaaaaaaaaaaaa

SEQ ID NO: 28521 - RNA, 1724 nt, Artificial Sequence
  mRNA product Design a-1 (A100) comprising derived and/or modified sequence from LASV(AV;Clade V)__CCA30314__GPCmut5 (opt4)
aggagagucccgcagucggcguccagcggcucugcuuguucgugugugugucguugcaggccuuauucaagcuuaccaugggccagaucgugaccuucuuccaggaggugccccacgugaucgaggaggugaugaacaucgugcugaucgcccugagcauccuggccgugcugaagggccuguacaacaucgccaccugcggccugaucggccugaucaccuuccugcugcugugcggcagaagcugcagcagcaaccuguacaagggcguguacgagcugcagagccuggaccugaacauggagacccugaacaugaccaugccccugagcugcaccaagaacaacagccaccacuacaucagagugggcaacgacaccggccuggagcugacccugaccaacaccagcauccugaaccacaaguucugcaaccugagcgacgcccacaagaaggaccuguacgaccacgcccugaugagcaucaucagcaccuuccaccugagcauccccaacuucaaccaguacgaggccaugagcugcgacuucaacggcggcaagaucagcgugcaguacaaccugagccacagcuacgccaucgacgccgccaaccacugcggcaccguggccaacggcauccugcagaccuucaugagaauggccuggggcggcagcuacaucgcccuggacagcggcugcggcaacugggacugcaucaugaccagcuaccaguaccugaucauccagaacaccaccugggagaaccacugccaguucagcagacccagccccaucggcuaccugggccugcugagccagagaaccagagacaucuacaucagcagaagacugcugggcaccuucaccuggacccugagcgacagcgagggcaacgccacccccggcggcuacugccugaccagauggaugcugaucgaggccgagcugaagugcuucggcaacaccgccguggccaagugcaacgagaagcacgacgaggaguucugcgacaugcugagacuguucgacuucaacaagcaggccaucagcagacugaagagccccgcccagaugagcauccagcugaucaacaaggccgugaacgcccugaucaacgaccagcugaucaugaagaaccaccugagagacaucaugugcauccccuacugcaacuacagcaaguacugguaccugaaccacaccaucaccggcaagaccagccugcccaagugcuggcuggugagcaacggcagcuaccugaacgagacccacuucagcgacgacaucgagcagcaggccgacaacaugaucaccgagaugcugcagaaggaguacauggagagacagggcaagaccccccugggccugguggaccuguucguguucagcaccagcuucuaccugaucagcaucuuccugagacuggugaagauccccacccacagacacaucgugggcaagcccugccccaagccccacagacugaaccacaugggcaucugcagcugcggccuguacaagcagcccggcgugcccgugagauggaagagaugaggacuagucccuguucccagagcccacuuuuuuuucuuuuuuugaaauaaaauagccugucuuucagaucuaaaaaaaaaaaaaaaaaaaaaaaaaaaaaaaaaaaaaaaaaaaaaaaaaaaaaaaaaaaaaaaaaaaaaaaaaaaaaaaaaaaaaaaaaaaaaaaaaaaa

SEQ ID NO: 28522 - RNA, 1721 nt, Artificial Sequence
  mRNA product Design a-1 (A100) comprising derived and/or modified sequence from LASV(Togo/2016/7082;Clade VI)__AMR44577__GPCmut5 (opt4)
aggagagucccgcagucggcguccagcggcucugcuuguucgugugugugucguugcaggccuuauucaagcuuaccaugggccagaucaucaccuucuuccaggaggugccccacgugaucgaggaggugaugaacaucgugcugaucgcccugagccugcuggccauccugaagggcguguacaacguggccaccugcggcaucaucggccuggugaccuuccuguuccugugcggcagaagcugcagccugaucuacaagggcagcuacgagcugcagacccuggagcugaacauggagacccugaacaugaccaugccccugagcugcaccaagaacagcagccaccacuacaucagagugggcaacgagaccggccuggagcugacccugaccaacaccagcaucaucaaccacaaguucugcaaccugagcgacgcccacaagagaaaccuguacgaccacgcccugaugagcauccugagcaccuuccaccugagcauccccaacuucaaccaguacgaggccaugagcugcgacuucaacggcggcaagaucagcgugcaguacaaccugagccacgccuacgccguggacgccgccgagcacugcggcaccguggccaacggcgugcugcagaccuucaugagaauggccuggggcggcagcuacaucgcccuggacagcggcugcggcaacugggacugcaucaugaccagcuaccaguaccugaucauccagaacaccaccugggaggaccacugccaguucagcagacccagccccaucggcuaccugggccugcugagccagagaaccagagacaucuacaucagcagaagacugcugggcaccuucaccuggacccugagcgacagcgagggcaacgagacccccggcggcuacugccugaccagauggaugcugaucgaggccgagcugaagugcuucggcaacaccgccguggccaagugcaacgagaagcacgacgaggaguucugcgacaugcugagacuguucgacuucaacaagcaggccauccagagacugaagagccccgcccagaugagcauccagcugaucaacaaggccgugaacgcccugaucaacgaccagcugaucaugaagaaccaccugagagacaugaugugcauccccuacugcaacuacagcaaguacugguaccugaaccacaccagcagcggcagaaccagccugcccaagugcuggcuggugagcaacggcagcuaccugaacgagacccacuucagcgacgacaucgagcagcaggccgacaacaugaucaccgagaugcugcagaaggaguacaucgacagacagggcaagaccccccugggccugguggaccuguucguguucagcaccagcuucuaccugaucagcaucuuccugcaccugaucaagauccccacccacagacacaucgugggcaagcccugccccaagccccacagacugaaccacaugggcaucugcagcugcggccuguacaagcagcccggcgugcccaccagauggaagagaugaggacuagucccuguucccagagcccacuuuuuuuucuuuuuuugaaauaaaauagccugucuuucagaucuaaaaaaaaaaaaaaaaaaaaaaaaaaaaaaaaaaaaaaaaaaaaaaaaaaaaaaaaaaaaaaaaaaaaaaaaaaaaaaaaaaaaaaaaaaaaaaaaaaaa

SEQ ID NO: 28523 - RNA, 1721 nt, Artificial Sequence
  mRNA product Design a-1 (A100) comprising derived and/or modified sequence from LASV(KAK-428;Clade n.d. (VII))__ANH09740__GPCmut5 (opt4)
aggagagucccgcagucggcguccagcggcucugcuuguucgugugugugucguugcaggccuuauucaagcuuaccaugggccagaucgugaccuucuuccaggaggugccccacgugaucgaggaggugaugaacaucgugcugaucgcccugagccugcuggccauccugaagggccuguacaacuucgccaccugcggcgugaucggccugaucaccuuccugcugcugugcggcagaagcugcagcgccaccuacaagggccaguacgagcugcagacccuggagcugaacauggagagccugaacaugaccaugccccugagcugcaccaagaacaacagccaccacuacaucagagccggcaacaacaccggccuggagcugacccugaccaacaccagcaucaucagccacaaguucugcaaccugagcgacgcccacaagaagaaccuguacgaccacacccugaugagcaucaucaccaccuuccaccugagcauccccaacuucaaccaguacgaggccaugagcugcgacuucaacggcggcaagaucagcauccaguacaaccugagccacagcuacgccggcgacgccgcccagcacugcggcaccguggccaacggcgugcugcagaccuucaugagaauggccuggggcggcagcuaccuggcccuggacagcggcugcagaggcugggacugcaucaucagcagcuaccaguaccugaucauccagaacaccaccugggacgaccacugccaguucagcagacccagccccaucggcuaccugggcuucgugagccagaagaccagagacaucuacaucagcagaagacugcugggcaccuucaccuggacccugagcgacagcgagggccacgacaugcccggcggcuacugccugaccagauggaugcugaucgaggccgaccugaagugcuucggcaacaccgccguggccaagugcaacgagaagcacgacgaggaguucugcgacauguggagacuguucgacuucaacaagcaggccauccagagacugaaggcccccgcccagaugaacauccagcugaucaacaaggccgugaacgcccugaucaacgaccagcugaugaugaagaaccaccugagagacaucaugugcauccccuacugcaacuacagcaaguucugguaccugaacaacaccaccaccggcagaaccagccugcccagaugcuggcugaucagcaacggcagcuaccugaacgagacccacuucagcgacgacaucgagcagcaggccgacaacaugaucaccgagaugcugcagaaggaguacauggacagacagggcaagaccccccugggccugguggaccuguucguguucagcaccagcuucuaccugaucaccaucuuccugcaccuggugaagauccccacccacagacacaucgugggcaagcccugccccaagccccacagacugaaccacaugggcaucugcagcugcggccuguacaagcagcccggcgugcccgugagauggaagagaugaggacuagucccuguucccagagcccacuuuuuuuucuuuuuuugaaauaaaauagccugucuuucagaucuaaaaaaaaaaaaaaaaaaaaaaaaaaaaaaaaaaaaaaaaaaaaaaaaaaaaaaaaaaaaaaaaaaaaaaaaaaaaaaaaaaaaaaaaaaaaaaaaaaaa

SEQ ID NO: 28524 - RNA, 1721 nt, Artificial Sequence; identical to SEQ ID NO: 28518
  mRNA product Design a-1 (A100) comprising derived and/or modified sequence from LASV(Pinneo-NIG-1969;Clade I)__AIT17836__GPCmut5 (opt4)

SEQ ID NO: 28525 - RNA, 1721 nt, Artificial Sequence
  mRNA product Design a-1 (A100) comprising derived and/or modified sequence from LASV(ISTH0009-NIG-2011;Clade II)__AIT17404__GPCmut5 (opt4)
aggagagucccgcagucggcguccagcggcucugcuuguucgugugugugucguugcaggccuuauucaagcuuaccaugggccagaucaucaccuucuuccaggaggugccccacgugaucgaggaggugaugaacaucgugcugaucgcccugagccugcuggccauccugaagggcaucuacaacguggccaccugcggccuguucggccuggugagcuuccugcugcugugcggcagaagcugcagcaccaccuacaagggcguguacgagcugcagacccuggagcuggacauggccagccugaacaugaccaugccccugagcugcaccaagaacaacagccaccacuacaucauggugggcaacgagaccggccuggagcugacccugaccaacaccagcaucaucaaccacaaguucugcaaccugagcgacgcccacaagaagaaccuguacgaccacgcccugaugagcaucaucagcaccuuccaccugagcauccccaacuucaaccaguacgaggccaugagcugcgacuucaacggcggcaagaucagcgugcaguacaaccugagccacgccuacgccguggacgccgccaaccacugcggcaccaucgccaacggcgugcugcagaccuucaugagaauggccuggggcggcagcuacaucgcccuggacagcggcugcggcagcugggacugcaucaugaccagcuaccaguaccugaucauccagaacaccaccugggaggaccacugccaguucagcagacccagccccaucggcuaccugggccugcugagccagagaaccagagacaucuacaucagcagaagacugcugggcaccuucaccuggacccugagcgacagcgagggcaacgagacccccggcggcuacugccugaccagauggaugcugaucgaggccgagcugaagugcuucggcaacaccgccguggccaagugcaacgagaagcacgacgaggaguucugcgacaugcugagacuguucgacuucaacaagcaggccaucagaagacugaagacccccgcccagaugagcauccagcugaucaacaaggccgugaacgcccugaucaacgaccagcugaucaugaagaaccaccugagagacaucaugugcauccccuacugcaacuacagcaaguacugguaccugaaccacaccgugaccggcaagaccagccugcccagaugcuggcuggugagcaacggcagcuaccugaacgagacccacuucagcgacgacaucgagcagcaggccgacaacaugaucaccgagcugcugcagaaggaguacauggacagacagggcaagaccccccugggccugguggaccuguucguguucagcaccagcuucuaccugaucagcaucuuccugcaccugaucaagauccccacccacagacacaucaccggcaagcccugccccaagccccacagacugaaccacaugggcaucugcagcugcggccuguacaagcaccccggcgugcccgugaaguggaagagaugaggacuagucccuguucccagagcccacuuuuuuuucuuuuuuugaaauaaaauagccugucuuucagaucuaaaaaaaaaaaaaaaaaaaaaaaaaaaaaaaaaaaaaaaaaaaaaaaaaaaaaaaaaaaaaaaaaaaaaaaaaaaaaaaaaaaaaaaaaaaaaaaaaaaa

SEQ ID NO: 28526 - RNA, 1721 nt, Artificial Sequence
  mRNA product Design a-1 (A100) comprising derived and/or modified sequence from LASV(ISTH2010-NIG-2012;Clade II)__AIT17482__GPCmut5 (opt4)
aggagagucccgcagucggcguccagcggcucugcuuguucgugugugugucguugcaggccuuauucaagcuuaccaugggccagaucaucaccuucuuccaggaggugccccacgugaucgaggaggugaugaacaucgugcugaucgcccugagccugcuggccauccugaagggcaucuacaacguggccaccugcggccuguucggccuggugagcuuccugcugcugugcggcagaagcugcagcaccaccuacaagggcguguacgagcugcagacccuggagcuggacauggccagccugaacaugaccaugccccugagcugcaccaagaacaacagccaccacuacaucauggugggcaacgagaccggccuggagcugacccugaccaacaccagcaucaucaaccacaaguucugcaaccugagcgacgcccacaagaagaaccuguacgaccacgcccugaugagcaucaucagcaccuuccaccugagcauccccaacuucaaccaguacgaggccaugagcugcgacuucaacggcggcaagaucagcgugcaguacaaccugagccacgccuacgccguggacgccgccaaccacugcggcaccaucgccaacggcgugcugcagaccuucaugagaauggccuggggcggcagcuacaucgcccuggacagcggcugcggcagcugggacugcaucaugaccagcuaccaguaccugaucauccagaacaucaccugggaggaccacugccaguucagcagacccagccccaucggcuaccugggccugcugagccagagaaccagagacaucuacaucagcagaagacugcugggcaccuucaccuggacccugagcgacagcgagggcaacgagacccccggcggcuacugccugaccagauggaugcugaucgaggccgagcugaagugcuucggcaacaccgccguggccaagugcaacgagaagcacgacgaggaguucugcgacaugcugagacuguucgacuucaacaagcaggccaucagaagacugaagacccccgcccagaugagcauccagcugaucaacaaggccgugaacgcccugaucaacgaccagcugaucaugaagaaccaccugagagacaucaugugcauccccuacugcaacuacagcaaguacugguaccugaaccacaccgugaccggcaagaccagccugcccagaugcuggcuggugagcaacggcagcuaccugaacgagacccacuucagcgacgacaucgagcagcaggccgacaacaugaucaccgagcugcugcagaaggaguacaucgacagacagggcaagaccccccugggccugguggaccuguucguguucagcaccagcuucuaccugaucagcaucuuccugcaccuggugaagauccccacccacagacacguggugggcaagcccugccccaagccccacagacugaaccacaugggcaucugcagcugcggccuguacaagcaccccggcgugcccgugaaguggaagagaugaggacuagucccuguucccagagcccacuuuuuuuucuuuuuuugaaauaaaauagccugucuuucagaucuaaaaaaaaaaaaaaaaaaaaaaaaaaaaaaaaaaaaaaaaaaaaaaaaaaaaaaaaaaaaaaaaaaaaaaaaaaaaaaaaaaaaaaaaaaaaaaaaaaaa

SEQ ID NO: 28527 - RNA, 1721 nt, Artificial Sequence
  mRNA product Design a-1 (A100) comprising derived and/or modified sequence from LASV(Lassa virus/H.sapiens-wt/NGA/2015/ISTH_0543;Clade II)__AVO03639__GPCmut5 (opt4)
aggagagucccgcagucggcguccagcggcucugcuuguucgugugugugucguugcaggccuuauucaagcuuaccaugggccagaucaucaccuucuuccaggaggugccccacgugaucgaggaggugaugaacaucgugcugaucgcccugagccugcuggccauccugaagggcaucuacaacguggccaccugcggccuguucggccuggugagcuuccugcugcugugcggcagaagcugcagcaccaccuacaagggcguguacgagcugcagacccuggagcuggacauggccaaccugaacaugaccaugccccugagcugcaccaagaacaacagccaccacuacaucauggugggcaacgagaccggccuggagcugacccugaccaacaccagcaucaucaaccacaaguucugcaaccugagcgacgcccacaagaagaaccuguacgaccacgcccugaugagcaucaucagcaccuuccaccugagcauccccaacuucaaccaguacgaggccaugagcugcgacuucaacggcggcaagaucagcgugcaguacaaccugagccacaccuacgccguggacgccgccaaccacugcggcaccaucgccaacggcgugcugcagaccuucaugagaauggccuggggcggcagcuacaucgcccuggacagcggcugcggcagcugggacugcaucaugaccagcuaccaguaccuggugauccagaacaccaccugggaggaccacugccaguucagcagacccagccccaucggcuaccugggccugcugagccagagaaccagagacaucuacaucagcagaagacugcugggcaccuucaccuggacccugagcgacagcgagggcaacgagacccccggcggcuacugccugaccagauggaugcugaucgaggccgagcugaagugcuucggcaacaccgccguggccaagugcaacgagaagcacgacgaggaguucugcgacaugcugagacuguucgacuucaacaagcaggccaucagaagacugaagacccccgcccagaugagcauccagcugaucaacaaggccgugaacgcccugaucaacgaccagcugaucaugaagaaccaccugagagacaucaugugcauccccuacugcaacuacagcaaguacugguaccugaaccacaccgugaccggcaagaccagccugcccagaugcuggcuggugagcaacggcagcuaccugaacgagacccacuucagcgacgacaucgagcagcaggccgacaacaugaucaccgagcugcugcagaaggaguacaucgacagacagggcaagaccccccugggccugguggaccuguucguguucagcaccagcuucuaccugaucagcaucuuccugcaccuggugaagauccccacccacagacacaucaccggcaagcccugccccaagccccacagacugaaccacaugggcaucugcagcugcggccuguacaagcaccccggcgugcccgugaaguggaagagaugaggacuagucccuguucccagagcccacuuuuuuuucuuuuuuugaaauaaaauagccugucuuucagaucuaaaaaaaaaaaaaaaaaaaaaaaaaaaaaaaaaaaaaaaaaaaaaaaaaaaaaaaaaaaaaaaaaaaaaaaaaaaaaaaaaaaaaaaaaaaaaaaaaaaa

SEQ ID NO: 28528 - RNA, 1721 nt, Artificial Sequence
  mRNA product Design a-1 (A100) comprising derived and/or modified sequence from LASV(Lassa virus/H.sapiens-wt/NGA/2016/ISTH_0009;Clade II)__AVO03571__GPCmut5 (opt4)
aggagagucccgcagucggcguccagcggcucugcuuguucgugugugugucguugcaggccuuauucaagcuuaccaugggccagaucaucaccuucuuccaggaggugccccacgugaucgaggaggugaugaacaucgugcugaucgcccugagccugcuggccauccugaagggcaucuacaacguggccaccugcggccugcugggccuggugagcuuccugcugcugugcggcagaagcugcagcaccaccuacaagggcguguacgagcugcagacccuggagcuggacauggccagccugaacaugaccaugccccugagcugcaccaagaacaacagccaccacuacaucauggugggcaacgagaccggccuggagcugacccugaccaacaccagcaucaucaaccacaaguucugcaaccugagcgacgcccacaagaagaaccuguacgaccacgcccugaugagcaucaucagcaccuuccaccugagcauccccaacuucaaccaguacgaggccaugagcugcgacuucaacggcggcagaaucagcgugcaguacaaccugagccacagcuacgccguggacgccgccaaccacugcggcaccaucgccaacggcgugcugcagaccuucaugagaauggccuggggcggcagcuacaucgcccuggacagcggcugcggcagcugggacugcaucaugaccagcuaccaguaccugaucauccagaacaccaccugggaggaccacugccaguucagcagacccagccccaucggcuaccugggccugcugagccagagaaccagagacaucuacaucagcagaagacugcugggcaccuucaccuggacccugagcgacagcgagggcaacgagacccccggcggcuacugccugaccagauggaugcugaucgaggccgagcugaagugcuucggcaacaccgccguggccaagugcaacgagaagcacgacgaggaguucugcgacaugcugagacuguucgacuucaacaagcaggccaucagaagacugaagacccccgcccagaugagcauccagcugaucaacaaggccgugaacgcccugaucaacgaccagcugaucaugaagaaccaccugagagacaucaugugcauccccuacugcaacuacagcaaguacugguaccugaaccacaccgugaccggcaagaccagccugcccagaugcuggcuggugagcaacggcagcuaccugaacgagacccacuucagcgacgacaucgagcagcaggccgacaacaugaucaccgagcugcugcagaaggaguacaucgacagacagggcaagaccccccugggccugguggaccuguucguguucagcaccagcuucuaccugaucagcaucuuccugcaccuggugaagauccccacccacagacacaucaccggcaagcccugccccaagccccacagacugaaccacaugggcaucugcagcugcggccuguacaaccaccccggcgugcccgugaaguggaagagaugaggacuagucccuguucccagagcccacuuuuuuuucuuuuuuugaaauaaaauagccugucuuucagaucuaaaaaaaaaaaaaaaaaaaaaaaaaaaaaaaaaaaaaaaaaaaaaaaaaaaaaaaaaaaaaaaaaaaaaaaaaaaaaaaaaaaaaaaaaaaaaaaaaaaa

SEQ ID NO: 28529 - RNA, 1721 nt, Artificial Sequence
  mRNA product Design a-1 (A100) comprising derived and/or modified sequence from LASV(Lassa virus/H.sapiens-wt/NGA/2016/ISTH_0017;Clade II)__AVO03567__GPCmut5 (opt4)
aggagagucccgcagucggcguccagcggcucugcuuguucgugugugugucguugcaggccuuauucaagcuuaccaugggccagaucaucaccuucuuccaggaggugccccacgugaucgaggaggugaugaacaucgugcugaucgcccugagccugcuggccauccugaagggcaucuacaacguggccaccugcggccuguucggccuggugagcuuccugcugcugugcggcagaagcugcagcaccaccuacaagggcguguacgagcugcagacccuggagcuggacauggccagccugaacaugaccaugccccugagcugcaccaagaacaacagccaccacuacaucauggugggcaacgagaccggccuggagcugacccugaccaacaccagcaucaucaaccacaaguucugcaaccugagcgacgcccacaagaagaaccuguacgaccacgcccugaugagcaucaucagcaccuuccaccugagcauccccaacuucaaccaguacgaggccaugagcugcgacuucaacggcggcaagaucagcgugcaguacaaccugagccacaccuacgccaucgacgccgccaaccacugcggcaccaucgccaacggcgugcugcagaccuucaugagaauggccuggggcggcagcuacaucgcccuggacagcggcugcggcagcugggacugcaucaugaccagcuaccaguaccugaucauccagaacaccaccugggaggaccacugccaguucagcagacccagccccaucggcuaccugggccugcugagccagagaaccagagacaucuacaucagcagaagacugcugggcaccuucaccuggacccugagcgacagcgagggcaacgagacccccggcggcuacugccugaccagauggaugcugaucgaggccgagcugaagugcuucggcaacaccgccguggccaagugcaacgagaagcacgacgaggaguucugcgacaugcugagacuguucgacuucaacaagcaggccaucagaagacugaagacccccgcccagaugagcauccagcugaucaacaaggccgugaacgcccugaucaacgaccagcugaucaugaagaaccaccugagagacaucaugugcauccccuacugcaacuacagcaaguacugguaccugaaccacaccgugaccggcaagaccagccugcccagaugcuggcuggugagcaacggcagcuaccugaacgagacccacuucagcgacgacaucgagcagcaggccgacaacaugaucaccgagcugcugcagaaggaguacauggacagacagggcaagaccccccugggccugguggaccuguucguguucagcaccagcuucuaccugaucagcaucuuccugcaccuggugagaauccccacccacagacacgugaucggcaagcccugccccaagccccacagacugaaccacaugggcaucugcagcugcggccuguacaagcaccccggcgugcccgugaaguggaagagaugaggacuagucccuguucccagagcccacuuuuuuuucuuuuuuugaaauaaaauagccugucuuucagaucuaaaaaaaaaaaaaaaaaaaaaaaaaaaaaaaaaaaaaaaaaaaaaaaaaaaaaaaaaaaaaaaaaaaaaaaaaaaaaaaaaaaaaaaaaaaaaaaaaaaa

SEQ ID NO: 28530 - RNA, 1721 nt, Artificial Sequence
  mRNA product Design a-1 (A100) comprising derived and/or modified sequence from LASV(Lassa virus/H.sapiens-wt/NGA/2018/ISTH_0959;Clade II)__AVV65099__GPCmut5 (opt4)
aggagagucccgcagucggcguccagcggcucugcuuguucgugugugugucguugcaggccuuauucaagcuuaccaugggccagaucaucaccuucuuccaggaggugccccacgugaucgaggaggugaugaacaucgugcugaucgcccugagccugcuggccauccugaagggcaucuacaacguggugaccugcggccuguucggccuggugagcuuccugcugcugugcggcagaagcugcagcaccaccuacaagggcguguacgagcugcagacccuggagcuggacauggccagccugaacaugaccaugccccugagcugcaccaagaacaacagccaccacuacaucauggugggcaacgagaccggccuggagcugacccugaccaacaccagcaucaucaaccacaaguucugcaaccugagcgacgcccacaagaagaaccuguacgaccacgcccugaugagcaucaucagcaccuuccaccugagcauccccaacuucaaccaguacgaggccaugagcugcgacuucaacggcggcaagaucagcgugcaguacaaccugagccacgccuacgccaucgacgccgccaaccacugcggcaccaucgccaacggcgugcugcagaccuucaugagaauggccuggggcggcagcuacaucgcccuggacagcggcugcggcagcugggacugcaucaugaccagcuaccaguaccugaucauccagaacaccaccugggaggaccacugccaguucagcagacccagccccaucggcuaccugggccugcugagccagagaaccagagacaucuacaucagcagaagacugcugggcaccuucaccuggacccugagcgacagcgagggcaacgagacccccggcggcuacugccugaccagauggaugcugaucgaggccgagcugaagugcuucggcaacaccgccguggccaagugcaacgagaagcacgacgaggaguucugcgacaugcugagacuguucgacuucaacaagcaggccaucagaagacugaagacccccgcccagaugagcauccagcugaucaacaaggccgugaacgcccugaucaacgaccagcugaucaugaagaaccaccugagagacaucaugugcauccccuacugcaacuacagcaaguacugguaccugaaccacaccgugaccggcaagaccagccugcccagaugcuggcuggugagcaacggcagcuaccugaacgagacccacuucagcgacgacaucgagcagcaggccgacaacaugaucaccgagcugcugcagaaggaguacaucgacagacagggcaagaccccccugggccugguggaccuguucguguucagcaccagcuucuaccugaucagcaucuuccugcaccuggugaagauccccacccacagacacgugaucggcaagcccugccccaagccccacagacugaaccacaugggcaucugcagcugcggccuguacaagcaccccggcgugcccgugaaguggaagagaugaggacuagucccuguucccagagcccacuuuuuuuucuuuuuuugaaauaaaauagccugucuuucagaucuaaaaaaaaaaaaaaaaaaaaaaaaaaaaaaaaaaaaaaaaaaaaaaaaaaaaaaaaaaaaaaaaaaaaaaaaaaaaaaaaaaaaaaaaaaaaaaaaaaaa

SEQ ID NO: 28531 - RNA, 1721 nt, Artificial Sequence
  mRNA product Design a-1 (A100) comprising derived and/or modified sequence from LASV(LASV003-NIG-2008;Clade II)__AIT17580__GPCmut5 (opt4)
aggagagucccgcagucggcguccagcggcucugcuuguucgugugugugucguugcaggccuuauucaagcuuaccaugggccagaucaucaccuucuuccaggaggugccccacgugaucgaggaggugaugaacaucgugcugaucgcccugagccugcuggccauccugaagggcaucuacaacguggccaccugcggccuguucggccuggugagcuuccugcugcugugcggcagaagcugcagcaccaccuacaagggcguguacgagcugcagacccuggagcuggacauggccagccugaacaugaccaugccccugagcugcaccaagaacaacagccaccacuacaucauggugggcaacgagaccggccuggagcugacccugaccaacaccagcaucaucaaccacaaguucugcaaccugagcgacgcccacaagaagaaccuguacgaccacgcccugaugagcaucaucagcaccuuccaccugagcauccccaacuucaaccaguacgaggccaugagcugcgacuucaacggcggcaagaucagcgugcaguacaaccugagccacaccuacgccguggacgccgccaaccacugcggcaccaucgccaacggcgugcugcagaccuucaugagaauggccuggggcggcagcuacaucgcccuggacagcggcugcggcagcugggacugcaucaugaccagcuaccaguaccugaucauccagaacaccaccugggaggaccacugccaguucagcagacccagccccaucggcuaccugggccugcugagccagagaaccagagacaucuacaucagcagaagacugcugggcaccuucaccuggacccugagcgacagcgagagcaacgagacccccggcggcuacugccugaccagauggaugcugaucgaggccgagcugaagugcuucggcaacaccgccguggccaagugcaacgagaagcacgacgaggaguucugcgacaugcugagacuguucgacuucaacaagcaggccaucagaagacugaaggcccccgcccagaugagcauccagcugaucaacaaggccgugaacgcccugaucaacgaccagcugaucaugaagaaccaccugagagacaucaugugcauccccuacugcaacuacagcaaguacugguaccugaaccacaccgugaccggcagaaccagccugcccagaugcuggcuggugagcaacggcagcuaccugaacgagacccacuucagcgacgacaucgagcagcaggccgacaacaugaucaccgagcugcugcagaaggaguacauggacagacagggcaagaccccccugggccugguggaccuguucguguucagcaccagcuucuaccugaucagcaucuuccugcaccuggugaagauccccacccacagacacgugaucggcaagcccugccccaagccccacagacugaaccacaugggcaucugcagcugcggccuguacaagcaccccggcgugcccgugaaguggaagagaugaggacuagucccuguucccagagcccacuuuuuuuucuuuuuuugaaauaaaauagccugucuuucagaucuaaaaaaaaaaaaaaaaaaaaaaaaaaaaaaaaaaaaaaaaaaaaaaaaaaaaaaaaaaaaaaaaaaaaaaaaaaaaaaaaaaaaaaaaaaaaaaaaaaaa

SEQ ID NO: 28532 - RNA, 1721 nt, Artificial Sequence
  mRNA product Design a-1 (A100) comprising derived and/or modified sequence from LASV(LASV035-NIG-2009;Clade II)__AIT17588__GPCmut5 (opt4)
aggagagucccgcagucggcguccagcggcucugcuuguucgugugugugucguugcaggccuuauucaagcuuaccaugggccagaucaucaccuucuuccaggaggugccccacgugaucgaggaggugaugaacaucgugcugaucgcccugagccugcuggccauccugaagggcaucuacaacguggccaccugcggccuguucggccuggugagcuuccugcugcugugcggcagaagcugcagcaccaccuacaagggcguguacgagcugcagacccuggagcuggacauggccagccugaacaugaccaugccccugagcugcaccaagaacaacagccaccacuacaucauggugggcaacgagaccggccuggagcugacccugaccaacaccagcaucaucaaccacaaguucugcaaccugagcgacgcccacaagaagaaccuguacgaccacgcccugaugagcaucaucagcaccuuccaccugagcauccccaacuucaaccaguacgaggccaugagcugcgacuucaacggcggcaagaucagcgugcaguacaaccugagccacgccuacgccguggacgccgccaaccacugcggcaccaucgccaacggcgugcugcagaccuucaugagaauggccuggggcggcagcuacaucgcccuggacagcggcugcggcagcugggacugcaucaugaccagcuaccaguaccugaucauccagaacaccaccugggaggaccacugccaguucagcagacccagccccaucggcuaccugggccugcugagccagagaaccagagacaucuacaucagcagaagacugcugggcaccuucaccuggacccugagcgacagcgagggcaacgagacccccggcggcuacugccugaccagauggaugcugaucgaggccgagcugaagugcuucggcaacaccgccguggccaagugcaacgagaagcacgacgaggaguucugcgacaugcugagacuguucgacuucaacaagcaggccaucagaagacugaaggcccccgcccagaugagcauccagcugaucaacaaggccgugaacgcccugaucaacgaccagcugaucaugaagaaccaccugagagacaucaugugcauccccuacugcaacuacagcaaguacugguaccugaaccacaccgugaccggcaagaccagccugcccagaugcuggcuggugagcaacggcagcuaccugaacgagacccacuucagcgacgacaucgagcagcaggccgacaacaugaucaccgagcugcugcagaaggaguacaucgacagacagggcaagaccccccugggccugguggaccuguucguguucagcaccagcuucuaccugaucagcaucuuccugcaccuggugaagauccccacccacagacacgugaucggcaagcccugccccaagccccacagacugaaccacaugggcaucugcagcugcggccuguacaagcaccccggcgugcccgugaaguggaagagaugaggacuagucccuguucccagagcccacuuuuuuuucuuuuuuugaaauaaaauagccugucuuucagaucuaaaaaaaaaaaaaaaaaaaaaaaaaaaaaaaaaaaaaaaaaaaaaaaaaaaaaaaaaaaaaaaaaaaaaaaaaaaaaaaaaaaaaaaaaaaaaaaaaaaa

SEQ ID NO: 28533 - RNA, 1721 nt, Artificial Sequence
  mRNA product Design a-1 (A100) comprising derived and/or modified sequence from LASV(LASV1000-NIG-2009;Clade II)__AIT17782__GPCmut5 (opt4)
aggagagucccgcagucggcguccagcggcucugcuuguucgugugugugucguugcaggccuuauucaagcuuaccaugggccagaucaucaccuucuuccaggaggugccccacgugaucgaggaggugaugaacaucgugcugaucgcccugagccugcuggccauccugaagggcaucuacaacguggccaccugcggccuguucggccuggugagcuuccugcugcugugcggcagaagcugcagcaccaccuacaagggcguguacgagcugcagacccuggagcuggacauggccagccugaacaugaccaugccccugagcugcaccaagaacaacagccaccacuacaucauggugggcaacgagaccggccuggagcugacccugaccaacaccagcaucaucaaccacaaguucugcaaccugagcgacgcccacaagaagaaccuguacgaccacgcccugaugagcaucaucagcaccuuccaccugagcauccccaacuucaaccaguacgaggccaugagcugcgacuucaacggcggcaagaucagcgugcaguacaaccugagccacaccuacgccguggacgccgccaaccacugcggcaccaucgccaacggcgugcugcagaccuucaugagaauggccuggggcggcagcuacaucgcccuggacagcggcugcggcagcugggacugcaucaugaccagcuaccaguaccugaucauccagaacaccaccugggaggaccacugccaguucagcagacccagccccaucggcuaccugggccugcugagccagagaaccagagacaucuacaucagcagaagacugcugggcaccuucaccuggacccugagcgacagcgagggcaacgagacccccggcggcuacugccugaccagauggaugcugaucgaggccgagcugaagugcuucggcaacaccgccguggccaagugcaacgagaagcacgacgaggaguucugcgacaugcugagacuguucgacuucaacaagcaggccaucaagagacugaagacccccgcccagaugagcauccagcugaucaacaaggccgugaacgcccugaucaacgaccagcugaucaugaagaaccaccugagagacaucaugugcauccccuacugcaacuacagcaaguacugguaccugaaccacaccgugaccggcaagaccagccugcccagaugcuggcuggugagcaacggcagcuaccugaacgagacccacuucagcgacgacaucgagcagcaggccgacaacaugaucaccgagcugcugcagaaggaguacaucgacagacagggcaagaccccccugggccugguggaccuguucguguucagcaccagcuucuaccugaucagcaucuuccugcaccuggugaagauccccacccacagacacguggugggcaagcccugccccaagccccacagacugaaccacaugggcaucugcagcugcggccuguacaagcaccccggcgugcccgugaaguggaagagaugaggacuagucccuguucccagagcccacuuuuuuuucuuuuuuugaaauaaaauagccugucuuucagaucuaaaaaaaaaaaaaaaaaaaaaaaaaaaaaaaaaaaaaaaaaaaaaaaaaaaaaaaaaaaaaaaaaaaaaaaaaaaaaaaaaaaaaaaaaaaaaaaaaaaa

SEQ ID NO: 28534 - RNA, 1721 nt, Artificial Sequence
  mRNA product Design a-1 (A100) comprising derived and/or modified sequence from LASV(LASV221-NIG-2010;Clade II)__AIT17624__GPCmut5 (opt4)
aggagagucccgcagucggcguccagcggcucugcuuguucgugugugugucguugcaggccuuauucaagcuuaccaugggccagaucaucaccuucuuccaggaggugccccacgugaucgaggaggugaugaacaucgugcugaucgcccugagccugcuggccauccugaagggcaucuacaacguggccaccugcggccuguucggccuggugagcuuccugcugcugugcggcagaagcugcagcaccaccuacaagggcguguacgagcugcagacccuggagcuggacauggccagccugaacaugaccaugccccugagcugcaccaagaacaacagccaccacuacaucauggugggcaacgagaccggccuggagcugacccugaccaacaccagcaucaucaaccacaaguucugcaaccugagcgacgcccacaagaagaaccuguacgaccacgcccugaugagcaucaucagcaccuuccaccugagcauccccaacuucaaccaguacgaggccaugagcugcgacuucaacggcggcaagaucagcgugcaguacaaccugagccacaccuacgccaucgacgccgccaaccacugcggcaccaucgccaacggcgugcugcagaccuucaugagaauggccuggggcggcagcuacaucgcccuggacagcggcugcggcagcugggacugcaucaugaccagcuaccaguaccugaucauccagaacaccaccugggaggaccacugccaguucagcagacccagccccaucggcuaccugggccugcugagccagagaaccagagacaucuacaucagcagaagacugcugggcaccuucaccuggacccugagcgacagcgagggcaacgagacccccggcggcuacugccugaccagauggaugcugaucgaggccgagcugaagugcuucggcaacaccgccguggccaagugcaacgagaagcacgacgaggaguucugcgacaugcugagacuguucgacuucaacaagcaggccaucagaagacugaagacccccgcccagaugagcauccagcugaucaacaaggccgugaacgcccugaucaacgaccagcugaucaugaagaaccaccugagagacaucaugugcauccccuacugcaacuacagcaaguacugguaccugaaccacaccgugaccggcaagaccagccugcccagaugcuggcuggugagcaacggcagcuaccugaacgagacccacuucagcgacgacaucgagcagcaggccgacaacaugaucaccgagaugcugcagaaggaguacauggacagacagggcaagaccccccugggccugguggaccuguucguguucagcaccagcuucuaccugaucagcaucuuccugcaccuggugaagauccccacccacagacacgugaucggcaagcccugccccaagccccacagacugaaccacaugggcaucugcagcugcggccuguacaagcaccccggcgugcccgugaaguggaagagaugaggacuagucccuguucccagagcccacuuuuuuuucuuuuuuugaaauaaaauagccugucuuucagaucuaaaaaaaaaaaaaaaaaaaaaaaaaaaaaaaaaaaaaaaaaaaaaaaaaaaaaaaaaaaaaaaaaaaaaaaaaaaaaaaaaaaaaaaaaaaaaaaaaaaa

SEQ ID NO: 28535 - RNA, 1721 nt, Artificial Sequence
  mRNA product Design a-1 (A100) comprising derived and/or modified sequence from LASV(LASV237-NIG-2010;Clade II)__AIT17638__GPCmut5 (opt4)
aggagagucccgcagucggcguccagcggcucugcuuguucgugugugugucguugcaggccuuauucaagcuuaccaugggccagaucaucaccuucuuccaggaggugccccacgugaucgaggaggugaugaacaucgugcugaucgcccugagccugcuggccauccugaagggcaucuacaacguggccaccugcggccuguucggccuggugagcuuccugcugcugugcggcagaagcugcagcaccaccuacaagggcguguacgagcugcagacccuggagcuggacauggccagccugaacaugaccaugccccugagcugcaccaagaacaacagccaccacuacaucauggugggcaacgagaccggccuggagcugacccugaccaacaccagcaucaucaaccacaaguucugcaaccugagcgacgcccacaagaaggaccuguacgaccacgcccugaugagcaucaucagcaccuuccaccugagcauccccaacuucaaccaguacgaggccaugagcugcgacuucaacggcggcaagaucagcgugcaguacaaccugagccacaccuacgccguggacgccgccaaccacugcggcaccaucgccaacggcgugcugcagaccuucaugagaauggccuggggcggcagcuacaucgcccuggacagcggcugcggcagcugggacugcaucaugaccagcuaccaguaccugaucauccagaacaccaccugggaggaccacugccaguucagcagacccagccccaucggcuaccugggccugcugagccagagaaccagagacaucuacaucagcagaagacugcugggcaccuucaccuggacccugagcgacagcgagggcaacgagacccccggcggcuacugccugaccagauggaugcugaucgaggccgagcugaagugcuucggcaacaccgccguggccaagugcaacgagaagcacgacgaggaguucugcgacaugcugagacuguucgacuucaacaagcaggccaucagaagacugaagacccccgcccagaugagcauccagcugaucaacaaggccgugaacgcccugaucaacgaccagcugaucaugaagaaccaccugagagacaucaugugcauccccuacugcaacuacagcaaguacugguaccugaaccacaccgugaccggcaagaccagccugcccagaugcuggcuggugagcaacggcagcuaccugaacgagacccacuucagcgacgacaucgagcagcaggccgacaacaugaucaccgagcugcugcagaaggaguacauggacagacagggcaagaccccccugggccugguggaccuguucguguucagcaccagcuucuaccugaucagcaucuuccugcaccugaucaagauccccacccacagacacaucaccggcaagcccugccccaagccccacagacugaaccacaugggcaucugcagcugcggccuguacaagcaccccggcgugcccgugaaguggaagagaugaggacuagucccuguucccagagcccacuuuuuuuucuuuuuuugaaauaaaauagccugucuuucagaucuaaaaaaaaaaaaaaaaaaaaaaaaaaaaaaaaaaaaaaaaaaaaaaaaaaaaaaaaaaaaaaaaaaaaaaaaaaaaaaaaaaaaaaaaaaaaaaaaaaaa

SEQ ID NO: 28536 - RNA, 1721 nt, Artificial Sequence
  mRNA product Design a-1 (A100) comprising derived and/or modified sequence from LASV(LASV253-NIG-2011;Clade II)__AIT17670__GPCmut5 (opt4)
aggagagucccgcagucggcguccagcggcucugcuuguucgugugugugucguugcaggccuuauucaagcuuaccaugggccagaucaucaccuucuuccaggaggugccccacgugaucgaggaggugaugaacaucgugcugaucgcccugagccugcuggccauccugaagggcaucuacaacguggccaccugcggccuguucggccuggugagcuuccugcugcugugcggcagaagcugcagcaccaccuacaagggcguguacgagcugcagacccuggagcuggacauggccagccugaacaugaccaugccccugagcugcaccaagaacaacagccaccacuacaucauggugggcaacgagaccggccuggagcugacccugaccaacaccagcaucaucaaccacaaguucugcaaccugagcgacgcccacaagaagaaccuguacgaccacgcccugaugagcaucaucagcaccuuccaccugagcauccccaacuucaaccaguacgaggccaugagcugcgacuucaacggcggcaagaucagcgugcaguacaaccugagccacaccuacgccguggacgccgccaaccacugcggcaccaucgccaacggcgugcugcagaccuucaugagaauggccuggggcggcagcuacaucgcccuggacagcggcugcggcagcugggacugcaucaugaccagcuaccaguaccugaucauccagaacaccaccugggaggaccacugccaguucagcagacccagccccaucggcuaccugggccugcugagccagagaaccagagacaucuacaucagcagaagacugcugggcaccuucaccuggacccugagcgacagcgagggcaacgagacccccggcggcuacugccugaccagauggaugcugaucgaggccgagcugaagugcuucggcaacaccgccguggccaagugcaacgagaagcacgacgaggaguucugcgacaugcugagacuguucgacuucaacaagcaggccaucagaagacugaaggcccccgcccagaugagcauccagcugaucaacaaggccgugaacgcccugaucaacgaccagcugaucaugaagaaccaccugagagacaucaugugcauccccuacugcaacuacagcaaguacugguaccugaaccacaccgugaccggcagaaccagccugcccagaugcuggcuggugagcaacggcagcuaccugaacgagacccacuucagcgacgacaucgagcagcaggccgacaacaugaucaccgagcugcugcagaaggaguacaucgacagacagggcaagaccccccugggccugguggaccuguucguguucagcaccagcuucuaccugaucagcaucuuccugcaccuggugaagauccccacccacagacacaucaucggcaagcccugccccaagccccacagacugaaccacaugggcaucugcagcugcggccuguacaagcaccccggcgugcccgugaaguggaagagaugaggacuagucccuguucccagagcccacuuuuuuuucuuuuuuugaaauaaaauagccugucuuucagaucuaaaaaaaaaaaaaaaaaaaaaaaaaaaaaaaaaaaaaaaaaaaaaaaaaaaaaaaaaaaaaaaaaaaaaaaaaaaaaaaaaaaaaaaaaaaaaaaaaaaa

SEQ ID NO: 28537 - RNA, 1721 nt, Artificial Sequence
  mRNA product Design a-1 (A100) comprising derived and/or modified sequence from LASV(LASV254-NIG-2011;Clade II)__AIT17674__GPCmut5 (opt4)
aggagagucccgcagucggcguccagcggcucugcuuguucgugugugugucguugcaggccuuauucaagcuuaccaugggccagaucaucaccuucuuccaggaggugccccacgugaucgaggaggugaugaacaucgugcugaucgcccugagccugcuggccauccugaagggcaucuacaacguggccaccugcggccuguucggccuggugagcuuccugcugcugugcggcagaagcugcagcaccaccuacaagggcguguacgagcugcagacccuggagcuggacaugaccaaccugaacaugaccaugccccugagcugcaccaagaacaacagccaccacuacaucauggugggcaacgagaccggccuggagcugacccugaccaacaccagcaucaucaaccacaaguucugcaaccugagcgacgcccacaagaagaaccuguacaaccacgcccugaugagcaucaucagcaccuuccaccugagcauccccaacuucaaccaguacgaggccaugagcugcgacuucaacggcggcaagaucagcgugcaguacaaccugagccacagcuacgccguggacgccgccaaccacugcggcaccaucgccaacggcgugcugcagaccuucaugagaauggccuggggcggcagcuacaucgcccuggacagcggcugcggcaacugggacugcaucaugaccagcuaccaguaccugaucauccagaacaccaccugggaggaccacugccaguucagcagacccagccccaucggcuaccugggccugcugagccagagaaccagagacaucuacaucagcagaagacugcugggcaccuucaccuggacccugagcgacagcgagggcaacgagacccccggcggcuacugccugaccagauggaugcugaucgaggccgagcugaagugcuucggcaacaccgccguggccaagugcaacgagaagcacgacgaggaguucugcgacaugcugagacuguucgacuucaacaagcaggccaucagaagacugaagacccccgcccaggccaacauccagcugaucaacaaggccgugaacgcccugaucaacgaccagcugaucaugaagaaccaccugagagacaucaugugcauccccuacugcaacuacagcaaguacugguaccugaaccacaccgugaccggcaagaccagccugcccagaugcuggcuggugagcaacggcagcuaccugaacgagacccacuucagcgacgacaucgagcagcaggccgacaacaugaucaccgagcugcugcagaaggaguacauggacagacagggcaagaccccccugggccugguggaccuguucguguucagcaccagcuucuaccugaucagcaucuuccugcaccuggugaagauccccacccacagacacgugaucggcaagcccugccccaagccccacagacugaaccacaugggcaucugcagcugcggccuguacaagcaccccggcgugcccgugaaguggaagagaugaggacuagucccuguucccagagcccacuuuuuuuucuuuuuuugaaauaaaauagccugucuuucagaucuaaaaaaaaaaaaaaaaaaaaaaaaaaaaaaaaaaaaaaaaaaaaaaaaaaaaaaaaaaaaaaaaaaaaaaaaaaaaaaaaaaaaaaaaaaaaaaaaaaaa

SEQ ID NO: 28538 - RNA, 1721 nt, Artificial Sequence
  mRNA product Design a-1 (A100) comprising derived and/or modified sequence from LASV(Nig08-A19;Clade III)__ADU56618__GPCmut5 (opt4)
aggagagucccgcagucggcguccagcggcucugcuuguucgugugugugucguugcaggccuuauucaagcuuaccaugggccagaucgugaccuucuuccaggaggugccccacgugaucgaggaggugaugaacaucgugcugaucgcccugagcauccuggccauccugaagggccuguacaacaucgccaccugcggccugaucggccuggugaccuuccugcugcugagcggcagaagcugcagcaugaccuacaagggcguguacgagcugcagacccuggagcugaacaugaacacccugaacaugaccaugccccugagcugcaccaagaacaacagccaccacuacaucauggugggcaacgagaccggccuggagcugacccugaccaacaccagccugcugcaccacaaguucugcaaccugagcgacgcccacaagaagaaccuguacgaccacacccugaugagcaucaucagcaccuuccaccugagcauccccaacuucaaccaguacgaggccaugagcugcgacuucaacggcggcaagaucaccgugcaguacaaccugagccacagcuacgccaucgacgccgccaaccacugcggcaccguggccaacggcgugcugcagaccuucaugagaauggccuggggcggcagcuacaucgcccuggacagcggcugcggcaagugggacugcaucaugaccagcuaccaguaccugaucauccagaacaccaccugggaggaccacugccaguucagcagacccagccccaucggcuaccugggccugcugagccagagaaccagagacaucuacaucagcagaagacugcugggcaccuucaccuggacccugagcgacagcgagggcaacgagacccccggcggcuacugccugaccagauggaugcugaucgaggccgagcugaagugcuucggcaacaccgccguggccaagugcaacgagaagcacgacgaggaguucugcgacaugcugagacuguucgacuucaacaagcaggccaucagaagacugaaggcccccgcccagaugagcauccagcugaucaacaaggccgugaacgcccugaucaacgaccagcugaucaugaagaaccaccugagagacaucaugugcauccccuacugcaacuacagcaaguacugguaccugaaccacaccagcaccggcagaaccagccugcccagaugcuggcuggugagcaacggcagcuaccugaacgagacccacuucagcgacgacaucgagcagcaggccgacaacaugaucaccgagaugcugcagaaggaguaccuggacagacagggcaagaccccccugggccugguggaccuguucguguucagcaccagcuucuaccugaucagcaucuuccugcaccuggugaagauccccacccacagacacaucgugggcaagcccugccccaagccccacagacugaaccacaugggcaucugcagcugcggccuguacaagcagcccggcgugcccgugagauggaagagaugaggacuagucccuguucccagagcccacuuuuuuuucuuuuuuugaaauaaaauagccugucuuucagaucuaaaaaaaaaaaaaaaaaaaaaaaaaaaaaaaaaaaaaaaaaaaaaaaaaaaaaaaaaaaaaaaaaaaaaaaaaaaaaaaaaaaaaaaaaaaaaaaaaaaa

SEQ ID NO: 28539 - RNA, 1724 nt, Artificial Sequence
  mRNA product Design a-1 (A100) comprising derived and/or modified sequence from LASV(G1180-SLE-2010;Clade IV)__AIT17168__GPCmut5 (opt4)
aggagagucccgcagucggcguccagcggcucugcuuguucgugugugugucguugcaggccuuauucaagcuuaccaugggccagaucgugaccuucuuccaggaggugccccacgugaucgaggaggugaugaacaucgugcugaucgcccugagcauccuggccgugcugaagggccuguacaacuucgccaccugcggccuggugggccugcugaccuuccugcugcugugcggcagaagcugcaccgccagcagauacaagggcguguacgagcugcagacccuggagcugaacauggagacccugaacaugaccaugccccugagcugcaccaagaacaacagccaccacuacaucauggugggcaacgagaccggccuggagcugacccugaccaacaccagcaucaucaaccacaaguucugcaaccugagcgacgcccacaagaagaaccuguacgaccacgcccugaugagcaucaucagcaccuuccaccugagcauccccaacuucaaccaguacgaggccaugagcugcgacuucaacggcggcaagaucagcgugcaguacaaccugagccacagcuacgccggcgacgccgccaaccacugcggcaccguggccaacggcgugcugcagaccuucaugagaauggccuggggcggcagcuacaucgcccuggacagcggcugcggcagcugggacugcaucaugaccagcuaccaguaccugaucauccagaacaccaccugggaggaccacugccaguucagcagacccagccccaucggcuaccugggccugcugagccagagaaccagagacaucuacaucagcagaagacugcugggcaccuucaccuggacccugagcgacagcgagggcaaggacacccccggcggcuacugccugaccagauggaugcugaucgaggccgagcugaagugcuucggcaacaccgccguggccaagugcaacgagaagcacgacgaggaguucugcgacaugcugagacuguucgacuucaacaagcaggccauccagagacugaaggcccccgcccagaugagcauccagcugaucaacaaggccgugaacgcccugaucaacgaccagcugaucaugaagaaccaccugagagacaucaugugcauccccuacugcaacuacagcaaguacugguaccugaaccacaccaccaccggcaagaccagccugcccaagugcuggcuggugagcaacggcagcuaccugaacgagacccacuucagcgacgacaucgagcagcaggccgacaacaugaucaccgagaugcugcagaaggaguacauggagagacagggcaagaccccccugggccugguggaccuguucguguucagcaccagcuucuaccugaucagcaucuuccugcaccuggugaagauccccacccacagacacaucgugggcaagagcugccccaagccccacagacugaaccacaugggcaucugcagcugcggccuguacaagcagcccggcgugcccgugaaguggaagagaugaggacuagucccuguucccagagcccacuuuuuuuucuuuuuuugaaauaaaauagccugucuuucagaucuaaaaaaaaaaaaaaaaaaaaaaaaaaaaaaaaaaaaaaaaaaaaaaaaaaaaaaaaaaaaaaaaaaaaaaaaaaaaaaaaaaaaaaaaaaaaaaaaaaaa

SEQ ID NO: 28540 - RNA, 1724 nt, Artificial Sequence
  mRNA product Design a-1 (A100) comprising derived and/or modified sequence from LASV(G1442-SLE-2011;Clade IV)__AIT17180__GPCmut5 (opt4)
aggagagucccgcagucggcguccagcggcucugcuuguucgugugugugucguugcaggccuuauucaagcuuaccaugggccagaucgugaccuucuuccaggaggugccccacgugaucgaggaggugaugaacaucgugcugaucgcccugagcauccuggccgugcugaagggccuguacaacguggccaccugcggccugaucggccuggugaccuuccugcugcugugcggcagaagcugcaccaccacccuguacaagggcguguacgagcugcagacccuggagcugaacauggagacccugaacaugaccaugccccugagcugcaccaagaacaacagccaccacuacaucagagugggcaacgagaccggccuggagcugacccugaccaacaccagcaucaucaaccacaaguucugcaaccugagcgacgcccacaagaagaaccuguacgaccacgcccugaugagcaucaucagcaccuuccaccugagcauccccaacuucaaccaguacgaggccaugagcugcgacuucaacggcggcaagaucagcgugcaguacaaccugagccacagcuacgccggcgacgccgccaaccacugcggcaccguggccaacggcgugcugcagaccuucaugagaauggccuggggcggcagcuacaucgcccuggacagcggcugcggcaacugggacugcaucaugaccagcuaccaguaccugaucauccagaacaccaccugggacgaccacugccaguucagcagacccagccccaucggcuaccugggccugcugagccagagaaccagagacguguacaucagcagaagacugcugggcaccuucaccuggacccugagcgacagcgagggcaaggacacccccggcggcuacugccugaccagauggaugcugaucgaggccgagcugaagugcuucggcaacaccgccguggccaagugcaacgagaagcacgacgaggaguucugcgacaugcugagacuguucgacuucaacaagcaggccauccagagacugaaggcccccgcccagaugagcauccagcugaucaacaaggccgugaacgcccugaucaacgaccagcugaucaugaagaaccaccugagagacaucaugugcauccccuacugcaacuacagcaaguacugguaccugaacaacaccgccaccggcaagaccagccugcccaagugcuggcugaucagcaacggcagcuaccugaacgagacccacuucagcgacgacaucgagcaggaggccgacaacaugaucaccgagaugcugcagaaggaguacauggagagacagggcaagaccccccugggccugguggaccuguucguguucagcaccagcuucuaccugaucagcaucuuccugcaccuggugaagauccccacccacagacacaucgugggcaagagcugccccaagccccacagacugaaccacaugggcaucugcagcugcggccuguacaagcagcccggcgugcccgugagauggaagagaugaggacuagucccuguucccagagcccacuuuuuuuucuuuuuuugaaauaaaauagccugucuuucagaucuaaaaaaaaaaaaaaaaaaaaaaaaaaaaaaaaaaaaaaaaaaaaaaaaaaaaaaaaaaaaaaaaaaaaaaaaaaaaaaaaaaaaaaaaaaaaaaaaaaaa

SEQ ID NO: 28541 - RNA, 1724 nt, Artificial Sequence
  mRNA product Design a-1 (A100) comprising derived and/or modified sequence from LASV(G3010-SLE-2013;Clade IV)__AIT17344__GPCmut5 (opt4)
aggagagucccgcagucggcguccagcggcucugcuuguucgugugugugucguugcaggccuuauucaagcuuaccaugggccagaucgugaccuucuuccaggaggugccccacgugaucgaggaggugaugaacaucgugcugaucgcccugagcauccuggccgugcugaagggccuguacaacuucgccaccugcggccuggugggccuggugaccuuccugcugcugugcggcagaagcugcaccaccagccuguacaagggcguguacgagcugcagacccuggagcugaacauggagacccugaacaugaccaugccccugagcugcaccaagaacaacagccaccacuacaucauggugggcaacgagaccggccuggagcugacccugaccaacaccagcaucaucaaccacaaguucugcaaccugagcgacgcccacaagaagaaccuguacaaccacgcccugaugagcaucaucagcaccuuccaccugagcauccccaacuucaaccaguacgaggccaugagcugcgacuucaacggcggcaagaucagcgugcaguacaaccugagccacagcuacgccggcgacgccgccagccacugcggcaccguggccaacggcgugcugcagaccuucaugagaauggccuggggcggcagcuacaucgcccuggacagcggcugcggcaagugggacugcaucaugaccagcuaccaguaccugaucauccagaacaccaccugggaggaccacugccaguucagcagacccagccccaucggcuaccugggccugcugagccagagaaccagagacaucuacaucagcagaagacugcugggcaccuucaccuggacccugagcgacagcgagggcaaggacacccccggcggcuacugccugaccagauggaugcugaucgaggccgagcugaagugcuucggcaacaccgccguggccaagugcaacgagaagcacgacgaggaguucugcgacaugcugagacuguucgacuucaacaagcaggccauccagagacugaagacccccgcccagaugagcauccagcugaucaacaaggccgugaacgcccugaucaacgaccagcugaucaugaagaaccaccugagagacaucaugugcauccccuacugcaacuacagcaaguacugguaccugaaccacaccaccaccggcaagaccagccugcccaagugcuggcuggugagcaacggcagcuaccugaacgagacccacuucagcgacgacaucgagcagcaggccgacaacaugaucaccgagaugcugcagaaggaguacauggagagacagggcaagaccccccugggccugguggaccuguucguguucagcaccagcuucuaccugaucagcaucuuccugcaccuggugaagauccccacccacagacacaucgugggcaagagcugccccaagccccacagacugaaccacaugggcaucugcagcugcggccuguacaagcagcccggcgugcccgugagauggaagagaugaggacuagucccuguucccagagcccacuuuuuuuucuuuuuuugaaauaaaauagccugucuuucagaucuaaaaaaaaaaaaaaaaaaaaaaaaaaaaaaaaaaaaaaaaaaaaaaaaaaaaaaaaaaaaaaaaaaaaaaaaaaaaaaaaaaaaaaaaaaaaaaaaaaaa

SEQ ID NO: 28542 - RNA, 1724 nt, Artificial Sequence
  mRNA product Design a-1 (A100) comprising derived and/or modified sequence from LASV(G502-SLE-2009;Clade IV)__AIT17126__GPCmut5 (opt4)
aggagagucccgcagucggcguccagcggcucugcuuguucgugugugugucguugcaggccuuauucaagcuuaccaugggccagaucgugaccuucuuccaggaggugccccacgugaucgaggaggugaugaacaucgugcugaucgcccugagcauccuggccgugcugaagggccuguacaacuucgccaccugcggccuggugggccugcugaccuuccugcugcugugcggcagaagcugcaccaccggccuguacaagggcguguacgagcugcagacccuggagcugaacauggagacccugaacaugaccaugccccugagcugcaccaagaacaacagccaccacuacaucauggugggcaacgagaccggccuggagcugacccugaccaacaccagcaucaucaaccacaaguucugcaaccugagcgacgcccacaagaagaaccuguacgaccacgcccugaugagcaucaucagcaccuuccaccugagcauccccaacuucaaccaguacgaggccaugagcugcgacuucaacggcggcaagaucagcgugcaguacaaccugagccacagcuacgccggcgacgccgccgaccacugcggcaccguggccaacggcgugcugcagaccuucaugagaauggccuggggcggcagcuacaucgcccuggacagcggcugcggcagaugggacugcaucaugaccagcuaccaguaccugaucauccagaacaccaccugggaggaccacugccaguucagcagacccagccccaucggcuaccugggccugcugagccagagaaccagagacaucuacaucagcagaagacugcugggcaccuucaccuggacccugagcgacagcgagggcaaggacacccccggcggcuacugccugaccagauggaugcugaucgaggccgagcugaagugcuucggcaacaccgccguggccaagugcaacgagaagcacgacgaggaguucugcgacaugcugagacuguucgacuucaacaagcaggccauccagagacugaaggcccccgcccagaugagcauccagcugaucaacaaggccgugaacgcccugaucaacgaccagcuggugaugaagaaccaccugagagacaucaugugcauccccuacugcaacuacagcagauacugguaccugaaccacaccaccaccggcagaaccagccugcccaagugcuggcuggugagcaacggcagcuaccugaacgagacccacuucagcgacgacaucgagcagcaggccgacaacaugaucaccgagaugcugcagaaggaguacauggagagacagggcaagaccccccugggccugguggaccuguucguguucagcaccagcuucuaccugaucagcaucuuccugcaccuggugaagauccccacccacagacacaucgugggcaagagcugccccaagccccacagacugaaccacaugggcaucugcagcugcggccuguacaagcagcccggcgugcccgugaaguggaagagaugaggacuagucccuguucccagagcccacuuuuuuuucuuuuuuugaaauaaaauagccugucuuucagaucuaaaaaaaaaaaaaaaaaaaaaaaaaaaaaaaaaaaaaaaaaaaaaaaaaaaaaaaaaaaaaaaaaaaaaaaaaaaaaaaaaaaaaaaaaaaaaaaaaaaa

SEQ ID NO: 28543 - RNA, 1724 nt, Artificial Sequence
  mRNA product Design a-1 (A100) comprising derived and/or modified sequence from LASV(G733-SLE-2010;Clade IV)__AIT17154__GPCmut5 (opt4)
aggagagucccgcagucggcguccagcggcucugcuuguucgugugugugucguugcaggccuuauucaagcuuaccaugggccagaucgugaccuucuuccaggaggugccccacgugaucgaggaggugaugaacaucgugcugaucgcccugagcauccuggccgugcugaagggccuguacaacuucgccaccugcggcaucgugggccuggugagcuuccugcugcugugcggcagaagcugcaccaccagccuguacaagggcguguacgagcugcagacccuggagcugaacauggagacccugaacaugaccaugccccugagcugcaccaagaacaacagccaccacuacaucauggugggcaacgagaccggccuggagcugacccugaccaacaccagcaucaucaaccacaaguucugcaaccugagcgacgcccacaagaagaaccuguacgaccacgcccugaugagcaucaucagcaccuuccaccugagcauccccaacuucaaccaguacgaggccaugagcugcgacuucaacggcggcaagaucagcgugcaguacaaccugagccacagcuacgccggcgacgccgccaaccacugcggcaccaucgccaacggcgugcugcagaccuucaugagaauggccuggggcggcagcuacaucgcccuggacagcggcugcgacagaugggacugcaucaugaccagcuaccaguaccugaucauccagaacaccaccugggaggaccacugccaguucagcagacccagccccaucggcuaccugggccugcugagccagagaaccagagacaucuacaucagcagaagacugcugggcaccuucaccuggacccugagcgacagcgagggcaaggacacccccggcggcuacugccugaccagauggaugcugaucgaggccgagcugaagugcuucggcaacaccgccguggccaagugcaacgagaagcacgacgaggaguucugcgacaugcugagacuguucgacuucaacaagcaggccauccagagacugaaggcccccgcccagaugagcauccagcugaucaacaaggccgugaacgcccugaucaacgaccagcugaucaugaagaaccaccugagagacaucaugugcauccccuacugcaacuacagcaaguacugguaccugaaccacaccaccaccggcaagaccagccugcccaagugcuggcuggugagcaacggcagcuaccugaacgagacccacuucagcgacgacaucgagcagcaggccgacaacaugaucaccgagaugcugcagaaggaguacauggagagacagggcaagaccccccugggccugguggaccuguucguguucagcaccagcuucuaccugaucagcaucuuccugcaccuggugaagauccccacccacagacacguggugggcaagagcugccccaagccccacagacugaaccacaugggcaucugcagcugcggccuguacggccagcccggcgugcccgugaaguggaagagaugaggacuagucccuguucccagagcccacuuuuuuuucuuuuuuugaaauaaaauagccugucuuucagaucuaaaaaaaaaaaaaaaaaaaaaaaaaaaaaaaaaaaaaaaaaaaaaaaaaaaaaaaaaaaaaaaaaaaaaaaaaaaaaaaaaaaaaaaaaaaaaaaaaaaa

SEQ ID NO: 28544 - RNA, 1724 nt, Artificial Sequence
  mRNA product Design a-1 (A100) comprising derived and/or modified sequence from MOPV/LASV reassortant(IGS-1;Clade IV)__AFY05576__GPCmut5 (opt4)
aggagagucccgcagucggcguccagcggcucugcuuguucgugugugugucguugcaggccuuauucaagcuuaccaugggccagaucgugaccuucuuccaggaggugccccacgugaucgaggaggugaugaacaucgugcugaucgcccugagcgugcuggccgugcugaagggccuguacaacuucgccaccugcggccuggugggccuggugaccuuccugcugcugugcggcagaagcugcaccaccagccuguacaagggcguguacgagcugcagacccuggagcugaacauggagacccugaacaugaccaugccccugagcugcaccaagaacaacagccaccacuacaucauggugggcaacgagaccggccuggagcugacccugaccaacaccagcaucaucaaccacaaguucugcaaccugagcgacgcccacaagaagaaccuguacgaccacgcccugaugagcaucaucagcaccuuccaccugagcauccccaacuucaaccaguacgaggccaugagcugcgacuucaacggcggcaagaucagcgugcaguacaaccugagccacagcuacgccggcgacgccgccaaccacugcggcaccguggccaacggcgugcugcagaccuucaugagaauggccuggggcggcagcuacaucgcccuggacagcggcugcggcaacugggacugcaucaugaccagcuaccaguaccugaucauccagaacaccaccugggaggaccacugccaguucagcagacccagccccaucggcuaccugggccugcugagccagagaaccagagacaucuacaucagcagaagacugcugggcaccuucaccuggacccugagcgacagcgagggcgaggacacccccggcggcuacugccugaccagauggaugcugaucgaggccgagcugaagugcuucggcaacaccgccguggccaagugcaacgagaagcacgacgaggaguucugcgacaugcugagacuguucgacuucaacaagcaggccauccagagacugaaggcccccgcccagaugagcauccagcugaucaacaaggccgugaacgcccugaucaacgaccagcugaucaugaagaaccaccugagagacaucaugugcauccccuacugcaacuacagcaaguacugguaccugaaccacaccaccaccggcagaaccagccugcccaagugcuggcuggugagcaacggcagcuaccugaacgagacccacuucagcgacgacaucgagcagcaggccgacaacaugaucaccgagaugcugcagaaggaguacauggagagacagggcaagaccccccugggccugguggaccuguucguguucagcaccagcuucuaccugaucagcaucuuccugcaccuggugaagauccccacccacagacacaucgugggcaagagcugccccaagccccacagacugaaccacaugggcaucugcagcugcggccuguacaagcagcccggcgugcccgugaaguggaagagaugaggacuagucccuguucccagagcccacuuuuuuuucuuuuuuugaaauaaaauagccugucuuucagaucuaaaaaaaaaaaaaaaaaaaaaaaaaaaaaaaaaaaaaaaaaaaaaaaaaaaaaaaaaaaaaaaaaaaaaaaaaaaaaaaaaaaaaaaaaaaaaaaaaaaa

SEQ ID NO: 28545 - RNA, 1724 nt, Artificial Sequence
  mRNA product Design a-1 (A100) comprising derived and/or modified sequence from LASV(LM765-SLE-2012;Clade IV)__AIT17814__GPCmut5 (opt4)
aggagagucccgcagucggcguccagcggcucugcuuguucgugugugugucguugcaggccuuauucaagcuuaccaugggccagaucgugaccuucuuccaggaggugccccacgugaucgaggaggugaugaacaucgugcugaucgcccugagcauccuggccgugcugaagggccuguacaacuucgccaccugcggccuggugggccuggugaccuuccugcugcugugcggcagaagcugcaccaccagccuguacaagggcguguacgagcugcagacccuggagcugaacauggagacccugaacaugaccaugccccugagcugcaccaagaacaacagccaccacuacaucauggugggcaacgagaccggccuggagcugacccugaccaacaccagcaucaucgaccacaaguucugcaaccugagcgacgcccacagaaagaaccuguacgaccacgcccugaugagcaucaucagcaccuuccaccugagcauccccaacuucaaccaguacgaggccaugagcugcgacuucaacggcggcaagaucagcgugcaguacaaccugagccacagcuacgccaaggacgccgccgaccacugcggcaccguggccaacggcgugcugcagaccuucaugagaauggccuggggcggcagcuacaucgcccuggacagcggcugcggcagaugggacugcaucaugaccagcuaccaguaccugaucauccagaacaccaccugggaggaccacugccaguucagcagacccagccccaucggcuaccugggccugcugagccagagaaccagagacaucuacaucagcagaagacugcugggcaccuucaccuggacccugagcgacagcgagggcaaggacacccccggcggcuacugccugaccagauggaugcugaucgaggccgagcugaagugcuucggcaacaccgccguggccaagugcaacgagaagcacgacgaggaguucugcgacaugcugagacuguucgacuucaacaagcaggccauccagagacugaaggcccccgcccagaugagcauccagcugaucaacaaggccgugaacgcccugaucaacgaccagcugaucaugaagaaccaccugagagacaucaugugcauccccuacugcaacuacagcaaguacugguaccugaaccacaccaccaccggcaagaccagccugcccaagugcuggcuggugagcaacggcagcuaccugaacgagacccacuucagcgacgacaucgagcagcaggccgacaacaugaucaccgagaugcugcagaaggaguacauggagagacagggcaagaccccccugggccugguggaccuguucguguucagcaccagcuucuaccugaucagcaucuuccugcaccuggugaagauccccacccacagacacaucgugggcaagcccugccccaagccccacagacugaaccacaugggcaucugcagcugcggccuguacaagcagcccggcgugcccgugaaguggaagagaugaggacuagucccuguucccagagcccacuuuuuuuucuuuuuuugaaauaaaauagccugucuuucagaucuaaaaaaaaaaaaaaaaaaaaaaaaaaaaaaaaaaaaaaaaaaaaaaaaaaaaaaaaaaaaaaaaaaaaaaaaaaaaaaaaaaaaaaaaaaaaaaaaaaaa

SEQ ID NO: 28546 - RNA, 1724 nt, Artificial Sequence
  mRNA product Design a-1 (A100) comprising derived and/or modified sequence from LASV(LM776-SLE-2012;Clade IV)__AIT17824__GPCmut5 (opt4)
aggagagucccgcagucggcguccagcggcucugcuuguucgugugugugucguugcaggccuuauucaagcuuaccaugggccagaucgugaccuucuuccaggaggugccccacgugaucgaggaggugaugaacaucgugcugaucgcccugagcauccuggccgugcugaagggccuguacaacuucgccaccugcggccuggugggccuggugaccuuccugcugcugugcggcagaagcugcaccaccagcguguacaagggcguguacgagcugcagacccuggagcugaacauggagacccugaacaugaccaugccccugagcugcaccaagaacaacagccaccacuacaucauggugggcaacgagaccggccuggagcugacccugaccaacaccagcaucaucaaccacaaguucugcaaccugagcgacgcccacaagaagaaccuguacgaccacgcccugaugagcaucaucagcaccuuccaccugagcauccccaacuucaaccaguacgaggccaugagcugcgacuucaacggcggcaagaucagcgugcaguacaaccugagccacagcuacgccggcgacgccgccaaccacugcggcaccguggccaacggcgugcugcagaccuucaugagaauggccuggggcggcagcuacaucgcccuggacagcggcugcggcaagugggacugcaucaugaccagcuaccaguaccugaucauccagaacaccaccugggaggaccacugccaguucagcagacccagccccaucggcuaccugggccugcugagccagagaaccagagacaucuacaucagcagaagacugcugggcaccuucaccuggacccugagcgacagcgagggcaaggacacccccggcggcuacugccugaccagauggaugcugaucgaggccgagcugaagugcuucggcaacaccgccguggccaagugcaacgagaagcacgacgaggaguucugcgacaugcugagacuguucgacuucaacaagcaggccauccagagacugaaggcccccgcccagaugagcauccagcugaucaacaaggccgugaacgcccugaucaacgaccagcugaucaugaagaaccaccugagagacaucaugugcauccccuacugcaacuacagcaaguacugguaccugaaccacaccaccaccggcaagaccagccugcccaagugcuggcuggugagcaacggcagcuaccugaacgagacccacuucagcgacgacaucgagcagcaggccgacaacaugaucaccgagaugcugcagaaggaguacauggagagacagggcaagaccccccugggccugguggaccuguucguguucagcaccagcuucuaccugaucagcaucuuccugcaccuggugaagauccccacccacagacacaucgugggcaagagcugccccaagccccacagacugaaccacaugggcaucugcagcugcggccuguacaagcagcccggcgugcccgugagauggaagagaugaggacuagucccuguucccagagcccacuuuuuuuucuuuuuuugaaauaaaauagccugucuuucagaucuaaaaaaaaaaaaaaaaaaaaaaaaaaaaaaaaaaaaaaaaaaaaaaaaaaaaaaaaaaaaaaaaaaaaaaaaaaaaaaaaaaaaaaaaaaaaaaaaaaaa

SEQ ID NO: 28547 - RNA, 1724 nt, Artificial Sequence
  mRNA product Design a-1 (A100) comprising derived and/or modified sequence from LASV(Mad39;Clade IV)__ANH09722__GPCmut5 (opt4)
aggagagucccgcagucggcguccagcggcucugcuuguucgugugugugucguugcaggccuuauucaagcuuaccaugggccagaucgugaccuucuuccaggaggugccccacgugaucgaggaggugaugaacaucgugcugaucgcccugagcauccuggccgugcugaagggccuguacaacguggccaccugcggccugaucggccuggugaccuuccugcugcugugcggcagaagcugcaccaccacccuguacaagggcguguacgagcugcaggcccuggagcugaacauggagacccugaacaugaccaugccccugagcugcaccaagaacaacagccaccacuacaucagagugggcaacgagaccggccuggagcugacccugaccaacaccagccugaucaaccacaaguucugcaaccugagcgacgcccacaagaagaaccuguacgaccacgcccugaugagcaucaucagcaccuuccaccugagcauccccaacuucaaccaguacgaggccaugagcugcgacuucaacgacggcaagaucagcgugcaguacaaccugagccacaccuacgccggcgacaccgccaaccacugcggcaccguggccaacggcgugcugcagaccuucaugagaauggccuggggcggcagcuacaucgcccuggacagcggcugcggcggcugggacugcaucaugaccagcuaccaguaccugaucauccagaacaccaccugggaggaccacugccaguucagcagacccagccccaucggcuaccugggccugcugagccagagaaccagagacaucuacaucagcagaagacugcugggcaccuucaccuggacccugagcgacagcgagggcaaggacacccccggcggcuacugccugaccagauggaugcugaucgaggccgagcugaagugcuucggcaacaccgccguggccaagugcaacgagaagcacgacgaggaguucugcgacaugcugagacuguucgacuucaacaagcaggccauccagagacugaaggcccccgcccagaugagcauccagcugaucaacaaggccgugaacgcccugaucaacgaccagcugaucaugaagaaccaccugagagacaucaugugcauccccuacugcaacuacagcaaguacugguaccugaaccacaccgugaccggcaagaccagccugcccaagugcuggcuggugagcaacggcagcuaccugaacgagacccacuucagcgacgacaucgagcagcaggccgacaacaugaucaccgagaugcugcagaaggaguacauggagagacagggcaagaccccccugggccugguggaccuguucguguucagcaccagcuucuaccugaucagcaucuuccugcaccuggugaagauccccacccacagacacguggugggcaagcccugccccaagccccacagacugaaccacaugggcaucugcagcugcggcuucuacaagcagcccggcgugcccgugagauggaagagaugaggacuagucccuguucccagagcccacuuuuuuuucuuuuuuugaaauaaaauagccugucuuucagaucuaaaaaaaaaaaaaaaaaaaaaaaaaaaaaaaaaaaaaaaaaaaaaaaaaaaaaaaaaaaaaaaaaaaaaaaaaaaaaaaaaaaaaaaaaaaaaaaaaaaa

SEQ ID NO: 28548 - RNA, 1724 nt, Artificial Sequence
  mRNA product Design a-1 (A100) comprising derived and/or modified sequence from LASV(Z0947-SLE-2011;Clade IV)__AIT17840__GPCmut5 (opt4)
aggagagucccgcagucggcguccagcggcucugcuuguucgugugugugucguugcaggccuuauucaagcuuaccaugggccagaucgugaccuucuuccaggaggugccccacgugaucgaggaggugaugaacaucgugcugaucgcccugagcauccuggccgugcugaagggccuguacaacuucgccaccugcggccuggugggccuggugaccuuccugcugcugugcggcagaagcugcaccaucagccuguacaagggcguguacgagcugcagacccuggagcugaacauggagacccugaacaugaccaugccccugagcugcaccaagaacaacagccaccacuacaucauggugggcaacgagaccggccuggagcugacccugaccaacaccagcaucaucaaccacaaguucugcaaccugagcgacgcccacaagaagaaccuguacgaccacgcccugaugagcaucaucagcaccuuccaccugagcauccccaacuucaaccaguacgaggccaugagcugcgacuucaacggcggcaagaucagcgugcaguacaaccugagccacagcuacgccggcgacgccgccaaccacugcggcaccguggccaacggcgugcugcagaccuucaugagaauggccuggggcggcagcuacaucgcccuggacagcggcugcgacagaugggacugcaucaugaccagcuaccaguaccugaucauccagaacaccaccugggaggaccacugccaguucagcagacccagccccaucggcuaccugggccugcugagccagagaaccagagacaucuacaucagcagaagacugcugggcaccuucaccuggacccugagcgacagcgagggcaaggacacccccggcggcuacugccugaccagauggaugcugaucgaggccgagcugaagugcuucggcaacaccgccguggccaagugcaacgagaagcacgacgaggaguucugcgacaugcugagacuguucgacuucaacaagcaggccauccagagacugaaggcccccgcccagaugagcauccagcugaucaacaaggccgugaacgcccugaucaacgaccagcugaucaugaagaaccaccugagagacaucaugugcauccccuacugcaacuacagcaaguacugguaccugaaccacaccaccaccggcaagaccagccugcccaagugcuggcuggugagcaacggcagcuaccugaacgagacccacuucagcgacgacaucgagcagcaggccgacaacaugaucaccgagaugcugcagaaggaguacauggagagacagggcaagaccccccugggccugguggaccuguucguguucagcaccagcuucuaccugaucagcaucuuccugcaccuggugaagauccccacccacagacacaucgugggcaagcccugccccaagccccacagacugaaccacaugggcaucugcagcugcggccuguacaagcagcccggcgugcccgugaaguggaagagaugaggacuagucccuguucccagagcccacuuuuuuuucuuuuuuugaaauaaaauagccugucuuucagaucuaaaaaaaaaaaaaaaaaaaaaaaaaaaaaaaaaaaaaaaaaaaaaaaaaaaaaaaaaaaaaaaaaaaaaaaaaaaaaaaaaaaaaaaaaaaaaaaaaaaa

SEQ ID NO: 28549 - RNA, 1724 nt, Artificial Sequence
  mRNA product Design a-1 (A100) comprising derived and/or modified sequence from LASV(Josiah;Clade IV)__NP_694870__GPCmut5 (opt5)
aggagagucccgcagucggcguccagcggcucugcuuguucgugugugugucguugcaggccuuauucaagcuuaccaugggccagaucgugaccuucuuucaagaggucccccacguuauugaagaggugaugaacaucgugcugauugcccucagcguccuggcugugcuuaaggggcuguacaauuucgccacaugcggacucguuggccuggugacguuucuucugcucugugggagauccugcaccacaucucuguauaaaggagucuacgaacugcagacccucgagcugaacauggaaacacuuaauaugaccaugccucugagcuguacaaagaacaauucccaucacuauaucauggugggcaacgagaccgggcucgagcugacgcuuaccaauacaucuauuaucaaccauaaauucugcaaucugagcgacgcgcacaagaaaaaccucuacgaucaugcucugauguccaucauuucuaccuuucaccugagcaucccgaauuucaaccaguaugaagccauguccugugacuuuaauggaggcaagauuagcguucaguacaaccucucucacuccuaugccggcgaugcugccaaucauugcgggacaguggcuaacggaguccugcaaaccuucaugcggauggccuggggcgggagcuacaucgcgcuugacucuggauguggcaacugggauugcauuaugacguccuaccaguaucugaucauucagaauacaaccugggaggaccacugucaguuuagccgccccucuccuaucggguaccucggacugcuuucccaaagaacacgggauaucuauauuagccgcagacugcucggcaccuucaccuggacacuguccgacucugaaggcaaggauacgcccgggggauacugccugacccgguggaugcucaucgaggccgagcugaaauguuuuggcaacacagcuguggccaagugcaaugaaaaacaugacgaggaguucugcgauaugcuucgccuguuugacuucaacaagcaggcuauucagagacucaaagccccugcgcagaugagcauccaacugauuaauaaggccgugaacgcucuuaucaaugaucagcugaucaugaagaaccaccuccgggacauuauguguauccccuauugcaauuacuccaaauauugguaccugaaccacaccacaaccgggcgcacgagccugccuaaguguuggcucgucucuaauggauccuaccugaacgaaacacauuucagcgacgauauugaacagcaagccgacaauaugaucaccgagaugcuucagaaagaguauauggaaagacagggcaagaccccgcuggggcucguugaucuguuuguguucucuaccagcuuuuaccugauuuccaucuuccuucaccucgugaaaauccccacacaucggcacauugucggaaagucuugcccuaaaccccaucgccugaaccacaugggcaucuguagcugcggccuguauaagcagccuggggugcccguuaaguggaaaagaugaggacuagucccuguucccagagcccacuuuuuuuucuuuuuuugaaauaaaauagccugucuuucagaucuaaaaaaaaaaaaaaaaaaaaaaaaaaaaaaaaaaaaaaaaaaaaaaaaaaaaaaaaaaaaaaaaaaaaaaaaaaaaaaaaaaaaaaaaaaaaaaaaaaaa

SEQ ID NO: 28550 - RNA, 1721 nt, Artificial Sequence
  mRNA product Design a-1 (A100) comprising derived and/or modified sequence from LASV(LP;Clade I)__AAF86701__GPCmut5 (opt5)
aggagagucccgcagucggcguccagcggcucugcuuguucgugugugugucguugcaggccuuauucaagcuuaccaugggccagaucauuaccuucuuucaagaggugccccacgucaucgaagagguuaugaacauugugcugaucgcccucagccugcuugcuauucugaaggggcucuacaauaucgccacaugcggaaucauuggccugguggcguuccuuuuucugugugggaaauccugcucucucacgcugaagggaggcuaugaacugcagacccucgagcugaacauggaaacacuuaauaugaccaugccucugagcuguaccaaaaacuccucucaucacuacaucagagucgggaaugagacaggacucgagcugacacuuaccaacacgagcauuaucaaucauaaguucugcaaccuguccgacgcucacaaaaagaaucucuaugaucaugcccugaugucuauuaucagcaccuuucaccuguccauuccgaacuucaaucaguacgaagccaugagcugugacuuuaacggcggcaagaucucugugcaguauaaucucucccacagcuacgcuggggaugccgcugagcauugcggaacaguugccaacggcgugcugcaaaccuucaugcggauggcguggggagggcgcuauaucgcccuugacucuggcugugggaauugggauugcauuaugacauccuaccaguaccugaucauucagaacaccacgugggaagaccacugucaguuuagcagacccucuccuaucggauaucucggccugcuuucccaacggacacgcgauauuuacaucagcagacggcugcucggcaccuucacauggacccuguccgacucugaggggaacgagacccccggaggcuauugccugacacgcuggaugcucaucgaagcugagcugaaauguuuugggaauacggccgucgcuaagugcaacgaaaaacaugaugaggaguucugcgacaugcuuagacuguuugauuucaauaagcaggccauucggcgccucaaagcgccugcccagaugagcauccagcugauuaacaaggcugugaaugcccuuaucaacgaccaacugauuaugaagaaucaccucagagauaucauguguauccccuacugcaacuauuccaaauacugguaucugaaucacaccagcucuggacggacaucccugccuaaguguuggcucauuagcaacggcucuuaccugaaugaaacccaguucagcgacgacaucgagcagcaagcugauaacaugauuacagaaaugcuucagaaagaguacaucgaacgccaggggaagaccccgcugggacucguugacauuuuuaucuucuccacgucuuuuuaucugauuagcaucuuccugcaucuuaucaaaauucccacacacagacauaucgugggcaagccuugccccaaaccucaccggcucaaucauaugggcgucuguuccugcgggcuguacaagcaccccggagugccgaccaaguggaaacgcugaggacuagucccuguucccagagcccacuuuuuuuucuuuuuuugaaauaaaauagccugucuuucagaucuaaaaaaaaaaaaaaaaaaaaaaaaaaaaaaaaaaaaaaaaaaaaaaaaaaaaaaaaaaaaaaaaaaaaaaaaaaaaaaaaaaaaaaaaaaaaaaaaaaaa

SEQ ID NO: 28551 - RNA, 1721 nt, Artificial Sequence
  mRNA product Design a-1 (A100) comprising derived and/or modified sequence from LASV(803213;Clade II)__AAF86703__GPCmut5 (opt5)
aggagagucccgcagucggcguccagcggcucugcuuguucgugugugugucguugcaggccuuauucaagcuuaccaugggccagaucauuaccuucuuucaagaggugccccacgucaucgaagagguuaugaacauugugcugaucgcccucagccugcuugcuauucugaaggggaucuacaauguggccacaugcggacucuucggccugaucuccuuucuucugcucugugggagaucuugcagcgucacguauaaaggaguguacgaacugcagacccuggagcucaacauggcgaaucugaacaugacaaugccucuuuccuguaccaagaauaacucucaucacuauauuaugguuggcaaugaaacagggcuggagcucacccugacaaacaccagcaucauuaaucauaaauucugcaaccuuuccgacgcucacaagaaaaaucuguacgaucaugcccucaugucuaucauuagcacguuucaccuguccaucccgaacuucaaucaguaugaggccaugagcugugacuuuaacggaggcaagauuucugugcaguacaaucugucccacagcuucgcugucgaugccgcuaaccauugcggcaccaucgccaacggggugcuccaaacauuuaugcggauggcguggggaggcucuuauaucgcccuggacuccggguguggaaauugggauugcauuaugaccagcuaccaguaccuuaucauucagaacacaaccugggaagaccacugucaguucucucgccccuccccuaucggcuaucuggggcuccugagccaaagaacgcgggauauuuacaucucccgcagacuucugggaacauuuaccuggacacucucugacagcgagggcaaugaagcucccggcggguauugccugacccgguggaugcugaucgaggccgagcucaaguguuucggaaacaccgcuguugccaaaugcaaugaaaagcaugaugaggaauuuugcgacaugcugcgccuuuucgauuucaacaaacaggcgauuaagagacugaaaacgccugcccagauguccauccagcucauuaauaaggcugugaacgcccugaucaaugaccaacuuauuaugaagaaccaucugcgggauaucauguguauccccuacugcaauuauagccgcuacugguaucucaaccacacagucaccggcaaaacaucucugccuagauguuggcugguguccaaugggagcuaccucaacgagacccacuuuucugacgacauugaacagcaggcugauaauaugaucacagagaugcugcaaaaggaguacauggaccggcagggaaaaaccccgcuuggccugguggaucucuucgucuuuagcacguccuucuaucugauuucuaucuuucugcaccuuguuaagauucccacacaucgccacaucguggggaaaccuugccccaagccucauagacucaaccacaugggaauuuguagcugcggccuguacaaacaccccggcgugccggucaaguggaagcggugaggacuagucccuguucccagagcccacuuuuuuuucuuuuuuugaaauaaaauagccugucuuucagaucuaaaaaaaaaaaaaaaaaaaaaaaaaaaaaaaaaaaaaaaaaaaaaaaaaaaaaaaaaaaaaaaaaaaaaaaaaaaaaaaaaaaaaaaaaaaaaaaaaaaa

SEQ ID NO: 28552 - RNA, 1721 nt, Artificial Sequence
  mRNA product Design a-1 (A100) comprising derived and/or modified sequence from LASV(GA391;Clade III)__CAA36645__GPCmut5 (opt5)
aggagagucccgcagucggcguccagcggcucugcuuguucgugugugugucguugcaggccuuauucaagcuuaccaugggccagaucgugaccuucuuucaagaggucccccacguuauugaagaggugaugaacaucgugcugauugcccucagcauccuggcuauucuuaaggggcuguacaaugucgccacaugcggacucaucggccuggugacguuccuucugcucuccgggagaucuuguagccugaucuauaaaggaaccuacgaacugcagacacucgagcugaacauggaaacccuuaauaugacaaugccucuguccugcaccaagaacaauucucaucacuauauucggguuggcaacgagacagggcucgagcugacccuuacgaauaccagcauccugaaccauaaauuuuguaaucucuccgacgcgcacaagcgcaaccuguacgaucauucucugaugagcauuaucuccacauuccaccucagcauuccgaauuuuaaccaguaugaagcuaugucuugcgacuucaauggaggcaaaaucaccgugcaguacaaccugucccacagcuuugccgucgaugccgcuggccauugugggacacuugccaauggagugcugcaaaccuucaugagaauggcuuggggcgggucuuauauugcccucgacuccggaugcggcaacugggauuguaucaugacgagcuaccaguaccugaucauucagaacacaaccugggacgaucacugccaguuuucucggcccuccccuaucggguaucuuggacugcucagccaacgcacaagagacauuuacaucucccggcgccugcugggcaccuucaccuggacacucucugauagcgagggcaaugaaacgcccgggggauauugucugaccagauggaugcuuauugaggcggagcugaagugcuuuggcaacacagccguugcuaaguguaaugaaaaacaugacgaggaguucugcgauaugcuccggcuguuugacuucaacaagcaggccauccgcagacuuaaaaccccugcucagauguccauccagcugauuaauaaggccgugaacgcgcucaucaaugaucaacugauuaugaaaaaccaucugcgggacaucaugugcauucccuacuguaauuauagccgcuacugguaucucaaccacacaucuaccgggaagacgucccugccuagaugcuggcuuaucagcaauggaucuuaccugaacgaaacaaaguucagcgacgauaucgaacagcaggccgacaauaugauuaccgagaugcuccaaaaagaguacaucgaucggcagggcaagaccccgcuggggcuggucgaccuuuuuguguucuccacaucuuuuuaucucauuagcaucuuccugcaccuggugaaaauucccacccaccgccauaucgucggaaagccuugucccaaaccucacagacucaaccauaugggcauuugcuccuguggccuguacaagcagcccgggguuccggugcgguggaaaagaugaggacuagucccuguucccagagcccacuuuuuuuucuuuuuuugaaauaaaauagccugucuuucagaucuaaaaaaaaaaaaaaaaaaaaaaaaaaaaaaaaaaaaaaaaaaaaaaaaaaaaaaaaaaaaaaaaaaaaaaaaaaaaaaaaaaaaaaaaaaaaaaaaaaaa

SEQ ID NO: 28553 - RNA, 1724 nt, Artificial Sequence
  mRNA product Design a-1 (A100) comprising derived and/or modified sequence from LASV(AV;Clade V)__CCA30314__GPCmut5 (opt5)
aggagagucccgcagucggcguccagcggcucugcuuguucgugugugugucguugcaggccuuauucaagcuuaccaugggccagaucgugaccuucuuucaagaggucccccacguuauugaagaggugaugaacaucgugcugauugcccucagcauccuggcuguccuuaaggggcuguacaauauugccacaugcggacucaucggccugaucacguuccuucugcucugugggagauccugcucuagcaaccuguauaaaggaguguacgaacugcagucccucgaccugaauauggagacccuuaacaugacaaugccucugucuuguaccaagaauaacagccaucacuauauucggguuggcaaugauacagggcucgaacugacccuuacaaacaccuccauccugaaucauaaauuuugcaaccucucugacgcgcacaagaaagaucuguacgaccaugcucugaugagcauuaucuccacguuccaccucagcauuccgaauuuuaaccaguaugaggccaugucuugugauuucaauggaggcaagaucuccgugcaguacaaccugagccacucuuaugccauugacgcugccaaucauugcggcaccgucgcuaacgggauccuucaaacauuuaugcgcauggccuggggaggcuccuacaucgcgcuggauagcggguguggaaacugggacugcauuaugaccucuuaccaguaucucaucauucagaauacaaccugggagaaccacugucaguucuccagacccagcccuaucggcuaccuggggcuucugucccaacggacgcgcgauauuuauaucucuagacggcuccugggaacauuuaccuggacacugagcgacuccgaaggcaaugccacccccggcggguacugccucacccgcuggaugcugaucgaggcugaacuuaaguguuucggaaacacagccguggcuaaaugcaaugagaagcaugaugaggaauuuugcgacaugcugagacucuucgauuuuaacaaacaggccauuagccggcugaagucuccugcgcagauguccauccagcuuauuaauaaagccguuaacgcucugaucaaugaccaacucauuaugaagaaccaucugcgcgacaucauguguauccccuauugcaauuacagcaaguauugguaccugaaccacacgauuaccggcaaaacaucucucccuaaguguuggcuggugagcaauggguccuaccuuaacgagacccacuucucugaugacaucgaacagcaggccgauaauaugauuacagagaugcugcaaaaagaauauauggagagacagggaaagaccccgcucggccuggucgaccuguucguguuuagcacguccuucuaccuuaucagcauuuuucuccggcuggugaaaauccccacacaccgccauauugucgggaagccuugccccaaaccucacagacugaaccauaugggaaucuguucuugcggccucuauaagcagcccggcguuccggugcgguggaagcgcugaggacuagucccuguucccagagcccacuuuuuuuucuuuuuuugaaauaaaauagccugucuuucagaucuaaaaaaaaaaaaaaaaaaaaaaaaaaaaaaaaaaaaaaaaaaaaaaaaaaaaaaaaaaaaaaaaaaaaaaaaaaaaaaaaaaaaaaaaaaaaaaaaaaaa

SEQ ID NO: 28554 - RNA, 1721 nt, Artificial Sequence
  mRNA product Design a-1 (A100) comprising derived and/or modified sequence from LASV(Togo/2016/7082;Clade VI)__AMR44577__GPCmut5 (opt5)
aggagagucccgcagucggcguccagcggcucugcuuguucgugugugugucguugcaggccuuauucaagcuuaccaugggccagaucauuaccuucuuucaagaggugccccacgucaucgaagagguuaugaacauugugcugaucgcccucagccugcuugcuauucugaaggggguguacaaugucgccacaugcggaaucaucggccucgugacguuccuguuucuuugugggagauccugcucucugauuuauaaaggaagcuacgaacuccagacccuggagcugaacauggaaacacucaauaugaccaugccucuguccuguacaaagaacucuagccaucacuauauccggguuggcaaugagaccgggcuugagcugacacucaccaacacguccauuaucaaucauaaauucugcaaccugucugacgcgcacaagcgcaaucuuuacgaucaugcucugaugagcauucucuccaccuuucaccugagcaucccgaacuucaaucaguaugaagccaugucuugugacuuuaacggaggcaaaauuuccgugcaguacaaucugagccacgccuaugcugucgaugccgcugagcauugcggcacaguggccaacgggguucuccaaaccuucaugagaauggcguggggaggcucuuacaucgcccuggacuccggguguggaaauugggauugcaucaugacaagcuaccaguaucuuauuauccagaacaccacgugggaagaccacugucaguuuucucggcccuccccuauuggcuaccuggggcuccugagccaacgcacaagagauaucuauauuucccggcgccuucugggaaccuucacauggacccucucugacagcgagggcaacgagacccccggcggguacugccugacaagauggaugcugaucgaagcugagcucaaguguuuuggaaauacggccguggcuaagugcaacgaaaaacaugaugaggaguucugcgacaugcugcggcuuuuugauuucaauaagcaggccauccagcgccugaaauccccugcgcagaugagcauucaacucaucaacaaggccgucaaugcucugauuaacgaccagcuuaucaugaaaaaucaccugagagauaugauguguauucccuauugcaacuacucuaaguauugguaccucaaucacaccuccagcggccggacaucucugccuaaguguuggcuggugagcaacggguccuaccucaaugaaacccauuucucugacgacaucgagcagcaagccgauaacaugaucacagaaaugcugcagaaagaguauauugaccgccagggaaagaccccgcuuggccugguggaucucuuugucuucagcacguccuuuuaccugaucagcauuuuccugcaccuuaucaaaauucccacacauagacacaucguugggaagccuugccccaaaccucaucggcucaaucacaugggaauuuguucuugcggccuguauaagcagcccggcgugccgacccgcuggaaaagaugaggacuagucccuguucccagagcccacuuuuuuuucuuuuuuugaaauaaaauagccugucuuucagaucuaaaaaaaaaaaaaaaaaaaaaaaaaaaaaaaaaaaaaaaaaaaaaaaaaaaaaaaaaaaaaaaaaaaaaaaaaaaaaaaaaaaaaaaaaaaaaaaaaaaa

SEQ ID NO: 28555 - RNA, 1721 nt, Artificial Sequence
  mRNA product Design a-1 (A100) comprising derived and/or modified sequence from LASV(KAK-428;Clade n.d. (VII))__ANH09740__GPCmut5 (opt5)
aggagagucccgcagucggcguccagcggcucugcuuguucgugugugugucguugcaggccuuauucaagcuuaccaugggccagaucgugaccuucuuucaagaggucccccacguuauugaagaggugaugaacaucgugcugauugcccucagccugcuugcuauccugaaggggcucuacaauuucgccacaugcggagucauuggccugaucacguuucuucugcucugugggagauccugcucugcgaccuauaaaggacaguacgaacugcagacacuggagcucaacauggaaagccugaauaugaccaugccucuuuccuguacaaagaacaauucucaucacuauauccgggcuggcaacaauaccgggcuggagcucacacugaccaacacgagcauuaucucccauaaauucugcaaucuuucugacgcccacaagaaaaaccuguacgaucauacccucaugagcauuaucacaaccuuucaccuguccauuccgaauuucaaccaguaugaggccaugagcugugacuuuaauggaggcaagaucucuauucaauacaaccugucccacagcuaugcuggcgaugccgcucagcauugcgggacaguggccaauggaguucuccagaccuucaugcgcauggcguggggcgggucuuaccuggcccuugacuccggauguagaggcugggauugcaucaucagcucuuaccaguaucugauuauccaaaacacgacaugggacgaucacugucaguuuucccggcccagcccuauuggguaccucggauucgugucccagaagacccgcgacaucuauauuucuagacggcugcuuggcacauuuaccuggacccugagcgauuccgaaggccaugacaugcccgggggauacugccucacacgcuggaugcugaucgaggcugaucugaaauguuucggcaacacggccgucgcuaagugcaaugaaaaacacgacgaggaguuuugcgauauguggagacucuucgacuucaacaagcaggccauccaacggcugaaagcgccugcccagaugaauauucagcuuaucaacaaggcugugaaugcccugauuaacgaccaacucaugaugaagaaucaucugcgcgauaucauguguauucccuauugcaacuacagcaaauuuugguaucuuaauaacaccacaaccgggagaacaucucugccucgguguuggcucaucuccaauggaagcuaccugaacgaaacccacuucucugacgauaucgagcagcaggcugacaauaugauuacggaaaugcugcagaaggaguacauggaucgccaaggcaaaacaccgcucgggcugguugaccuuuuuguguucagcaccuccuuuuaucugaucaccauuuuccuccaccuggucaagauccccacacauagacacauugugggaaaaccuugccccaagccucaucggcugaaccacaugggcaucuguucuugcggccuuuacaaacagcccggggugccgguccgcuggaagagaugaggacuagucccuguucccagagcccacuuuuuuuucuuuuuuugaaauaaaauagccugucuuucagaucuaaaaaaaaaaaaaaaaaaaaaaaaaaaaaaaaaaaaaaaaaaaaaaaaaaaaaaaaaaaaaaaaaaaaaaaaaaaaaaaaaaaaaaaaaaaaaaaaaaaa

SEQ ID NO: 28556 - RNA, 1721 nt, Artificial Sequence; identical to SEQ ID NO: 28550
  mRNA product Design a-1 (A100) comprising derived and/or modified sequence from LASV(Pinneo-NIG-1969;Clade I)__AIT17836__GPCmut5 (opt5)

SEQ ID NO: 28557 - RNA, 1721 nt, Artificial Sequence
  mRNA product Design a-1 (A100) comprising derived and/or modified sequence from LASV(ISTH0009-NIG-2011;Clade II)__AIT17404__GPCmut5 (opt5)
aggagagucccgcagucggcguccagcggcucugcuuguucgugugugugucguugcaggccuuauucaagcuuaccaugggccagaucauuaccuucuuucaagaggugccccacgucaucgaagagguuaugaacauugugcugaucgcccucagccugcuugcuauucugaaggggaucuacaauguggccacaugcggacucuucggccuggucuccuuucuucugcucugugggagaucuugcagcacgaccuauaaaggaguguacgaacugcagacacuggagcucgacauggcgucccugaacaugaccaugccucuuucuuguacaaagaauaacagccaucacuauaucaugguuggcaaugaaaccgggcuggagcucacacugaccaacacguccauuaucaaucauaaauucugcaaccuuucugaugcucacaagaaaaaucuguacgaccaugcccucaugagcauuaucuccaccuuucaccugagcauuccgaacuucaaucaguaugaggccaugucuugugauuuuaacggaggcaagaucuccgugcaguacaaucugagccacgcuuaugccgucgacgcugccaaccauugcggcacaauugcgaauggggugcuccaaaccuucaugcggauggccuggggaggcucuuacaucgcucuggauuccggguguggaagcugggacugcaucaugacaucuuaccaguaucuuauuauccagaacaccacgugggaagaucacugucaguuuucccgccccagcccuauuggcuaccuggggcuccugucccaaagaacacgggacaucuauauuucucgcagacuucugggaaccuucacauggacccucagcgauuccgagggcaacgaaacccccggcggguacugccugacacgguggaugcugaucgaggccgagcucaaguguuuuggaaauacggcuguugccaaaugcaacgaaaagcaugacgaggaguucugcgauaugcugcgccuuuuugacuucaauaaacaggcgaucagacggcugaagaccccugcccagaugagcauucagcucaucaacaaagcugugaaugcccugauuaacgaucaacuuaucaugaagaaucaucugcgcgacauuauguguauccccuauugcaacuacucuaaguauugguaccucaaucacacagucaccggcaaaacaucccugccuagauguuggcuggugagcaacgggucuuaccucaaugaaacccacuucagcgacgauaucgaacagcaggcugacaacaugauuacggagcugcuucaaaaggaguauauggaucggcagggaaaaacaccgcugggccucguggaccuguuugucuucuccaccucuuuuuaccugaucagcauuuuccuucaccucaucaagauucccacccaucgccacaucacagggaaaccuugccccaagccucauagacugaaucacaugggaauuuguuccugcggccuguauaaacaccccggcguuccggugaaguggaagcggugaggacuagucccuguucccagagcccacuuuuuuuucuuuuuuugaaauaaaauagccugucuuucagaucuaaaaaaaaaaaaaaaaaaaaaaaaaaaaaaaaaaaaaaaaaaaaaaaaaaaaaaaaaaaaaaaaaaaaaaaaaaaaaaaaaaaaaaaaaaaaaaaaaaaa

SEQ ID NO: 28558 - RNA, 1721 nt, Artificial Sequence
  mRNA product Design a-1 (A100) comprising derived and/or modified sequence from LASV(ISTH2010-NIG-2012;Clade II)__AIT17482__GPCmut5 (opt5)
aggagagucccgcagucggcguccagcggcucugcuuguucgugugugugucguugcaggccuuauucaagcuuaccaugggccagaucauuaccuucuuucaagaggugccccacgucaucgaagagguuaugaacauugugcugaucgcccucagccugcuugcuauucugaaggggaucuacaauguggccacaugcggacucuucggccuggucuccuuucuucugcucugugggagaucuugcagcacgaccuauaaaggaguguacgaacugcagacacuggagcucgacauggcgucccugaacaugaccaugccucuuucuuguacaaagaauaacagccaucacuauaucaugguuggcaaugaaaccgggcuggagcucacacugaccaacacguccauuaucaaucauaaauucugcaaccuuucugaugcucacaagaaaaaucuguacgaccaugcccucaugagcauuaucuccaccuuucaccugagcauuccgaacuucaaucaguaugaggccaugucuugugauuuuaacggaggcaagaucuccgugcaguacaaucugagccacgcuuaugccgucgacgcugccaaccauugcggcacaauugcgaauggggugcuccaaaccuucaugcggauggccuggggaggcucuuacaucgcucuggauuccggguguggaagcugggacugcaucaugacaucuuaccaguaucuuauuauccagaacauuaccugggaagaucacugucaguuuucccgccccagcccuaucggcuaccuggggcuccugucccaaagaacgcgggacauuuauaucucucgcagacuucugggaacauucaccuggacacucagcgauuccgagggcaacgaaacccccggcggguacugccugacccgguggaugcugaucgaggccgagcucaaguguuuuggaaauacagcuguugccaaaugcaacgaaaagcaugacgaggaguucugcgauaugcugcgccuuuuugacuucaauaaacaggcgauuagacggcugaagacgccugcccagaugagcauccagcucauuaacaaagcugugaaugcccugaucaacgaucaacuuauuaugaagaaucaucugcgcgacaucauguguauccccuauugcaacuacucuaaguauugguaccucaaucacaccgucacaggcaaaaccucccugccuagauguuggcuggugagcaacgggucuuaccucaaugaaacacacuucagcgacgauauugaacagcaggcugacaacaugaucaccgagcugcuucaaaaggaguauauugaucggcagggaaaaacgccgcugggccucguggaccuguuugucuucuccacaucuuuuuaccugaucagcauuuuccuucaccucguuaagauccccacccaucgccacgugguggggaaaccuugccccaagccucauagacugaaucacaugggaauuuguuccugcggccuguauaaacaccccggcgucccggugaaguggaagcggugaggacuagucccuguucccagagcccacuuuuuuuucuuuuuuugaaauaaaauagccugucuuucagaucuaaaaaaaaaaaaaaaaaaaaaaaaaaaaaaaaaaaaaaaaaaaaaaaaaaaaaaaaaaaaaaaaaaaaaaaaaaaaaaaaaaaaaaaaaaaaaaaaaaaa

SEQ ID NO: 28559 - RNA, 1721 nt, Artificial Sequence
  mRNA product Design a-1 (A100) comprising derived and/or modified sequence from LASV(Lassa virus/H.sapiens-wt/NGA/2015/ISTH_0543;Clade II)__AVO03639__GPCmut5 (opt5)
aggagagucccgcagucggcguccagcggcucugcuuguucgugugugugucguugcaggccuuauucaagcuuaccaugggccagaucauuaccuucuuucaagaggugccccacgucaucgaagagguuaugaacauugugcugaucgcccucagccugcuugcuauucugaaggggaucuacaauguggccacaugcggacucuucggccuggucuccuuucuucugcucugugggagaucuugcagcacgaccuauaaaggaguguacgaacugcagacacuggagcucgacauggcgaaccugaauaugaccaugccucuuuccuguacaaagaacaauucucaucacuauaucaugguuggcaacgaaaccgggcuggagcucacacugaccaauacgagcauuaucaaccauaaauucugcaaucuuuccgaugcucacaagaaaaaccuguacgaccaugcccucaugucuauuaucagcaccuuucaccuguccauuccgaauuucaaccaguaugaggccaugagcugugauuuuaauggaggcaagaucucugugcaguacaaccugucccacacauaugcugucgacgccgcuaaucauugcggcaccauugccaacggggugcuccaaacauucaugcggauggcguggggaggcagcuacaucgcccuggauucuggguguggauccugggacugcaucaugaccagcuaccaguaucuuguuauucagaacacgacaugggaagaucacugucaguuuucucgccccuccccuaucggcuaccuggggcuccugagccaaagaacccgggacauuuauaucucccgcagacuucugggaacauucaccuggacccucucugauagcgagggcaaugaaacacccggcggguacugccugacgcgguggaugcugauugaggcugagcucaaguguuuuggaaacaccgccguggcuaaaugcaaugaaaagcaugacgaggaguucugcgauaugcugcgccuuuuugacuucaacaaacaggccaucagacggcugaagaccccugcgcagauguccauccagcucauuaauaaagccgucaacgcucugaucaaugaucaacuuauuaugaagaaccaucugcgcgacaucauguguauucccuauugcaauuacagcaaguauugguaccucaaccacacagugacaggcaaaaccucucugccuagauguuggcugguguccaaugggagcuaccucaacgaaacgcacuucucugacgauaucgaacagcaggccgacaauaugaucacagagcugcuucaaaaggaguauauugaucggcagggaaaaaccccgcugggccucgucgaccuguuuguuuucagcaccuccuuuuaccugaucucuauuuuccuucaccucgugaagauccccacacaucgccacauuaccgggaaaccuugccccaagccucauagacugaaccacaugggaaucuguagcugcggccuguauaaacaccccggcgugccggucaaguggaagcggugaggacuagucccuguucccagagcccacuuuuuuuucuuuuuuugaaauaaaauagccugucuuucagaucuaaaaaaaaaaaaaaaaaaaaaaaaaaaaaaaaaaaaaaaaaaaaaaaaaaaaaaaaaaaaaaaaaaaaaaaaaaaaaaaaaaaaaaaaaaaaaaaaaaaa

SEQ ID NO: 28560 - RNA, 1721 nt, Artificial Sequence
  mRNA product Design a-1 (A100) comprising derived and/or modified sequence from LASV(Lassa virus/H.sapiens-wt/NGA/2016/ISTH_0009;Clade II)__AVO03571__GPCmut5 (opt5)
aggagagucccgcagucggcguccagcggcucugcuuguucgugugugugucguugcaggccuuauucaagcuuaccaugggccagaucauuaccuucuuucaagaggugccccacgucaucgaagagguuaugaacauugugcugaucgcccucagccugcuugcuauucugaaggggaucuacaauguggccacaugcggacuccugggccuugucuccuuccugcuccugugugggagaucuugcagcacgaccuauaaaggaguguacgaacugcagacacucgagcuggacauggcgucccuuaacaugaccaugccucugucuuguacaaagaauaacagccaucacuauaucaugguuggcaaugaaaccgggcucgagcugacacuuaccaacacguccauuaucaaucauaaauuuugcaaccugucugaugcucacaagaaaaaucucuacgaccaugcccugaugagcauuaucuccaccuuccaccugagcauuccgaacuuuaaucaguaugaggccaugucuugugauuucaacggaggccggaucuccgugcaguacaaucucagccacucuuaugcugucgacgccgcuaaccauugcggcacaauugccaauggggugcugcaaaccuuuaugcgcauggcguggggaggcuccuacaucgcccuugauagcggguguggaucuugggacugcaucaugacauccuaccaguaucugauuauccagaacaccacgugggaagaucacugucaguucagcagacccuccccuauuggcuaccucgggcugcuuucucaacggacacgcgacaucuauauuagcagacggcugcucggaaccuuuacauggacccuguccgauagcgagggcaacgaaacccccggcggguacugccugacacgcuggaugcucaucgaggcugagcugaaguguuucggaaauacggccguugcuaagugcaacgaaaaacaugacgaggaauuuugcgauaugcuuagacuguucgacuuuaauaagcaggccauccggcgccucaaaaccccugcgcagaugucuauucagcugaucaacaaggccgugaaugcucuuauuaacgaucaacugaucaugaaaaaucaccucagagacauuauguguauccccuauugcaacuacuccaaguauugguaccugaaucacacagucaccggcaagacaagccugccucgguguuggcucgugucuaacgggagcuaccugaaugagacccauuucuccgacgauaucgaacagcaggccgacaacaugauuacggagcuucugcaaaaagaguauaucgaucgccagggaaagacaccgcucggccugguggaccuguucgucuuuucuaccagcuucuaccuuauuuccaucuuucuccaccugguuaaaauucccacccauagacacaucacagggaagccuugccccaaaccucaucggcugaaucacaugggaauuuguagcugcggccucuauaaccaccccggcgugccggugaaguggaaacgcugaggacuagucccuguucccagagcccacuuuuuuuucuuuuuuugaaauaaaauagccugucuuucagaucuaaaaaaaaaaaaaaaaaaaaaaaaaaaaaaaaaaaaaaaaaaaaaaaaaaaaaaaaaaaaaaaaaaaaaaaaaaaaaaaaaaaaaaaaaaaaaaaaaaaa

SEQ ID NO: 28561 - RNA, 1721 nt, Artificial Sequence
  mRNA product Design a-1 (A100) comprising derived and/or modified sequence from LASV(Lassa virus/H.sapiens-wt/NGA/2016/ISTH_0017;Clade II)__AVO03567__GPCmut5 (opt5)
aggagagucccgcagucggcguccagcggcucugcuuguucgugugugugucguugcaggccuuauucaagcuuaccaugggccagaucauuaccuucuuucaagaggugccccacgucaucgaagagguuaugaacauugugcugaucgcccucagccugcuugcuauucugaaggggaucuacaauguggccacaugcggacucuucggccuggucuccuuucuucugcucugugggagaucuugcagcacgaccuauaaaggaguguacgaacugcagacacuggagcucgacauggcgucccugaacaugaccaugccucuuucuuguacaaagaauaacagccaucacuauaucaugguuggcaaugaaaccgggcuggagcucacacugaccaacacguccauuaucaaucauaaauucugcaaccuuucugaugcucacaagaaaaaucuguacgaccaugcccucaugagcauuaucuccaccuuucaccugagcauuccgaacuucaaucaguaugaggccaugucuugugauuuuaacggaggcaagaucuccgugcaguacaaucugagccacacauaugcuauugacgccgcuaaccauugcggcaccaucgccaaugggguccuccaaacauucaugcggauggcguggggaggcucuuacaucgcccuggauuccggguguggaagcugggacugcauuaugaccucuuaccaguaucuuaucauucagaacacgacaugggaagaucacugucaguuuucccgccccagcccuaucggcuaccuggggcuccugucccaaagaacccgggacauuuauaucucucgcagacuucugggaacauucaccuggacccucagcgauuccgagggcaacgaaacacccggcggguacugccugacgcgguggaugcugaucgaggcugagcucaaguguuuuggaaauaccgccguggcuaaaugcaacgaaaagcaugacgaggaguucugcgauaugcugcgccuuuuugacuucaauaaacaggccauuagacggcugaagaccccugcgcagaugagcauccagcucauuaacaaagccguuaaugcucugaucaacgaucaacuuauuaugaagaaucaucugcgcgacaucauguguauccccuauugcaacuacucuaaguauugguaccucaaucacacagugacaggcaaaaccucccugccuagauguuggcuggucagcaacgggucuuaccucaaugaaacgcacuucagcgacgauauugaacagcaggccgacaacaugaucacagagcugcuucaaaaggaguauauggaucggcagggaaaaaccccgcugggccucguggaccuguuuguguucuccaccucuuuuuaccugauuagcaucuuccuucaccucguccgcauucccacacauagacacguuaucgggaagccuugccccaaaccucaucggcugaaucacaugggaauuuguuccugcggccuguauaagcaccccggcgugccggugaaauggaagcgcugaggacuagucccuguucccagagcccacuuuuuuuucuuuuuuugaaauaaaauagccugucuuucagaucuaaaaaaaaaaaaaaaaaaaaaaaaaaaaaaaaaaaaaaaaaaaaaaaaaaaaaaaaaaaaaaaaaaaaaaaaaaaaaaaaaaaaaaaaaaaaaaaaaaaa

SEQ ID NO: 28562 - RNA, 1721 nt, Artificial Sequence
  mRNA product Design a-1 (A100) comprising derived and/or modified sequence from LASV(Lassa virus/H.sapiens-wt/NGA/2018/ISTH_0959;Clade II)__AVV65099__GPCmut5 (opt5)
aggagagucccgcagucggcguccagcggcucugcuuguucgugugugugucguugcaggccuuauucaagcuuaccaugggccagaucauuaccuucuuucaagaggugccccacgucaucgaagagguuaugaacauugugcugaucgcccucagccugcuugcuauucugaaggggaucuacaauguggucacaugcggacucuucggccugguguccuuucuucugcucugugggagaucuugcagcacgaccuauaaaggaguuuacgaacugcagacacuggagcucgacauggccucccugaacaugaccaugccucuuucuuguacaaagaauaacagccaucacuauaucauggugggcaaugaaaccgggcuggagcucacacugaccaacacguccauuaucaaucauaaauucugcaaccuuucugaugcgcacaagaaaaaucuguacgaccaugcucucaugagcauuaucuccaccuuucaccugagcauuccgaacuucaaucaguaugaggccaugucuugugauuuuaacggaggcaagaucuccguccaguacaaucugagccacgccuaugcuauugacgccgcuaaccauugcggcacaaucgccaauggggugcuccaaaccuucaugcggauggcguggggaggcucuuacaucgcccuggauuccggguguggaagcugggacugcauuaugacaucuuaccaguaucuuaucauucagaacaccacgugggaagaucacugucaguuuucccgccccagcccuaucggcuaccuggggcuccugucccaaagaacacgggacauuuauaucucucgcagacuucugggaaccuucacauggacccucagcgauuccgagggcaacgaaacccccggcggguacugccugacacgguggaugcugaucgaggcugagcucaaguguuuuggaaauacggccguugcuaaaugcaacgaaaagcaugacgaggaguucugcgauaugcugcgccuuuuugacuucaauaaacaggccauuagacggcugaagaccccugcgcagaugagcauccagcucauuaacaaagccgugaaugcucugaucaacgaucaacuuauuaugaagaaucaucugcgcgacaucauguguauccccuauugcaacuacucuaaguauugguaccucaaucacacagucaccggcaaaacaucccugccuagauguuggcuggugagcaacgggucuuaccucaaugaaacccacuucagcgacgauauugaacagcaggccgacaacaugaucacggagcugcuucaaaaggaguauauugaucggcagggaaaaacaccgcugggccucguggaccuguuugucuucuccaccucuuuuuaccugaucagcauuuuccuucaccucguuaagauccccacccaucgccacgugauugggaaaccuugccccaagccucauagacugaaucacaugggaaucuguuccugcggccuguauaaacaccccggcgugccggucaaguggaagcggugaggacuagucccuguucccagagcccacuuuuuuuucuuuuuuugaaauaaaauagccugucuuucagaucuaaaaaaaaaaaaaaaaaaaaaaaaaaaaaaaaaaaaaaaaaaaaaaaaaaaaaaaaaaaaaaaaaaaaaaaaaaaaaaaaaaaaaaaaaaaaaaaaaaaa

SEQ ID NO: 28563 - RNA, 1721 nt, Artificial Sequence
  mRNA product Design a-1 (A100) comprising derived and/or modified sequence from LASV(LASV003-NIG-2008;Clade II)__AIT17580__GPCmut5 (opt5)
aggagagucccgcagucggcguccagcggcucugcuuguucgugugugugucguugcaggccuuauucaagcuuaccaugggccagaucauuaccuucuuucaagaggugccccacgucaucgaagagguuaugaacauugugcugaucgcccucagccugcuugcuauucugaaggggaucuacaauguggccacaugcggacucuucggccuggucuccuuucuucugcucugugggagaucuugcagcacgaccuauaaaggaguguacgaacugcagacacuggagcucgacauggcgucccugaacaugaccaugccucuuucuuguacaaagaauaacagccaucacuauaucaugguuggcaaugaaaccgggcuggagcucacacugaccaacacguccauuaucaaucauaaauucugcaaccuuucugaugcucacaagaaaaaucuguacgaccaugcccucaugagcauuaucuccaccuuucaccugagcauuccgaacuucaaucaguaugaggccaugucuugugauuuuaacggaggcaagaucuccgugcaguacaaucugagccacacauaugcugucgacgccgcuaaccauugcggcaccauugccaauggggugcuccaaacauucaugcggauggcguggggaggcucuuacaucgcccuggauuccggguguggaagcugggacugcaucaugaccucuuaccaguaucuuauuauccagaacacgacaugggaagaucacugucaguuuucccgccccagcccuauuggcuaccuggggcuccugucccaaagaacccgggacaucuauauuucucgcagacuucugggaacauucaccuggacccucagcgauuccgagagcaacgaaacacccggcggcuacugccugacgcgguggaugcugaucgaggcugagcucaaguguuuugggaauaccgccguugcuaaaugcaacgaaaagcaugacgaggaguucugcgauaugcugcgccuuuuugacuucaauaaacaggccaucagacggcugaaggcgccugcccagaugucuauucagcucaucaacaaagcugugaaugcccugauuaacgaucaacuuaucaugaagaaucaucugcgcgacauuauguguauccccuauugcaacuacuccaaguauugguaccucaaucacacagucaccggaagaacaagccugccucgguguuggcuggugucuaacggcagcuaccucaaugaaacccacuucuccgacgauaucgaacagcaggcugacaacaugauuacggagcugcuucaaaaagaguauauggaucgccaggggaagacaccgcugggacucguggaccuguuugucuucucuaccagcuuuuaccugaucuccauuuuccuucaccucguuaaaauccccacccauagacacgugauuggcaagccuugccccaaaccucaucggcugaaucacauggggaucuguagcugcggacuguauaagcaccccggcgugccggucaaauggaagcgcugaggacuagucccuguucccagagcccacuuuuuuuucuuuuuuugaaauaaaauagccugucuuucagaucuaaaaaaaaaaaaaaaaaaaaaaaaaaaaaaaaaaaaaaaaaaaaaaaaaaaaaaaaaaaaaaaaaaaaaaaaaaaaaaaaaaaaaaaaaaaaaaaaaaaa

SEQ ID NO: 28564 - RNA, 1721 nt, Artificial Sequence
  mRNA product Design a-1 (A100) comprising derived and/or modified sequence from LASV(LASV035-NIG-2009;Clade II)__AIT17588__GPCmut5 (opt5)
aggagagucccgcagucggcguccagcggcucugcuuguucgugugugugucguugcaggccuuauucaagcuuaccaugggccagaucauuaccuucuuucaagaggugccccacgucaucgaagagguuaugaacauugugcugaucgcccucagccugcuugcuauucugaaggggaucuacaauguggccacaugcggacucuucggccuggucuccuuucuucugcucugugggagaucuugcagcacgaccuauaaaggaguguacgaacugcagacacuggagcucgacauggcgucccugaacaugaccaugccucuuucuuguacaaagaauaacagccaucacuauaucaugguuggcaaugaaaccgggcuggagcucacacugaccaacacguccauuaucaaucauaaauucugcaaccuuucugaugcucacaagaaaaaucuguacgaccaugcccucaugagcauuaucuccaccuuucaccugagcauuccgaacuucaaucaguaugaggccaugucuugugauuuuaacggaggcaagaucuccgugcaguacaaucugagccacgcuuaugccgucgacgcugccaaccauugcggcacaauugcgaauggggugcuccaaaccuucaugcggauggccuggggaggcucuuacaucgcucuggauuccggguguggaagcugggacugcaucaugacaucuuaccaguaucuuauuauccagaacaccacgugggaagaucacugucaguuuucccgccccagcccuauuggcuaccuggggcuccugucccaaagaacacgggacaucuauauuucucgcagacuucugggaaccuucacauggacccucagcgauuccgagggcaacgaaacccccggcggguacugccugacacgguggaugcugaucgaggccgagcucaaguguuuuggaaauacggcuguugccaaaugcaacgaaaagcaugacgaggaguucugcgauaugcugcgccuuuuugacuucaauaaacaggcgaucagacggcugaaggccccugcucagaugagcauucagcucaucaacaaagccgugaaugcucugauuaacgaucaacuuaucaugaagaaucaucugcgcgacauuauguguauccccuauugcaacuacucuaaguauugguaccucaaucacaccgucacaggcaaaaccucccugccuagauguuggcuggugagcaacgggucuuaccucaaugaaacacacuucagcgacgauaucgaacagcaggccgacaacaugauuaccgagcugcuucaaaaggaguauaucgaucggcagggaaaaacgccgcugggccucguggaccuguuugucuucuccacaucuuuuuaccugauuagcaucuuccuucaccucguuaagauucccacccaucgccacgugaucgggaaaccuugccccaagccucauagacugaaucacaugggaauuuguuccugcggccuguauaaacaccccggcgugccggucaaguggaagcggugaggacuagucccuguucccagagcccacuuuuuuuucuuuuuuugaaauaaaauagccugucuuucagaucuaaaaaaaaaaaaaaaaaaaaaaaaaaaaaaaaaaaaaaaaaaaaaaaaaaaaaaaaaaaaaaaaaaaaaaaaaaaaaaaaaaaaaaaaaaaaaaaaaaaa

SEQ ID NO: 28565 - RNA, 1721 nt, Artificial Sequence
  mRNA product Design a-1 (A100) comprising derived and/or modified sequence from LASV(LASV1000-NIG-2009;Clade II)__AIT17782__GPCmut5 (opt5)
aggagagucccgcagucggcguccagcggcucugcuuguucgugugugugucguugcaggccuuauucaagcuuaccaugggccagaucauuaccuucuuucaagaggugccccacgucaucgaagagguuaugaacauugugcugaucgcccucagccugcuugcuauucugaaggggaucuacaauguggccacaugcggacucuucggccuggucuccuuucuucugcucugugggagaucuugcagcacgaccuauaaaggaguguacgaacugcagacacuggagcucgacauggcgucccugaacaugaccaugccucuuucuuguacaaagaauaacagccaucacuauaucaugguuggcaaugaaaccgggcuggagcucacacugaccaacacguccauuaucaaucauaaauucugcaaccuuucugaugcucacaagaaaaaucuguacgaccaugcccucaugagcauuaucuccaccuuucaccugagcauuccgaacuucaaucaguaugaggccaugucuugugauuuuaacggaggcaagaucuccgugcaguacaaucugagccacacauaugcugucgacgccgcuaaccauugcggcaccauugccaauggggugcuccaaacauucaugcggauggcguggggaggcucuuacaucgcccuggauuccggguguggaagcugggacugcaucaugaccucuuaccaguaucuuauuauccagaacacgacaugggaagaucacugucaguuuucccgccccagcccuauuggcuaccuggggcuccugucccaaagaacccgggacaucuauauuucucgcagacuucugggaacauucaccuggacccucagcgauuccgagggcaacgaaacacccggcggguacugccugacgcgguggaugcugaucgaggcugagcucaaguguuuuggaaauaccgccguugcuaaaugcaacgaaaagcaugacgaggaguucugcgauaugcugcgccuuuuugacuucaauaaacaggccaucaagagacugaaaaccccugcgcagaugagcauucagcucaucaacaaggccgugaaugcucugauuaacgaucaacuuaucaugaagaaucaucugcgggacauuauguguauccccuauugcaacuacucuaaauauugguaccucaaucacacagucacaggcaagaccucccugccucgcuguuggcuggugagcaacgggucuuaccucaaugaaacgcacuucagcgacgauaucgaacagcaggccgacaacaugauuacagagcugcuucaaaaagaguauaucgauagacagggaaagaccccgcugggccucguggaccuguuugucuucuccaccucuuuuuaccugauuagcaucuuccuucaccucguuaaaauucccacacaucggcacgugguggggaagccuugccccaaaccucaucgccugaaucacaugggaaucuguuccugcggccuguauaagcaccccggcgucccggugaaguggaaaagaugaggacuagucccuguucccagagcccacuuuuuuuucuuuuuuugaaauaaaauagccugucuuucagaucuaaaaaaaaaaaaaaaaaaaaaaaaaaaaaaaaaaaaaaaaaaaaaaaaaaaaaaaaaaaaaaaaaaaaaaaaaaaaaaaaaaaaaaaaaaaaaaaaaaaa

SEQ ID NO: 28566 - RNA, 1721 nt, Artificial Sequence
  mRNA product Design a-1 (A100) comprising derived and/or modified sequence from LASV(LASV221-NIG-2010;Clade II)__AIT17624__GPCmut5 (opt5)
aggagagucccgcagucggcguccagcggcucugcuuguucgugugugugucguugcaggccuuauucaagcuuaccaugggccagaucauuaccuucuuucaagaggugccccacgucaucgaagagguuaugaacauugugcugaucgcccucagccugcuugcuauucugaaggggaucuacaauguggccacaugcggacucuucggccuggucuccuuucuucugcucugugggagaucuugcagcacgaccuauaaaggaguguacgaacugcagacacuggagcucgacauggcgucccugaacaugaccaugccucuuucuuguacaaagaauaacagccaucacuauaucaugguuggcaaugaaaccgggcuggagcucacacugaccaacacguccauuaucaaucauaaauucugcaaccuuucugaugcucacaagaaaaaucuguacgaccaugcccucaugagcauuaucuccaccuuucaccugagcauuccgaacuucaaucaguaugaggccaugucuugugauuuuaacggaggcaagaucuccgugcaguacaaucugagccacacauaugcuauugacgccgcuaaccauugcggcaccaucgccaaugggguccuccaaacauucaugcggauggcguggggaggcucuuacaucgcccuggauuccggguguggaagcugggacugcauuaugaccucuuaccaguaucuuaucauucagaacacgacaugggaagaucacugucaguuuucccgccccagcccuaucggcuaccuggggcuccugucccaaagaacccgggacauuuauaucucucgcagacuucugggaacauucaccuggacccucagcgauuccgagggcaacgaaacacccggcggguacugccugacgcgguggaugcugaucgaggcugagcucaaguguuuuggaaauaccgccguggcuaaaugcaacgaaaagcaugacgaggaguucugcgauaugcugcgccuuuuugacuucaauaaacaggccauuagacggcugaagaccccugcgcagaugagcauccagcucauuaacaaagccguuaaugcucugaucaacgaucaacuuauuaugaagaaucaucugcgcgacaucauguguauccccuauugcaacuacucuaaguauugguaccucaaucacacagugacaggcaaaaccucccugccuagauguuggcuggucagcaacgggucuuaccucaaugaaacgcacuucagcgacgauauugaacagcaggccgacaacaugaucacagagaugcugcaaaaggaguauauggaucggcagggaaaaaccccgcuuggccugguggaccucuuuguguucuccaccucuuuuuaccugauuagcaucuuccugcaccuugucaagauucccacacaucgccacguuaucgggaaaccuugccccaagccucauagacucaaucacaugggaauuuguuccugcggccuguauaaacaccccggcgugccggugaaguggaagcggugaggacuagucccuguucccagagcccacuuuuuuuucuuuuuuugaaauaaaauagccugucuuucagaucuaaaaaaaaaaaaaaaaaaaaaaaaaaaaaaaaaaaaaaaaaaaaaaaaaaaaaaaaaaaaaaaaaaaaaaaaaaaaaaaaaaaaaaaaaaaaaaaaaaaa

SEQ ID NO: 28567 - RNA, 1721 nt, Artificial Sequence
  mRNA product Design a-1 (A100) comprising derived and/or modified sequence from LASV(LASV237-NIG-2010;Clade II)__AIT17638__GPCmut5 (opt5)
aggagagucccgcagucggcguccagcggcucugcuuguucgugugugugucguugcaggccuuauucaagcuuaccaugggccagaucauuaccuucuuucaagaggugccccacgucaucgaagagguuaugaacauugugcugaucgcccucagccugcuugcuauucugaaggggaucuacaauguggccacaugcggacucuucggccuggucuccuuucuucugcucugugggagaucuugcagcacgaccuauaaaggaguguacgaacugcagacacuggagcucgacauggcgucccugaacaugaccaugccucuuucuuguacaaagaauaacagccaucacuauaucaugguuggcaaugaaaccgggcuggagcucacacugaccaacacguccauuaucaaucauaaauucugcaaccuuucugaugcucacaagaaagaccuguacgaucaugcccucaugagcauuaucuccaccuuucaccugagcauuccgaauuucaaccaguaugaggccaugucuugugacuuuaauggaggcaagaucuccgugcaguacaaccugagccacacauaugcugucgaugccgcuaaucauugcggcaccauugccaacggggugcuccaaacauucaugcggauggcguggggaggcucuuacaucgcccuggacuccggguguggaagcugggauugcaucaugaccucuuaccaguaucuuauuauccagaauacgacaugggaagaccacugucaguuuucccgccccagcccuauuggcuaccuggggcuccugucccaaagaacccgggauaucuauauuucucgcagacuucugggaacauucaccuggacccucagcgacuccgagggcaacgaaacacccggcggguacugccugacgcgguggaugcugaucgaggcugagcucaaguguuuuggaaacaccgccguugcuaaaugcaaugaaaagcaugaugaggaguucugcgacaugcugcgccuuuuugauuucaacaaacaggccaucagacggcugaagaccccugcgcagaugagcauucagcucaucaauaaagccgugaacgcucugauuaaugaccaacuuaucaugaagaaccaucugcgcgacauuauguguauccccuauugcaauuacucuaaguauugguaccucaaccacacagucacaggcaaaaccucccugccuagauguuggcuggugagcaaugggucuuaccucaacgaaacgcacuucagcgaugacaucgaacagcaggccgauaauaugauuacagagcugcuucaaaaggaguauauggaccggcagggaaaaaccccgcugggccucguggaucuguuugucuucuccaccucuuuuuaccugaucagcauuuuccuucaccucaucaagauucccacacaucgccacaucaccgggaaaccuugccccaagccucauagacugaaccacaugggaauuuguuccugcggccuguauaaacaccccggcguuccggugaaguggaagcggugaggacuagucccuguucccagagcccacuuuuuuuucuuuuuuugaaauaaaauagccugucuuucagaucuaaaaaaaaaaaaaaaaaaaaaaaaaaaaaaaaaaaaaaaaaaaaaaaaaaaaaaaaaaaaaaaaaaaaaaaaaaaaaaaaaaaaaaaaaaaaaaaaaaaa

SEQ ID NO: 28568 - RNA, 1721 nt, Artificial Sequence
  mRNA product Design a-1 (A100) comprising derived and/or modified sequence from LASV(LASV253-NIG-2011;Clade II)__AIT17670__GPCmut5 (opt5)
aggagagucccgcagucggcguccagcggcucugcuuguucgugugugugucguugcaggccuuauucaagcuuaccaugggccagaucauuaccuucuuucaagaggugccccacgucaucgaagagguuaugaacauugugcugaucgcccucagccugcuugcuauucugaaggggaucuacaauguggccacaugcggacucuucggccuggucuccuuucuucugcucugugggagaucuugcagcacgaccuauaaaggaguguacgaacugcagacacuggagcucgacauggcgucccugaacaugaccaugccucuuucuuguacaaagaauaacagccaucacuauaucaugguuggcaaugaaaccgggcuggagcucacacugaccaacacguccauuaucaaucauaaauucugcaaccuuucugaugcucacaagaaaaaucuguacgaccaugcccucaugagcauuaucuccaccuuucaccugagcauuccgaacuucaaucaguaugaggccaugucuugugauuuuaacggaggcaagaucuccgugcaguacaaucugagccacacauaugcugucgacgccgcuaaccauugcggcaccauugccaauggggugcuccaaacauucaugcggauggcguggggaggcucuuacaucgcccuggauuccggguguggaagcugggacugcaucaugaccucuuaccaguaucuuauuauccagaacacgacaugggaagaucacugucaguuuucccgccccagcccuauuggcuaccuggggcuccugucccaaagaacccgggacaucuauauuucucgcagacuucugggaacauucaccuggacccucagcgauuccgagggcaacgaaacacccggcggguacugccugacgcgguggaugcugaucgaggcugagcucaaguguuuuggaaauaccgccguugcuaaaugcaacgaaaagcaugacgaggaguucugcgauaugcugcgccuuuuugacuucaauaaacaggccaucagacggcugaaggcgccugcccagaugagcauucagcucaucaacaaagcugugaaugcccugauuaacgaucaacuuaucaugaagaaucaucugcgcgacauuauguguauccccuauugcaacuacucuaaguauugguaccucaaucacacagucaccggcagaacaucccugccucgguguuggcuggugagcaacgggucuuaccucaaugaaacccacuucagcgacgauaucgaacagcaggcugacaacaugauuacggagcugcuucaaaaagaguauaucgaucgccagggaaagacaccgcugggccucguggaccuguuugucuucuccaccucuuuuuaccugauuagcaucuuccuucaccucguuaaaauucccacccauagacacaucauugggaagccuugccccaaaccucaucggcugaaucacaugggaaucuguuccugcggccuguauaagcaccccggcgugccggugaaauggaagcgcugaggacuagucccuguucccagagcccacuuuuuuuucuuuuuuugaaauaaaauagccugucuuucagaucuaaaaaaaaaaaaaaaaaaaaaaaaaaaaaaaaaaaaaaaaaaaaaaaaaaaaaaaaaaaaaaaaaaaaaaaaaaaaaaaaaaaaaaaaaaaaaaaaaaaa

SEQ ID NO: 28569 - RNA, 1721 nt, Artificial Sequence
  mRNA product Design a-1 (A100) comprising derived and/or modified sequence from LASV(LASV254-NIG-2011;Clade II)__AIT17674__GPCmut5 (opt5)
aggagagucccgcagucggcguccagcggcucugcuuguucgugugugugucguugcaggccuuauucaagcuuaccaugggccagaucauuaccuucuuucaagaggugccccacgucaucgaagagguuaugaacauugugcugaucgcccucagccugcuugcuauucugaaggggaucuacaauguggccacaugcggacucuucggccuggucuccuuucuucugcucugugggagaucuugcagcacgaccuauaaaggaguguacgaacugcagacacuggagcucgacaugaccaaccugaauaugacaaugccucuuuccuguaccaagaacaauucucaucacuauaucaugguuggcaacgaaacagggcuggagcucacccugacgaauaccagcauuaucaaccauaaauucugcaaucuuuccgaugcgcacaagaaaaaccuguacaaucaugcucucaugucuauuaucagcacauuucaccuguccauuccgaacuucaaucaguaugaggccaugagcugugacuuuaacggaggcaagaucucugugcaguacaaucugucccacagcuaugccgucgaugcugccaaccauugcggcaccauugcuaacggggugcuccaaacauucaugcggauggccuggggaggcucuuacaucgcgcuggacuccggguguggaaauugggauugcaucaugaccagcuaccaguaucuuauuauccagaacacgacaugggaagaccacugucaguuuucucgccccuccccuauuggcuaccuggggcuccugagccaaagaacccgggauaucuauauuucccgcagacuucugggaacauucaccuggacccucucugacagcgagggcaaugaaacacccggcggguacugccugacgcgguggaugcugaucgaggccgagcucaaguguuuuggaaacaccgcuguugccaaaugcaaugaaaagcaugaugaggaguucugcgacaugcugcgccuuuuugauuucaacaaacaggcuaucagacggcugaagaccccugcccaggcgaauauucagcucaucaacaaagccgugaaugcucugauuaacgaccaacuuaucaugaagaaucaucugcgcgauauuauguguauccccuauugcaacuacuccaaguauugguaccucaaucacacagucacaggcaaaaccagccugccuagauguuggcuggugucuaacggguccuaccucaaugaaacgcacuucagcgacgacaucgaacagcaggccgauaacaugauuacagagcugcuucaaaaggaguauauggaccggcagggaaaaaccccgcugggccucguggaucuguuugucuucucuaccagcuuuuaccugaucuccauuuuccuucaccucguuaagauccccacacaucgccacgugauugggaaaccuugccccaagccucauagacugaaccacaugggaaucuguucuugcggccuguauaaacaccccggcgugccggucaaguggaagcggugaggacuagucccuguucccagagcccacuuuuuuuucuuuuuuugaaauaaaauagccugucuuucagaucuaaaaaaaaaaaaaaaaaaaaaaaaaaaaaaaaaaaaaaaaaaaaaaaaaaaaaaaaaaaaaaaaaaaaaaaaaaaaaaaaaaaaaaaaaaaaaaaaaaaa

SEQ ID NO: 28570 - RNA, 1721 nt, Artificial Sequence
  mRNA product Design a-1 (A100) comprising derived and/or modified sequence from LASV(Nig08-A19;Clade III)__ADU56618__GPCmut5 (opt5)
aggagagucccgcagucggcguccagcggcucugcuuguucgugugugugucguugcaggccuuauucaagcuuaccaugggccagaucgugaccuucuuucaagaggucccccacguuauugaagaggugaugaacaucgugcugauugcccucagcauccuggcuauucuuaaggggcuguacaauaucgccacaugcggacucaucggccuggucacguuccuucugcucuccgggagaucuuguagcaugaccuauaaaggaguguacgaacugcagacacuggagcucaacaugaauacccugaacaugacaaugccucuuuccugcaccaagaauaacucucaucacuauauuaugguuggcaaugaaacagggcuggagcucacccugacgaacaccagccuucugcaucacaaauuuuguaaucucuccgacgcgcauaagaaaaaccuguacgaucacacacugaugucuaucauuagcaccuuccaccucuccaucccgaauuuuaaccaguaugaggcuaugagcugcgacuucaauggaggcaagauuacagugcaguacaaccugucucauuccuaugccaucgaugccgcuaaucacuguggcaccgucgccaacggggugcuucaaacguuuaugcggauggcuuggggaggcagcuacauugcccuggacucugggugcggaaagugggauuguaucaugacauccuaccaguaucucaucauucagaacaccacaugggaagaccauugccaguucagccgccccucuccuaucggcuaccuggggcuucugucccaaagaacccgggauauuuauaucagccgcagacuccugggaaccuuuacauggacgcuguccgacucugagggcaaugaaacccccggcggguacugucucacacgguggaugcugauugaggcggagcuuaaaugcuucggaaacaccgccguugcuaaguguaaugaaaaacacgaugaggaauuuugcgacaugcugcgccucuucgauuuuaacaagcaggccaucagacggcugaaagcuccugcccagaugagcauccagcuuauuaauaaggcggugaacgcccugaucaaugaccaacucauuaugaagaaccaucugcgcgauaucaugugcauucccuauuguaauuacuccaaauauugguaccugaaccacacaagcaccggcagaacgucucucccucggugcuggcuggucuccaaugggagcuaccuuaacgagacacacuucucugacgacaucgaacagcaggcugauaauaugaucaccgagaugcugcaaaaggaguaucucgaccgccagggaaaaaccccgcugggccugguggaucuuuucguguuuagcacauccuucuaccucauuucuaucuuucugcaucuggucaagauucccacccacagacauaucguugggaaaccuugucccaagccucaccggcucaaccacaugggaauuugcagcuguggccuguauaaacagcccggcgugccggugcgcuggaagagaugaggacuagucccuguucccagagcccacuuuuuuuucuuuuuuugaaauaaaauagccugucuuucagaucuaaaaaaaaaaaaaaaaaaaaaaaaaaaaaaaaaaaaaaaaaaaaaaaaaaaaaaaaaaaaaaaaaaaaaaaaaaaaaaaaaaaaaaaaaaaaaaaaaaaa

SEQ ID NO: 28571 - RNA, 1724 nt, Artificial Sequence
  mRNA product Design a-1 (A100) comprising derived and/or modified sequence from LASV(G1180-SLE-2010;Clade IV)__AIT17168__GPCmut5 (opt5)
aggagagucccgcagucggcguccagcggcucugcuuguucgugugugugucguugcaggccuuauucaagcuuaccaugggccagaucgugaccuucuuucaagaggucccccacguuauugaagaggugaugaacaucgugcugauugcccucagcauccuggcuguccuuaaggggcuguacaauuucgccacaugcggacucgugggccugcuuacguuucugcuccugugugggagauccugcaccgcgucucgguauaaaggaguuuacgaacugcagacacucgagcugaacauggaaacccuuaauaugacaaugccucugagcuguaccaagaacaauucccaucacuauauuauggugggcaacgagacagggcucgagcugacccuuacgaauaccucuaucaucaaccauaaauucugcaaucugagcgacgcucacaagaaaaaccucuacgaucaugcccugauguccauuaucucuacauuucaccugagcauuccgaauuucaaccaguaugaagccauguccugugacuuuaauggaggcaagaucagcguccaguacaaccucucucacuccuaugcuggcgaugccgcuaaucauugcgggaccguggccaacggaguucugcaaacauucaugcgcauggcguggggcgggagcuacauugcccuugacucuggauguggcuccugggauugcaucaugaccagcuaccaguaucugauuauccagaacacgacaugggaggaccacugucaguuuucuagacccuccccuaucggguaccucggacugcuuagccaacggacccgcgauauuuauaucuccagacggcugcucggcacauucaccuggacccugucugacagcgaaggcaaggauacacccgggggauacugccugacgcgcuggaugcucauugaggcugagcugaaauguuuuggcaauaccgccguggcuaagugcaacgaaaaacaugacgaggaguucugcgauaugcuuagacuguuugacuucaauaagcaggccauccagcggcucaaagcgccugcccagauguccauucaacugaucaacaaggcugucaaugcccuuaucaacgaucagcugauuaugaagaaucaccuccgcgacaucauguguauucccuauugcaacuacagcaaauauugguaccugaaucacacaaccacagggaagaccucucugccuaaauguuggcucguguccaacggaagcuaccugaaugaaacgcauuucucugacgauaucgaacagcaagcugacaacaugauuacagagaugcuucagaaggaguauauggaaagacagggcaaaaccccgcuggggcucguggaucuguuugucuucagcaccuccuuuuaccugaucucuaucuuccuucaccucguuaagauucccacacaucggcacaucgugggaaaaagcugcccuaagccccaucgccugaaucacaugggcauuuguuccugcggccuguauaagcagccuggggugcccgucaaauggaagagaugaggacuagucccuguucccagagcccacuuuuuuuucuuuuuuugaaauaaaauagccugucuuucagaucuaaaaaaaaaaaaaaaaaaaaaaaaaaaaaaaaaaaaaaaaaaaaaaaaaaaaaaaaaaaaaaaaaaaaaaaaaaaaaaaaaaaaaaaaaaaaaaaaaaaa

SEQ ID NO: 28572 - RNA, 1724 nt, Artificial Sequence
  mRNA product Design a-1 (A100) comprising derived and/or modified sequence from LASV(G1442-SLE-2011;Clade IV)__AIT17180__GPCmut5 (opt5)
aggagagucccgcagucggcguccagcggcucugcuuguucgugugugugucguugcaggccuuauucaagcuuaccaugggccagaucgugaccuucuuucaagaggucccccacguuauugaagaggugaugaacaucgugcugauugcccucagcauccuggcuguccuuaaggggcuguacaauguggccacaugcggacucauuggccugguuacguuccuucugcucugugggagauccugcaccacaacccuguauaaaggaguguacgaacugcagacacucgagcugaacauggaaacccuuaauaugacaaugccucugucuuguaccaagaacaauagccaucacuauauccgggucggcaacgagacggggcucgagcugacccuuacaaauaccuccaucauuaaccauaaauuuugcaaucugucugacgcgcacaagaaaaaccucuacgaucaugcucugaugagcaucauuuccacauuccaccugucuaucccgaauuuuaaccaguaugaagccaugagcugugacuucaauggaggcaagauuuccgugcaguacaaccucagccacucuuaugccggcgaugcugccaaucauugcgggaccguugcuaacggagugcugcaaacguuuaugcgcauggccuggggcggguccuacaucgcgcuugacagcggauguggcaacugggauugcauuaugacaucuuaccaguaucugaucauccagaauaccacaugggacgaucacugucaguucuccagacccagcccuauuggguaccucggacugcuuucucaacggacccgcgacgucuauaucuccagacggcugcucggcaccuuuacauggacgcugagcgauuccgagggcaaggacacccccgggggauacugccugacacgcuggaugcucauugaagccgagcugaaauguuucggcaacaccgcuguggccaagugcaaugagaaacaugaugaagaguuuugcgacaugcuuagacuguucgauuuuaacaagcaggcuauccagcggcucaaagccccugcgcagaugucuauucaacugaucaauaaggccgugaacgcucuuaucaaugaccagcugauuaugaagaaccaccuccgcgacaucauguguauucccuauugcaauuacagcaaauauugguaccugaacaauacagccaccgggaagacgucccugccuaaauguuggcucaucagcaacggaucuuaccugaaugaaacacacuucuccgaugacauugagcaggaagcugauaacaugaucaccgagaugcuucaaaaggaguauauggaaagacagggcaaaaccccgcuggggcucgucgaccuguucguuuuuagcacaucuuucuaccugaucagcauuuuucuucaucucgugaagauccccacccaccggcauauugugggaaaauccugcccuaagccccaccgccugaaucauaugggcaucuguucuugcggccuguauaagcagccugggguccccgugagauggaaacggugaggacuagucccuguucccagagcccacuuuuuuuucuuuuuuugaaauaaaauagccugucuuucagaucuaaaaaaaaaaaaaaaaaaaaaaaaaaaaaaaaaaaaaaaaaaaaaaaaaaaaaaaaaaaaaaaaaaaaaaaaaaaaaaaaaaaaaaaaaaaaaaaaaaaa

SEQ ID NO: 28573 - RNA, 1724 nt, Artificial Sequence
  mRNA product Design a-1 (A100) comprising derived and/or modified sequence from LASV(G3010-SLE-2013;Clade IV)__AIT17344__GPCmut5 (opt5)
aggagagucccgcagucggcguccagcggcucugcuuguucgugugugugucguugcaggccuuauucaagcuuaccaugggccagaucgugaccuucuuucaagaggucccccacguuauugaagaggugaugaacaucgugcugauugcccucagcauccuggcuguccuuaaggggcuguacaauuucgccacaugcggacucgugggccugguuacguuucuucugcucugugggagauccugcaccacaucucuguauaaaggaguguacgaacugcagacccucgagcugaacauggaaacacuuaauaugaccaugccucugagcuguacaaagaacaauucccaucacuauauuauggucggcaacgagaccgggcucgagcugacgcuuaccaauacaucuaucaucaaccauaaauucugcaaucugagcgacgcgcacaagaaaaaccucuacaaucaugcucugauguccauuaucucuaccuuucaccugagcauuccgaacuucaaucaguaugaagccauguccugugauuuuaacggaggcaagaucagcgugcaguacaaucucucucacuccuaugccggcgacgcugccagccauugcgggacaguugcuaacggagugcugcaaaccuucaugcggauggccuggggcgggucuuacauugcgcuugauuccggauguggcaagugggacugcaucaugacgagcuaccaguaucugauuauccagaacacaaccugggaggaucacugucaguuuucucgccccuccccuaucggguaccucggacugcuuagccaaagaacacgggacauuuauaucucccgcagacugcucggcaccuucaccuggacacugucugauagcgaaggcaaagacacgcccgggggauacugccugacccgguggaugcucauugaggccgagcugaaguguuuuggcaauacagcugucgccaaaugcaacgaaaagcaugaugaggaguucugcgacaugcuucgccuguuugauuucaauaaacaggcuauccagagacucaagaccccugcccagauguccauucaacugaucaacaaggcggugaaugcccuuaucaacgaccagcugauuaugaaaaaucaccuccgggauaucauguguauucccuauugcaacuacagcaaguauugguaccugaaucacacaaccacggggaaaacaucucugccuaaguguuggcucguguccaacggaagcuaccugaaugaaacccauuucucugacgacaucgaacagcaagcugauaacaugauuaccgagaugcuucagaaagaguauauggaacgccagggcaagacaccgcuggggcucgucgaccuguuuguuuucagcaccuccuuuuaccugaucucuaucuuccuucaccucgugaaaauucccacacauagacacaucgugggaaagagcugcccuaagccccaucggcugaaucacaugggcauuuguuccugcggccuguauaaacagccugggguccccgugcgcuggaagagaugaggacuagucccuguucccagagcccacuuuuuuuucuuuuuuugaaauaaaauagccugucuuucagaucuaaaaaaaaaaaaaaaaaaaaaaaaaaaaaaaaaaaaaaaaaaaaaaaaaaaaaaaaaaaaaaaaaaaaaaaaaaaaaaaaaaaaaaaaaaaaaaaaaaaa

SEQ ID NO: 28574 - RNA, 1724 nt, Artificial Sequence
  mRNA product Design a-1 (A100) comprising derived and/or modified sequence from LASV(G502-SLE-2009;Clade IV)__AIT17126__GPCmut5 (opt5)
aggagagucccgcagucggcguccagcggcucugcuuguucgugugugugucguugcaggccuuauucaagcuuaccaugggccagaucgugaccuucuuucaagaggucccccacguuauugaagaggugaugaacaucgugcugauugcccucagcauccuggcuguccuuaaggggcuguacaauuucgccacaugcggacucgugggccugcuuacguuucugcuccugugugggagauccugcaccacaggacuguauaaaggcguuuacgaacuccagacccuggagcuuaacauggaaacacugaauaugaccaugccucucucuuguacaaagaacaauagccaucacuauauuaugguggggaacgagaccggacuggagcuuacgcugaccaauacauccaucaucaaccauaaauucugcaaucucucugacgcgcacaagaaaaaccuguacgaucaugcucugaugagcauuaucuccaccuuucaccucucuauuccgaauuucaaccaguaugaagccaugagcugugacuuuaauggcggcaagaucuccguccaguacaaccugagccacucuuaugccggggaugcugccgaccauugcggaacaguggcuaauggcguucuucaaaccuucaugcggauggccuggggaggguccuacauugcgcuggauagcggcugugggcgcugggacugcaucaugacgucuuaccaguaucucauuauccagaacacaaccugggaggaucacugucaguuuuccagacccagcccuaucggauaccugggccuucugucucaacggacacgcgacauuuauaucuccagacggcuccugggcaccuucaccuggacacugagcgauuccgaagggaaggacacgcccggaggcuacugccucacccgcuggaugcugauugaggccgagcuuaaauguuuugggaacacagcuguggccaagugcaaugaaaaacaugaugaggaguucugcgacaugcugagacucuuugauuucaacaagcaggcuauccagcggcugaaagccccugcgcagaugucuauucaacuuaucaauaaggccgucaacgcucugaucaaugaccagcucgugaugaagaaccaucugcgcgacauuauguguauccccuauugcaauuacagcagauauugguaccugaaccacaccacaaccggacggacgucccucccuaaauguuggcuggugagcaauggcucuuaccuuaacgaaacacacuucuccgaugacauugaacagcaagccgauaauaugaucaccgagaugcugcagaaggaguauauggaacgccaggggaaaaccccgcucggacuggucgaccuguuuguuuucagcacaucuuuuuaccuuauuagcaucuuccuccaccuggugaagauccccacccauagacacauugugggcaaauccugcccuaagccccaucggcugaaccacaugggcaucuguucuugcgggcucuauaaacagccuggaguccccgugaaguggaagcgcugaggacuagucccuguucccagagcccacuuuuuuuucuuuuuuugaaauaaaauagccugucuuucagaucuaaaaaaaaaaaaaaaaaaaaaaaaaaaaaaaaaaaaaaaaaaaaaaaaaaaaaaaaaaaaaaaaaaaaaaaaaaaaaaaaaaaaaaaaaaaaaaaaaaaa

SEQ ID NO: 28575 - RNA, 1724 nt, Artificial Sequence
  mRNA product Design a-1 (A100) comprising derived and/or modified sequence from LASV(G733-SLE-2010;Clade IV)__AIT17154__GPCmut5 (opt5)
aggagagucccgcagucggcguccagcggcucugcuuguucgugugugugucguugcaggccuuauucaagcuuaccaugggccagaucgugaccuucuuucaagaggucccccacguuauugaagaggugaugaacaucgugcugauugcccucagcauccuggcuguccuuaaggggcuguacaauuucgccacaugcggaauugugggccucguuuccuuucugcuucugugugggagaucuugcacgaccagccucuauaaaggaguguacgaacugcagacacuggagcucaacauggaaacccugaauaugacaaugccucuuuccuguaccaagaacaauucucaucacuauaucauggucggcaacgagacagggcuggagcucacccugacgaauaccagcaucauuaaccauaaauucugcaaucuuuccgacgcgcacaagaaaaaccuguacgaucaugcucucaugucuaucauuagcacauuucaccuguccaucccgaauuucaaccaguaugaagccaugagcugugacuuuaauggaggcaagauuucugugcaguacaaccugucccacagcuaugccggcgaugcugccaaucauugcgggaccaucgcuaacggaguucuccaaacauucaugcggauggccuggggcgggucuuacauugcgcuggacuccggaugugaucgcugggacugcaucaugaccagcuaccaguaucuuaucauucagaacacgacaugggaggaucacugucaguuuucuagacccuccccuaucggcuaccuggggcuccugagccaacggacccgcgacauuuauaucuccagacggcuucugggaacauucaccuggacccucucugauagcgaaggcaaggacacacccggcggguacugccugacgcgcuggaugcugauugaggccgagcucaaauguuuuggaaauaccgcuguggccaagugcaacgaaaaacaugaugaggaguucugcgacaugcugagacuuuuugauuucaauaagcaggcuauccagcggcugaaagccccugcgcagauguccauccaacucauuaacaaggccgucaaugcucugaucaacgaccagcuuauuaugaagaaucaucugcgcgacaucauguguauucccuauugcaacuacagcaaauauugguaccucaaucacacaaccacaggcaagaccucucugccuaaauguuggcugguguccaacgggagcuaccucaaugaaacgcacuucucugaugacaucgaacagcaagccgauaacaugaucacagagaugcugcagaaggaguauauggaaagacagggaaaaaccccgcuuggccugguggaccucuuugucuucagcaccuccuuuuaccugauuucuaucuuccugcaccuuguuaagauucccacacaucggcacgugguggggaaaagcugcccuaagccccaucgccucaaucacaugggaaucuguuccugcggccuguauggccagccugggguccccgugaaguggaaaagaugaggacuagucccuguucccagagcccacuuuuuuuucuuuuuuugaaauaaaauagccugucuuucagaucuaaaaaaaaaaaaaaaaaaaaaaaaaaaaaaaaaaaaaaaaaaaaaaaaaaaaaaaaaaaaaaaaaaaaaaaaaaaaaaaaaaaaaaaaaaaaaaaaaaaa

SEQ ID NO: 28576 - RNA, 1724 nt, Artificial Sequence
  mRNA product Design a-1 (A100) comprising derived and/or modified sequence from MOPV/LASV reassortant(IGS-1;Clade IV)__AFY05576__GPCmut5 (opt5)
aggagagucccgcagucggcguccagcggcucugcuuguucgugugugugucguugcaggccuuauucaagcuuaccaugggccagaucgugaccuucuuucaagaggucccccacguuauugaagaggugaugaacaucgugcugauugcccucagcguccuggcugugcuuaaggggcuguacaauuucgccacaugcggacucguuggccuggugacguuucuucugcucugugggagauccugcaccacaucucuguauaaaggagucuacgaacugcagacccucgagcugaacauggaaacacuuaauaugaccaugccucugagcuguacaaagaacaauucccaucacuauaucauggugggcaacgagaccgggcucgagcugacgcuuaccaauacaucuauuaucaaccauaaauucugcaaucugagcgacgcgcacaagaaaaaccucuacgaucaugcucugauguccaucauuucuaccuuucaccugagcaucccgaauuucaaccaguaugaagccauguccugugacuuuaauggaggcaagauuagcguucaguacaaccucucucacuccuaugccggcgaugcugccaaucauugcgggacaguggcuaacggaguccugcaaaccuucaugcggauggccuggggcgggagcuacaucgcgcuugacucuggauguggcaacugggauugcauuaugacguccuaccaguaucugaucauucagaauacaaccugggaggaccacugucaguuuagccgccccucuccuaucggguaccucggacugcuuucccaaagaacacgggauaucuauauuagccgcagacugcucggcaccuucaccuggacacuguccgacucugaaggcgaggauacgcccgggggauacugccugacccgguggaugcucaucgaggccgaacugaaguguuuuggcaacacagcuguggccaaaugcaaugagaagcaugacgaagaguucugcgauaugcuucgccuguuugacuucaacaaacaggcuauucagagacucaaggccccugcgcagaugagcauccaacugauuaauaaagccgugaacgcucuuaucaaugaucagcugaucaugaagaaccaccuccgggacauuauguguauccccuauugcaauuacuccaaguauugguaccugaaccacaccacaaccgggcgcacgagccugccuaaauguuggcucgucucuaauggauccuaccugaacgaaacacauuucagcgacgauauugagcagcaagccgacaauaugaucaccgagaugcuucagaaggaauauauggagagacagggcaaaaccccgcuggggcucguugaucuguuuguguucucuaccagcuuuuaccugauuuccaucuuccuucaccucgugaagauccccacacaucggcacauugucggaaaaucuugcccuaagccccaucgccugaaccacaugggcaucuguagcugcggccuguauaaacagccuggggugcccguuaaguggaagagaugaggacuagucccuguucccagagcccacuuuuuuuucuuuuuuugaaauaaaauagccugucuuucagaucuaaaaaaaaaaaaaaaaaaaaaaaaaaaaaaaaaaaaaaaaaaaaaaaaaaaaaaaaaaaaaaaaaaaaaaaaaaaaaaaaaaaaaaaaaaaaaaaaaaaa

SEQ ID NO: 28577 - RNA, 1724 nt, Artificial Sequence
  mRNA product Design a-1 (A100) comprising derived and/or modified sequence from LASV(LM765-SLE-2012;Clade IV)__AIT17814__GPCmut5 (opt5)
aggagagucccgcagucggcguccagcggcucugcuuguucgugugugugucguugcaggccuuauucaagcuuaccaugggccagaucgugaccuucuuucaagaggucccccacguuauugaagaggugaugaacaucgugcugauugcccucagcauccuggcuguccuuaaggggcuguacaauuucgccacaugcggacucgugggccugguuacguuucuucugcucugugggagauccugcaccacaucucuguauaaaggaguguacgaacugcagacccucgagcugaacauggaaacacuuaauaugaccaugccucugagcuguacaaagaacaauucccaucacuauauuauggucggcaacgagaccgggcucgagcugacgcuuaccaauacaucuaucaucgaccauaaauucugcaaccugagcgaugcgcaccggaagaaucucuacgaccaugcucugauguccauuaucucuaccuuucaccugagcauuccgaacuucaaucaguaugaagccauguccugugauuuuaacggaggcaaaaucagcgugcaguacaaucucucucacuccuaugccaaggacgcugccgaucauugcggcacaguugcuaacggggugcugcaaaccuucaugcgcauggccuggggaggcagcuacauugcgcuugacucuggguguggaagaugggauugcaucaugacguccuaccaguaucugauuauccagaauacaaccugggaggaccacugucaguuuagccggcccucuccuaucggcuaccucgggcugcuuucccaacgcacaagagauauuuauaucagccggcgccugcucggaaccuucaccuggacacuguccgacucugaaggcaaggauacgcccggcggguacugccugaccagauggaugcucauugaggccgagcugaaauguuuuggaaacacagcugucgccaagugcaacgaaaaacaugacgaggaguucugcgauaugcuucggcuguuugacuucaauaagcaggcuauccagcgccucaaagccccugcgcagaugagcauucaacugaucaacaaggccgugaaugcucuuaucaacgaccagcugauuaugaagaaucaccucagagauaucauguguauucccuauugcaacuacuccaaauauugguaccugaaucacaccacaaccggcaagacgagccugccuaaauguuggcucgugucuaacggguccuaccugaaugaaacacauuucagcgacgauaucgaacagcaagccgacaacaugauuaccgagaugcuucagaaggaguauauggaacggcagggaaaaaccccgcugggccucgucgaucuguuuguuuucucuaccagcuuuuaccugaucuccaucuuccuucaccucgugaagauucccacacaucgccacaucguggggaaaccuugccccaagccucauagacugaaucacaugggaauuuguucuugcggccuguauaagcagcccggcgucccggugaaauggaagcggugaggacuagucccuguucccagagcccacuuuuuuuucuuuuuuugaaauaaaauagccugucuuucagaucuaaaaaaaaaaaaaaaaaaaaaaaaaaaaaaaaaaaaaaaaaaaaaaaaaaaaaaaaaaaaaaaaaaaaaaaaaaaaaaaaaaaaaaaaaaaaaaaaaaaa

SEQ ID NO: 28578 - RNA, 1724 nt, Artificial Sequence
  mRNA product Design a-1 (A100) comprising derived and/or modified sequence from LASV(LM776-SLE-2012;Clade IV)__AIT17824__GPCmut5 (opt5)
aggagagucccgcagucggcguccagcggcucugcuuguucgugugugugucguugcaggccuuauucaagcuuaccaugggccagaucgugaccuucuuucaagaggucccccacguuauugaagaggugaugaacaucgugcugauugcccucagcauccuggcuguccuuaaggggcuguacaauuucgccacaugcggacucgugggccugguuacguuucuucugcucugugggagauccugcaccacaucuguguauaaaggagucuacgaacugcagacccuggagcucaacauggaaacacugaauaugaccaugccucuuagcuguacaaagaacaauucccaucacuauauuauggugggcaacgagaccgggcuggagcucacgcugaccaauacaucuaucaucaaccauaaauucugcaaucuuagcgacgcgcacaagaaaaaccuguacgaucaugcucucauguccauuaucucuaccuuucaccugagcauuccgaauuucaaccaguaugaagccauguccugugacuuuaauggaggcaagaucagcguucaguacaaccugucucacuccuaugccggcgaugcugccaaucauugcgggacaguggcuaacggaguccuccaaaccuucaugcggauggccuggggcgggagcuacauugcgcuggacucuggauguggcaagugggauugcaucaugacguccuaccaguaucuuauuauccagaacacaaccugggaggaccacugucaguuuagccgccccucuccuaucggguaccugggacuccugucccaaagaacacgggauauuuauaucagccgcagacuucugggcaccuucaccuggacacucuccgacucugaaggcaaagauacgcccgggggauacugccugacccgguggaugcugauugaggccgagcucaaguguuuuggcaauacagcuguggccaaaugcaacgaaaagcaugacgaggaguucugcgauaugcugcgccuuuuugacuucaauaaacaggcuauccagagacugaaggccccugcgcagaugagcauucaacucaucaacaaggccgugaaugcucugaucaacgaucagcuuauuaugaaaaaucaucugcgggacaucauguguauucccuauugcaacuacuccaaguauugguaccucaaucacaccacaaccgggaaaacgagccugccuaaguguuggcuggucucuaacggauccuaccucaaugaaacacacuucagcgacgauaucgaacagcaagccgacaacaugauuaccgagaugcugcagaaagaguauauggaacgccagggcaagaccccgcuugggcugguugaucucuuuguguucucuaccagcuuuuaccugaucuccaucuuccugcaccuugugaaaauucccacacauagacacaucgucggaaagucuugcccuaagccccaucggcucaaucacaugggcauuuguagcugcggccuguauaaacagccuggggugcccguucgcuggaagagaugaggacuagucccuguucccagagcccacuuuuuuuucuuuuuuugaaauaaaauagccugucuuucagaucuaaaaaaaaaaaaaaaaaaaaaaaaaaaaaaaaaaaaaaaaaaaaaaaaaaaaaaaaaaaaaaaaaaaaaaaaaaaaaaaaaaaaaaaaaaaaaaaaaaaa

SEQ ID NO: 28579 - RNA, 1724 nt, Artificial Sequence
  mRNA product Design a-1 (A100) comprising derived and/or modified sequence from LASV(Mad39;Clade IV)__ANH09722__GPCmut5 (opt5)
aggagagucccgcagucggcguccagcggcucugcuuguucgugugugugucguugcaggccuuauucaagcuuaccaugggccagaucgugaccuucuuucaagaggucccccacguuauugaagaggugaugaacaucgugcugauugcccucagcauccuggcuguccuuaaggggcuguacaauguggccacaugcggacucauuggccugguuacguuccuucugcucugugggagauccugcaccacaacccuguauaaaggaguguacgaacugcaggcgcucgagcugaacauggaaacacuuaauaugaccaugccucugucuuguacaaagaacaauagccaucacuauauccgggucggcaacgagaccgggcucgagcugacgcuuaccaauacaucccugaucaaccauaaauuuugcaaucucucugacgcucacaagaaaaaccuguacgaucaugcccugaugagcauuaucuccaccuuccaccucucuauuccgaauuuuaaccaguaugaagccaugagcugugacuucaaugauggaaagaucuccgugcaguacaaccugagccacacauaugcuggcgacaccgccaaucauugcggcacgguugcuaacggggugcuucaaacauuuaugcgcauggccuggggaggcucuuacauugcgcuggauuccggguguggaggcugggacugcaucaugaccagcuaccaguaucucauuauccagaacacaaccugggaggaucacugucaguucucuagacccuccccuaucggguaccugggacuucugagccaacggacccgcgacauuuauaucucuagacggcuccugggcacauuuacguggacccuguccgauagcgaaggcaaggacacacccgggggauacugccucacccgcuggaugcugauugaggccgagcuuaaauguuucggcaauacagcugucgccaagugcaacgaaaaacaugaugaggaauuuugcgacaugcugagacucuucgauuuuaauaagcaggcuauccagcggcugaaagccccugcgcagauguccauucaacuuaucaacaaggccgugaaugcucugaucaacgaccagcucauuaugaagaaucaucugcgcgacaucauguguauucccuauugcaacuacucuaaauauugguaccugaaucacaccgugacggggaagacaagccucccuaaauguuggcuggucuccaacggaagcuaccuuaaugagacccacuucucugaugacaucgaacagcaagccgauaacaugauuaccgagaugcugcagaaggaguauauggaaagacagggcaaaacaccgcucgggcugguugaccuguucguguuuuccaccagcuucuaccuuaucucuaucuuucuccaccuggugaagauucccacacaucggcacgucgugggaaaaccuugccccaagccucaucgccugaaucacaugggcaucuguagcugcggcuucuauaagcagcccgggguuccggugagauggaaacggugaggacuagucccuguucccagagcccacuuuuuuuucuuuuuuugaaauaaaauagccugucuuucagaucuaaaaaaaaaaaaaaaaaaaaaaaaaaaaaaaaaaaaaaaaaaaaaaaaaaaaaaaaaaaaaaaaaaaaaaaaaaaaaaaaaaaaaaaaaaaaaaaaaaaa

SEQ ID NO: 28580 - RNA, 1724 nt, Artificial Sequence
  mRNA product Design a-1 (A100) comprising derived and/or modified sequence from LASV(Z0947-SLE-2011;Clade IV)__AIT17840__GPCmut5 (opt5)
aggagagucccgcagucggcguccagcggcucugcuuguucgugugugugucguugcaggccuuauucaagcuuaccaugggccagaucgugaccuucuuucaagaggucccccacguuauugaagaggugaugaacaucgugcugauugcccucagcauccuggcuguccuuaaggggcuguacaauuucgccacaugcggacucgugggccugguuacguuucuucugcucugugggagauccugcaccauuucucuguauaaaggaguguacgaacugcagacacucgagcugaacauggaaacccuuaauaugacaaugccucugagcuguaccaagaacaauucccaucacuauaucauggucggcaacgagacagggcucgagcugacccuuacgaauaccucuaucauuaaccauaaauucugcaaucugagcgacgcgcacaagaaaaaccucuacgaucaugcucugauguccaucauuucuacauuucaccugagcaucccgaauuucaaccaguaugaagccauguccugugacuuuaauggaggcaagauuagcgugcaguacaaccucucucacuccuaugccggcgaugcugccaaucauugcgggaccguugcuaacggagugcugcaaacauucaugcggauggccuggggcgggagcuacaucgcgcuugacucuggaugugaucgcugggacugcauuaugaccuccuaccaguaucugaucauccagaacacgacaugggaggaucacugucaguuuagcagacccucuccuauuggcuaccucgggcugcuuucccaacggacccgcgacaucuauauuagcagacggcugcucggaacauucaccuggacccuguccgauucugaaggcaaggacacacccggcggguacugccugacgcgcuggaugcucaucgaggccgagcugaaauguuuuggaaauaccgcugucgccaagugcaacgaaaaacaugaugaggaguucugcgacaugcuuagacuguuugauuucaauaagcaggcuauucagcggcucaaagccccugcgcagaugagcauccaacugaucaacaaggccgugaaugcucuuauuaacgaccagcugaucaugaagaaucaccuccgcgacauuauguguauccccuauugcaacuacuccaaauauugguaccugaaucacacaaccacaggcaagaccagccugccuaaauguuggcucgugucuaacggguccuaccugaaugaaacgcauuucagcgaugacauugaacagcaagccgauaacaugaucacagagaugcuucagaaggaguauauggaaagacagggaaaaaccccgcugggccucgucgaccuguuuguuuucucuaccagcuuuuaccugaucuccauuuuccuucaccucgugaagauccccacacaucggcacauuguggggaaaccuugccccaagccucaucgccugaaucacaugggaaucuguucuugcggccuguauaagcagcccggcgucccggugaaauggaagagaugaggacuagucccuguucccagagcccacuuuuuuuucuuuuuuugaaauaaaauagccugucuuucagaucuaaaaaaaaaaaaaaaaaaaaaaaaaaaaaaaaaaaaaaaaaaaaaaaaaaaaaaaaaaaaaaaaaaaaaaaaaaaaaaaaaaaaaaaaaaaaaaaaaaaa

SEQ ID NO: 28581 - RNA, 1736 nt, Artificial Sequence
  mRNA product Design a-2 (hSL-A64-N5) comprising derived and/or modified sequence from LASV(Josiah;Clade IV)__NP_694870__GPCmut5 (opt1)
aggagaguccgcucagccagguugcagaagcggcuuagcguguguccuaaucuucucucugcguguagguaggccugugccgcaaacaagcuuaccaugggccagaucgugaccuucuuccaggaggucccccacgugaucgaggaggugaugaacaucguccugaucgcccucagcgugcuggccgugcugaaggggcucuacaacuucgcgaccugcggccuggucgggcuggugacguuccuccugcugugcggccgcuccugcaccaccagccucuacaaggggguguacgagcugcagacccuggagcucaacauggagacgcugaacaugaccaugccgcuguccugcaccaagaacaacagccaccacuacaucauggucggcaacgagaccggccucgagcugacgcugaccaacaccuccaucaucaaccacaaguucugcaaccucagcgacgcccacaagaagaaccuguacgaccacgcccugauguccaucaucagcaccuuccaccucuccauccccaacuucaaccaguacgaggccaugagcugcgacuucaacgggggcaagaucuccgugcaguacaaccugagccacuccuacgccggggacgcggccaaccacugcggcacgguggccaacgggguccugcagaccuucaugcggauggccuggggcggcagcuacaucgcgcucgacuccgggugcggcaacugggacugcaucaugaccagcuaccaguaccugaucauccagaacaccacgugggaggaccacugccaguucucccggcccagccccaucggguaccugggccuccugucccagcgcacccgggacaucuacaucagccgccggcugcucggcaccuucaccuggacgcugagcgacuccgaggggaaggacaccccgggcggguacugccugacccgcuggaugcucaucgaggccgagcugaagugcuucggcaacaccgccguggccaagugcaacgagaagcacgacgaggaguucugcgacaugcugcggcuguucgacuucaacaagcaggccauccagcgccugaaggcgcccgcccagaugagcauccagcugaucaacaaggccgugaacgcccucaucaacgaccagcugaucaugaagaaccaccuccgggacaucaugugcauccccuacugcaacuacuccaaguacugguaccucaaccacacgaccaccggccgcaccagccugcccaagugcuggcuggucuccaacggcagcuaccucaacgagacgcacuucuccgacgacaucgagcagcaggccgacaacaugaucaccgagaugcugcagaaggaguacauggagcggcaggggaagacgccccugggccucguggaccuguucguguucagcaccuccuucuaccugaucagcaucuuccugcaccucgucaagaucccgacccaccgccacaucguggggaaguccugccccaagccccaccggcugaaccacaugggcaucugcagcugcgggcuguacaagcagcccggcgugccggucaaguggaagcgcugaggacuagucccuguucccagagcccacuuuuuuuucuuuuuuugaaauaaaauagccugucuuucagaucucaaaggcucuuuucagagccaccaaaaaaaaaaaaaaaaaaaaaaaaaaaaaaaaaaaaaaaaaaaaaaaaaaaaaaaaaaaaaaaaagaauu

SEQ ID NO: 28582 - RNA, 1733 nt, Artificial Sequence
  mRNA product Design a-2 (hSL-A64-N5) comprising derived and/or modified sequence from LASV(LP;Clade I)__AAF86701__GPCmut5 (opt1)
aggagaguccgcucagccagguugcagaagcggcuuagcguguguccuaaucuucucucugcguguagguaggccugugccgcaaacaagcuuaccaugggccagaucaucaccuucuuccaggaggugccccacgucaucgaggaggugaugaacaucgugcugaucgcccucagccugcuggccauccucaaggggcuguacaacaucgcgaccugcggcaucaucgggcuggucgccuuccucuuccugugcggcaaguccugcagccugacgcucaagggcggguacgagcugcagacccuggagcucaacauggagacccugaacaugaccaugccgcuguccugcacgaagaacagcucccaccacuacauccgcgugggcaacgagaccgggcucgagcugacccugaccaacacgagcaucaucaaccacaaguucugcaaccucuccgacgcccacaagaagaaccuguacgaccacgcccugaugagcaucaucuccaccuuccaccucagcauccccaacuucaaccaguacgaggccauguccugcgacuucaacggcgggaagaucagcgugcaguacaaccugucccacagcuacgcgggcgacgccgccgagcacugcgggaccgucgccaacggcgugcugcagaccuucaugcggauggcguggggcgggcgcuacaucgcccucgacuccggcugcgggaacugggacugcaucaugacgagcuaccaguaccugaucauccagaacaccaccugggaggaccacugccaguucucccggcccagccccaucggcuaccugggccuccugucccagcgcacccgggacaucuacaucagccgccggcugcucgggacguucaccuggacccugagcgacuccgagggcaacgagacccccgggggcuacugccugacgcgcuggaugcucaucgaggccgagcugaagugcuucgggaacaccgccguggccaagugcaacgagaagcacgacgaggaguucugcgacaugcugcggcuguucgacuucaacaagcaggcgauccgccggcugaaggcccccgcccagaugagcauccagcugaucaacaaggccgucaacgcccucaucaacgaccagcugaucaugaagaaccaccuccgcgacaucaugugcauccccuacugcaacuacuccaaguacugguaccucaaccacaccagcuccggccggaccagccugcccaagugcuggcugaucuccaacgggagcuaccucaacgagacgcaguucuccgacgacaucgagcagcaggcggacaacaugaucaccgagaugcugcagaaggaguacaucgagcgccagggcaagaccccgcuggggcucguggacaucuucaucuucagcaccuccuucuaccugaucagcaucuuccugcaccugaucaagaucccgacgcaccggcacaucgugggcaagcccugccccaagccccaccgccucaaccacaugggggucugcuccugcggccuguacaagcacccgggcgugcccaccaaguggaagcggugaggacuagucccuguucccagagcccacuuuuuuuucuuuuuuugaaauaaaauagccugucuuucagaucucaaaggcucuuuucagagccaccaaaaaaaaaaaaaaaaaaaaaaaaaaaaaaaaaaaaaaaaaaaaaaaaaaaaaaaaaaaaaaaaagaauu

SEQ ID NO: 28583 - RNA, 1733 nt, Artificial Sequence
  mRNA product Design a-2 (hSL-A64-N5) comprising derived and/or modified sequence from LASV(803213;Clade II)__AAF86703__GPCmut5 (opt1)
aggagaguccgcucagccagguugcagaagcggcuuagcguguguccuaaucuucucucugcguguagguaggccugugccgcaaacaagcuuaccaugggccagaucaucaccuucuuccaggaggugccccacgucaucgaggaggugaugaacaucgugcugaucgcccucagccugcuggccauccucaaggggaucuacaacgucgcgaccugcggccuguucgggcugaucuccuuccuccugcugugcggccgcagcugcuccgugacguacaaggggguguacgagcuccagacccuggagcugaacauggccaaccucaacaugaccaugccgcugagcugcaccaagaacaacucccaccacuacaucauggucggcaacgagacgggccuggagcucacccugaccaacaccagcaucaucaaccacaaguucugcaaccuguccgacgcccacaagaagaaccucuacgaccacgcccugaugagcaucaucuccacguuccaccugagcauccccaacuucaaccaguacgaggccauguccugcgacuucaacgggggcaagaucagcgugcaguacaaccucucccacagcuucgcgguggacgccgccaaccacugcgggaccaucgccaacggcguccugcagaccuucaugcggauggcguggggcggguccuacaucgcccuggacagcggcugcgggaacugggacugcaucaugaccuccuaccaguaccucaucauccagaacacgaccugggaggaccacugccaguucagccgccccucccccaucggcuaccuggggcugcucagccagcggacccgcgacaucuacaucagccggcgccugcugggcaccuucacguggacccucuccgacagcgagggcaacgaggcccccgggggcuacugccugacccgguggaugcugaucgaggccgagcucaagugcuucgggaacaccgccguggcgaagugcaacgagaagcacgacgaggaguucugcgacaugcugcgccuguucgacuucaacaagcaggccaucaagcggcucaagacgcccgcccagauguccauccagcugaucaacaaggccgugaacgcccugaucaacgaccagcucaucaugaagaaccaccuccgcgacaucaugugcauccccuacugcaacuacagccgguacugguaccugaaccacaccgucaccgggaagaccucccugccccgcugcuggcuggugagcaacggcuccuaccugaacgagacgcacuucagcgacgacaucgagcagcaggcggacaacaugaucaccgagaugcuccagaaggaguacauggaccggcagggcaagaccccgcuggggcugguggaccucuucgucuucuccaccagcuucuaccugaucuccaucuuccugcaccuggugaagaucccgacgcaccgccacaucgugggcaagcccugccccaagccccaccggcucaaccacauggggaucugcagcugcggccuguacaagcacccggggguccccgugaaguggaagcgcugaggacuagucccuguucccagagcccacuuuuuuuucuuuuuuugaaauaaaauagccugucuuucagaucucaaaggcucuuuucagagccaccaaaaaaaaaaaaaaaaaaaaaaaaaaaaaaaaaaaaaaaaaaaaaaaaaaaaaaaaaaaaaaaaagaauu

SEQ ID NO: 28584 - RNA, 1733 nt, Artificial Sequence
  mRNA product Design a-2 (hSL-A64-N5) comprising derived and/or modified sequence from LASV(GA391;Clade III)__CAA36645__GPCmut5 (opt1)
aggagaguccgcucagccagguugcagaagcggcuuagcguguguccuaaucuucucucugcguguagguaggccugugccgcaaacaagcuuaccaugggccagaucgugaccuucuuccaggaggucccccacgugaucgaggaggugaugaacaucguccugaucgcccucagcauccuggccauccugaaggggcucuacaacguggcgaccugcggccugaucgggcuggugacguuccuccugcuguccggccgcagcugcucccucaucuacaaggggaccuacgagcugcagacccuggagcucaacauggagacccugaacaugacgaugccgcugagcugcaccaagaacaacucccaccacuacauccgggucggcaacgagaccggccucgagcugacccugacgaacaccagcauccucaaccacaaguucugcaaccuguccgacgcccacaagcgcaaccuguacgaccacagccucauguccaucaucagcaccuuccaccuguccauccccaacuucaaccaguacgaggccaugagcugcgacuucaacgggggcaagaucaccgugcaguacaaccugucccacagcuucgccguggacgccgcggggcacugcggcacgcucgccaacgggguccugcagaccuucaugcggauggccuggggcggcuccuacaucgcccuggacagcgggugcggcaacugggacugcaucaugaccuccuaccaguaccucaucauccagaacaccacgugggacgaccacugccaguucagccggcccucccccaucggguaccugggccugcucagccagcgcacccgggacaucuacaucagccgccggcugcugggcaccuucaccuggacgcucuccgacagcgaggggaacgagaccccgggcggguacugccugacccgcuggaugcugaucgaggcggagcucaagugcuucggcaacaccgccguggccaagugcaacgagaagcacgacgaggaguucugcgacaugcugcggcuguucgacuucaacaagcaggccauccgccggcucaagacgcccgcccagauguccauccagcugaucaacaaggcggugaacgcccugaucaacgaccagcucaucaugaagaaccaccuccgcgacaucaugugcauccccuacugcaacuacagccgguacugguaccugaaccacaccuccaccggcaagaccagccugccccgcugcuggcugaucuccaacggcagcuaccugaacgagacgaaguucuccgacgacaucgagcagcaggccgacaacaugaucaccgagaugcuccagaaggaguacaucgaccggcaggggaagacgccccugggccuggucgaccuguucguguucagcaccuccuucuaccucaucagcaucuuccugcaccuggugaagaucccgacccaccgccacaucgucgggaagcccugccccaagccccaccggcucaaccacaugggcaucugcuccugcgggcuguacaagcagccgggcgugcccgugcgcuggaagcggugaggacuagucccuguucccagagcccacuuuuuuuucuuuuuuugaaauaaaauagccugucuuucagaucucaaaggcucuuuucagagccaccaaaaaaaaaaaaaaaaaaaaaaaaaaaaaaaaaaaaaaaaaaaaaaaaaaaaaaaaaaaaaaaaagaauu

SEQ ID NO: 28585 - RNA, 1736 nt, Artificial Sequence
  mRNA product Design a-2 (hSL-A64-N5) comprising derived and/or modified sequence from LASV(AV;Clade V)__CCA30314__GPCmut5 (opt1)
aggagaguccgcucagccagguugcagaagcggcuuagcguguguccuaaucuucucucugcguguagguaggccugugccgcaaacaagcuuaccaugggccagaucgugaccuucuuccaggaggucccccacgugaucgaggaggugaugaacaucguccugaucgcccucagcauccuggccgugcugaaggggcucuacaacaucgcgaccugcggccugaucgggcugaucacguuccuccugcugugcggccgcuccugcagcuccaaccucuacaaggggguguacgagcugcagagccuggaccucaacauggagacccugaacaugaccaugccgcuguccugcaccaagaacaacagccaccacuacauccgggucggcaacgacacgggccucgagcugacccugaccaacaccuccauccucaaccacaaguucugcaaccugagcgacgcccacaagaaggaccuguacgaccacgcccucauguccaucaucagcacguuccaccuguccauccccaacuucaaccaguacgaggccaugagcugcgacuucaacgggggcaagaucuccgugcaguacaaccugagccacuccuacgccaucgacgcggccaaccacugcgggaccguggccaacggcauccuccagaccuucaugcgcauggccuggggcgggagcuacaucgcgcuggacuccggcugcgggaacugggacugcaucaugaccagcuaccaguaccugaucauccagaacacgaccugggagaaccacugccaguucucccgccccagccccaucggcuaccucgggcugcugagccagcggacccgcgacaucuacaucucccggcgccuccugggcaccuucacguggacccugagcgacuccgagggcaacgccacccccgggggcuacugccucacccgguggaugcugaucgaggccgagcugaagugcuucgggaacacggccgucgccaagugcaacgagaagcacgacgaggaguucugcgacaugcuccgccuguucgacuucaacaagcaggcgaucagccggcugaagucccccgcccagaugagcauccagcucaucaacaaggccgugaacgcccugaucaacgaccagcugaucaugaagaaccaccuccgcgacaucaugugcauccccuacugcaacuacuccaaguacugguaccugaaccacaccaucaccgggaagaccagccugcccaagugcuggcucguguccaacggcagcuaccugaacgagacgcacuucuccgacgacaucgagcagcaggccgacaacaugaucaccgagaugcugcagaaggaguacauggagcggcagggcaagaccccgcucgggcuggucgaccuguucguguucagcaccuccuucuaccugaucagcaucuuccuccgccuggugaagaucccgacgcaccggcacaucgucggcaagcccugccccaagccccaccgccugaaccacauggggaucugcuccugcggccucuacaagcagccgggggugcccgugcgguggaagcgcugaggacuagucccuguucccagagcccacuuuuuuuucuuuuuuugaaauaaaauagccugucuuucagaucucaaaggcucuuuucagagccaccaaaaaaaaaaaaaaaaaaaaaaaaaaaaaaaaaaaaaaaaaaaaaaaaaaaaaaaaaaaaaaaaagaauu

SEQ ID NO: 28586 - RNA, 1733 nt, Artificial Sequence
  mRNA product Design a-2 (hSL-A64-N5) comprising derived and/or modified sequence from LASV(Togo/2016/7082;Clade VI)__AMR44577__GPCmut5 (opt1)
aggagaguccgcucagccagguugcagaagcggcuuagcguguguccuaaucuucucucugcguguagguaggccugugccgcaaacaagcuuaccaugggccagaucaucaccuucuuccaggaggugccccacgucaucgaggaggugaugaacaucgugcugaucgcccucagccugcuggccauccucaagggggucuacaacguggcgaccugcggcaucaucgggcuggugacguuccuguuccucugcggccgcuccugcagccugaucuacaagggguccuacgagcugcagacccucgagcugaacauggagacccugaacaugaccaugccgcucagcugcacgaagaacuccagccaccacuacauccgggucggcaacgagaccggccuggagcugacccucaccaacacguccaucaucaaccacaaguucugcaaccugagcgacgcccacaagcgcaaccuguacgaccacgcccucauguccauccugagcaccuuccaccuguccauccccaacuucaaccaguacgaggccaugagcugcgacuucaacgggggcaagaucuccgugcaguacaaccucagccacgccuacgcgguggacgccgccgagcacugcgggaccgucgccaacggcgugcugcagaccuucaugcggauggcguggggcggguccuacaucgcccuggacagcggcugcgggaacugggacugcaucaugacguccuaccaguaccucaucauccagaacaccaccugggaggaccacugccaguucagccggcccucccccaucggcuaccuggggcugcucagccagcgcacccgggacaucuacaucagccgccggcugcugggcacguucaccuggacccucuccgacagcgagggcaacgagacccccgggggcuacugccugacgcgcuggaugcugaucgaggccgagcucaagugcuucgggaacaccgccguggccaagugcaacgagaagcacgacgaggaguucugcgacaugcugcggcuguucgacuucaacaagcaggcgauccagcgccucaagucccccgcccagaugagcauccagcugaucaacaaggccgucaacgcccugaucaacgaccagcucaucaugaagaaccaccuccgggacaugaugugcauccccuacugcaacuacuccaaguacugguaccugaaccacaccagcuccgggcgcaccagccugcccaagugcuggcugguguccaacggcagcuaccugaacgagacgcacuucuccgacgacaucgagcagcaggccgacaacaugaucaccgagaugcuccagaaggaguacaucgaccggcagggcaagaccccgcuggggcugguggaccucuucgucuucagcaccuccuucuaccugaucagcaucuuccugcaccugaucaagaucccgacgcaccgccacaucgugggcaagcccugccccaagccccaccggcucaaccacauggggaucugcuccugcggccuguacaagcagccgggggugcccacccgcuggaagcggugaggacuagucccuguucccagagcccacuuuuuuuucuuuuuuugaaauaaaauagccugucuuucagaucucaaaggcucuuuucagagccaccaaaaaaaaaaaaaaaaaaaaaaaaaaaaaaaaaaaaaaaaaaaaaaaaaaaaaaaaaaaaaaaaagaauu

SEQ ID NO: 28587 - RNA, 1733 nt, Artificial Sequence
  mRNA product Design a-2 (hSL-A64-N5) comprising derived and/or modified sequence from LASV(KAK-428;Clade n.d. (VII))__ANH09740__GPCmut5 (opt1)
aggagaguccgcucagccagguugcagaagcggcuuagcguguguccuaaucuucucucugcguguagguaggccugugccgcaaacaagcuuaccaugggccagaucgugaccuucuuccaggaggucccccacgugaucgaggaggugaugaacaucguccugaucgcccucagccugcuggccauccucaaggggcuguacaacuucgcgaccugcggcgugaucgggcugaucacguuccuccugcugugcggccgcuccugcagcgccaccuacaaggggcaguacgagcuccagacccuggagcugaacauggagucccucaacaugaccaugccgcugagcugcacgaagaacaacucccaccacuacauccgggccggcaacaacaccggccuggagcucacccugaccaacacgagcaucaucucccacaaguucugcaaccugagcgacgcccacaagaagaaccucuacgaccacacccugauguccaucaucaccaccuuccaccugagcauccccaacuucaaccaguacgaggccauguccugcgacuucaacgggggcaagaucagcauccaguacaaccucucccacagcuacgcgggggacgccgcccagcacugcggcacgguggccaacgggguccugcagaccuucaugcgcauggcguggggcggcuccuaccuggcccucgacagcgggugccgcggcugggacugcaucaucuccagcuaccaguaccugaucauccagaacaccaccugggacgaccacugccaguucucccggcccagccccaucggguaccugggcuucgugagccagaagacgcgcgacaucuacaucucccggcgccuccugggcaccuucaccuggacccugagcgacuccgaggggcacgacaugccgggcggguacugccucacgcgguggaugcugaucgaggccgaccugaagugcuucggcaacaccgccguggccaagugcaacgagaagcacgacgaggaguucugcgacauguggcgccucuucgacuucaacaagcaggcgauccagcggcugaaggcccccgcccagaugaacauccagcugaucaacaaggccgucaacgcccucaucaacgaccagcugaugaugaagaaccaccuccgcgacaucaugugcauccccuacugcaacuacagcaaguucugguaccugaacaacaccaccacgggccggaccucccugccccgcugcuggcugaucagcaacggcuccuaccucaacgagacccacuucagcgacgacaucgagcagcaggcggacaacaugaucaccgagaugcugcagaaggaguacauggaccggcaggggaagacgccccugggccucguggaccuguucguguucuccaccagcuucuaccugaucaccaucuuccuccaccuggucaagaucccgacccaccgccacaucguggggaagcccugccccaagccccaccggcugaaccacaugggcaucugcuccugcgggcuguacaagcagccgggcgugcccguccgcuggaagcggugaggacuagucccuguucccagagcccacuuuuuuuucuuuuuuugaaauaaaauagccugucuuucagaucucaaaggcucuuuucagagccaccaaaaaaaaaaaaaaaaaaaaaaaaaaaaaaaaaaaaaaaaaaaaaaaaaaaaaaaaaaaaaaaaagaauu

SEQ ID NO: 28588 - RNA, 1733 nt, Artificial Sequence; identical to SEQ ID NO: 28582
  mRNA product Design a-2 (hSL-A64-N5) comprising derived and/or modified sequence from LASV(Pinneo-NIG-1969;Clade I)__AIT17836__GPCmut5 (opt1)

SEQ ID NO: 28589 - RNA, 1733 nt, Artificial Sequence
  mRNA product Design a-2 (hSL-A64-N5) comprising derived and/or modified sequence from LASV(ISTH0009-NIG-2011;Clade II)__AIT17404__GPCmut5 (opt1)
aggagaguccgcucagccagguugcagaagcggcuuagcguguguccuaaucuucucucugcguguagguaggccugugccgcaaacaagcuuaccaugggccagaucaucaccuucuuccaggaggugccccacgucaucgaggaggugaugaacaucgugcugaucgcccucagccugcuggccauccucaaggggaucuacaacgucgcgaccugcggccuguucgggcugguguccuuccuccugcugugcggccgcagcugcuccacgaccuacaaggggguguacgagcuccagacccuggagcuggacauggccagccucaacaugaccaugccgcuguccugcacgaagaacaacagccaccacuacaucauggucggcaacgagaccggccuggagcucacccugaccaacacguccaucaucaaccacaaguucugcaaccugagcgacgcccacaagaagaaccucuacgaccacgcccugauguccaucaucagcaccuuccaccuguccauccccaacuucaaccaguacgaggccaugagcugcgacuucaacgggggcaagaucuccgugcaguacaaccucagccacgcguacgccguggacgccgccaaccacugcgggaccaucgcgaacggcguccugcagaccuucaugcggauggccuggggcggguccuacaucgcccuggacagcggcugcggguccugggacugcaucaugacgagcuaccaguaccucaucauccagaacaccaccugggaggaccacugccaguucucccgccccagccccaucggcuaccuggggcugcucagccagcggacccgcgacaucuacaucucccggcgccugcugggcacguucaccuggacccucagcgacuccgagggcaacgagacccccgggggcuacugccugacgcgguggaugcugaucgaggccgagcucaagugcuucgggaacaccgccguggcgaagugcaacgagaagcacgacgaggaguucugcgacaugcugcgccuguucgacuucaacaagcaggccauccggcgccucaagacccccgcccagaugagcauccagcugaucaacaaggccgugaacgcccugaucaacgaccagcucaucaugaagaaccaccuccgggacaucaugugcaucccguacugcaacuacuccaaguacugguaccugaaccacaccgucacggggaagaccagccugccccgcugcuggcugguguccaacggcagcuaccugaacgagacccacuucuccgacgacaucgagcagcaggcggacaacaugaucaccgagcuccugcagaaggaguacauggaccggcagggcaagacgccccuggggcucguggaccuguucgucuucagcaccuccuucuaccugaucagcaucuuccugcaccucaucaagaucccgacccaccgccacaucaccggcaagcccugccccaagccccaccggcugaaccacauggggaucugcuccugcggccuguacaagcacccgggggugcccgugaaguggaagcgcugaggacuagucccuguucccagagcccacuuuuuuuucuuuuuuugaaauaaaauagccugucuuucagaucucaaaggcucuuuucagagccaccaaaaaaaaaaaaaaaaaaaaaaaaaaaaaaaaaaaaaaaaaaaaaaaaaaaaaaaaaaaaaaaaagaauu

SEQ ID NO: 28590 - RNA, 1733 nt, Artificial Sequence
  mRNA product Design a-2 (hSL-A64-N5) comprising derived and/or modified sequence from LASV(ISTH2010-NIG-2012;Clade II)__AIT17482__GPCmut5 (opt1)
aggagaguccgcucagccagguugcagaagcggcuuagcguguguccuaaucuucucucugcguguagguaggccugugccgcaaacaagcuuaccaugggccagaucaucaccuucuuccaggaggugccccacgucaucgaggaggugaugaacaucgugcugaucgcccucagccugcuggccauccucaaggggaucuacaacgucgcgaccugcggccuguucgggcugguguccuuccuccugcugugcggccgcagcugcuccacgaccuacaaggggguguacgagcuccagacccuggagcuggacauggccagccucaacaugaccaugccgcuguccugcacgaagaacaacagccaccacuacaucauggucggcaacgagaccggccuggagcucacccugaccaacacguccaucaucaaccacaaguucugcaaccugagcgacgcccacaagaagaaccucuacgaccacgcccugauguccaucaucagcaccuuccaccuguccauccccaacuucaaccaguacgaggccaugagcugcgacuucaacgggggcaagaucuccgugcaguacaaccucagccacgcguacgccguggacgccgccaaccacugcgggaccaucgcgaacggcguccugcagaccuucaugcggauggccuggggcggguccuacaucgcccuggacagcggcugcggguccugggacugcaucaugacgagcuaccaguaccucaucauccagaacaucaccugggaggaccacugccaguucucccgccccagccccaucggcuaccuggggcugcucagccagcggacccgcgacaucuacaucucccggcgccugcugggcaccuucacguggacccucagcgacuccgagggcaacgagacccccgggggcuacugccugacccgguggaugcugaucgaggccgagcucaagugcuucgggaacacggccguggcgaagugcaacgagaagcacgacgaggaguucugcgacaugcugcgccuguucgacuucaacaagcaggccauccggcgccucaagacccccgcccagaugagcauccagcugaucaacaaggccgugaacgcccugaucaacgaccagcucaucaugaagaaccaccuccgggacaucaugugcauccccuacugcaacuacuccaaguacugguaccugaaccacaccgucaccgggaagacgagccugccccgcugcuggcugguguccaacggcagcuaccugaacgagacccacuucuccgacgacaucgagcagcaggcggacaacaugaucaccgagcuccugcagaaggaguacaucgaccggcagggcaagaccccgcuggggcucguggaccuguucgucuucagcacguccuucuaccugaucagcaucuuccugcaccucgugaagaucccgacccaccgccacguggucggcaagcccugccccaagccccaccggcugaaccacauggggaucugcuccugcggccuguacaagcacccgggggugcccgugaaguggaagcgcugaggacuagucccuguucccagagcccacuuuuuuuucuuuuuuugaaauaaaauagccugucuuucagaucucaaaggcucuuuucagagccaccaaaaaaaaaaaaaaaaaaaaaaaaaaaaaaaaaaaaaaaaaaaaaaaaaaaaaaaaaaaaaaaaagaauu

SEQ ID NO: 28591 - RNA, 1733 nt, Artificial Sequence
  mRNA product Design a-2 (hSL-A64-N5) comprising derived and/or modified sequence from LASV(Lassa virus/H.sapiens-wt/NGA/2015/ISTH_0543;Clade II)__AVO03639__GPCmut5 (opt1)
aggagaguccgcucagccagguugcagaagcggcuuagcguguguccuaaucuucucucugcguguagguaggccugugccgcaaacaagcuuaccaugggccagaucaucaccuucuuccaggaggugccccacgucaucgaggaggugaugaacaucgugcugaucgcccucagccugcuggccauccucaaggggaucuacaacgucgcgaccugcggccuguucgggcugguguccuuccuccugcugugcggccgcagcugcuccacgaccuacaaggggguguacgagcuccagacccuggagcuggacauggccaaccucaacaugaccaugccgcugagcugcacgaagaacaacucccaccacuacaucauggucggcaacgagaccggccuggagcucacccugaccaacacgagcaucaucaaccacaaguucugcaaccuguccgacgcccacaagaagaaccucuacgaccacgcccugaugagcaucaucuccaccuuccaccugagcauccccaacuucaaccaguacgaggccauguccugcgacuucaacgggggcaagaucagcgugcaguacaaccucucccacaccuacgcgguggacgccgccaaccacugcgggaccaucgccaacggcguccugcagacguucaugcggauggcguggggcgggagcuacaucgcccuggacuccggcugcgggagcugggacugcaucaugaccuccuaccaguaccucgugauccagaacaccaccugggaggaccacugccaguucagccgccccucccccaucggcuaccuggggcugcucagccagcggacgcgcgacaucuacaucagccggcgccugcugggcaccuucaccuggacccucuccgacagcgagggcaacgagacgcccgggggcuacugccugacccgguggaugcugaucgaggccgagcucaagugcuucgggaacaccgccguggccaagugcaacgagaagcacgacgaggaguucugcgacaugcugcgccuguucgacuucaacaagcaggcgauccggcgccucaagacccccgcccagauguccauccagcugaucaacaaggccgucaacgcccugaucaacgaccagcucaucaugaagaaccaccuccgggacaucaugugcauccccuacugcaacuacagcaaguacugguaccugaaccacacggugaccgggaagaccucccugccccgcugcuggcuggugagcaacggcuccuaccugaacgagacccacuucagcgacgacaucgagcagcaggccgacaacaugaucacggagcuccugcagaaggaguacaucgaccggcagggcaagaccccgcuggggcucgucgaccuguucguguucuccaccagcuucuaccugaucuccaucuuccugcaccucgugaagaucccgacccaccgccacaucacgggcaagcccugccccaagccccaccggcugaaccacauggggaucugcagcugcggccuguacaagcacccggggguccccgugaaguggaagcgcugaggacuagucccuguucccagagcccacuuuuuuuucuuuuuuugaaauaaaauagccugucuuucagaucucaaaggcucuuuucagagccaccaaaaaaaaaaaaaaaaaaaaaaaaaaaaaaaaaaaaaaaaaaaaaaaaaaaaaaaaaaaaaaaaagaauu

SEQ ID NO: 28592 - RNA, 1733 nt, Artificial Sequence
  mRNA product Design a-2 (hSL-A64-N5) comprising derived and/or modified sequence from LASV(Lassa virus/H.sapiens-wt/NGA/2016/ISTH_0009;Clade II)__AVO03571__GPCmut5 (opt1)
aggagaguccgcucagccagguugcagaagcggcuuagcguguguccuaaucuucucucugcguguagguaggccugugccgcaaacaagcuuaccaugggccagaucaucaccuucuuccaggaggugccccacgucaucgaggaggugaugaacaucgugcugaucgcccucagccugcuggccauccucaaggggaucuacaacgucgcgaccugcggccugcuggggcucguguccuuccugcugcucugcggccgcagcugcuccacgaccuacaaggggguguacgagcugcagacccuggagcucgacauggccagccugaacaugaccaugccgcuguccugcacgaagaacaacagccaccacuacaucauggucggcaacgagaccggccucgagcugacccugaccaacacguccaucaucaaccacaaguucugcaaccucagcgacgcccacaagaagaaccuguacgaccacgcccugauguccaucaucagcaccuuccaccucuccauccccaacuucaaccaguacgaggccaugagcugcgacuucaacgggggccggaucuccgugcaguacaaccugagccacuccuacgcgguggacgccgccaaccacugcgggaccaucgccaacggcguccugcagaccuucaugcgcauggcguggggcgggagcuacaucgcccucgacuccggcugcgggagcugggacugcaucaugacguccuaccaguaccugaucauccagaacaccaccugggaggaccacugccaguucagccggcccagccccaucggcuaccuggggcuccugucccagcgcacccgggacaucuacaucagccgccggcugcucggcacguucaccuggacccuguccgacagcgagggcaacgagacccccgggggcuacugccugacgcgcuggaugcucaucgaggccgagcugaagugcuucgggaacaccgccguggccaagugcaacgagaagcacgacgaggaguucugcgacaugcugcggcuguucgacuucaacaagcaggcgauccgccggcugaagacccccgcccagauguccauccagcugaucaacaaggccgugaacgcccucaucaacgaccagcugaucaugaagaaccaccuccgcgacaucaugugcaucccguacugcaacuacagcaaguacugguaccucaaccacaccgucacggggaagaccucccugccccggugcuggcuggugagcaacggcuccuaccucaacgagacccacuucagcgacgacaucgagcagcaggccgacaacaugaucaccgagcugcugcagaaggaguacaucgaccgccagggcaagacgccccucgggcugguggaccuguucgucuucuccaccagcuucuaccugaucuccaucuuccuccaccuggugaagaucccgacccaccggcacaucaccggcaagcccugccccaagccccaccgccugaaccacauggggaucugcagcugcggccucuacaaccacccgggggugcccgucaaguggaagcggugaggacuagucccuguucccagagcccacuuuuuuuucuuuuuuugaaauaaaauagccugucuuucagaucucaaaggcucuuuucagagccaccaaaaaaaaaaaaaaaaaaaaaaaaaaaaaaaaaaaaaaaaaaaaaaaaaaaaaaaaaaaaaaaaagaauu

SEQ ID NO: 28593 - RNA, 1733 nt, Artificial Sequence
  mRNA product Design a-2 (hSL-A64-N5) comprising derived and/or modified sequence from LASV(Lassa virus/H.sapiens-wt/NGA/2016/ISTH_0017;Clade II)__AVO03567__GPCmut5 (opt1)
aggagaguccgcucagccagguugcagaagcggcuuagcguguguccuaaucuucucucugcguguagguaggccugugccgcaaacaagcuuaccaugggccagaucaucaccuucuuccaggaggugccccacgucaucgaggaggugaugaacaucgugcugaucgcccucagccugcuggccauccucaaggggaucuacaacgucgcgaccugcggccuguucgggcugguguccuuccuccugcugugcggccgcagcugcuccacgaccuacaaggggguguacgagcuccagacccuggagcuggacauggccagccucaacaugaccaugccgcuguccugcacgaagaacaacagccaccacuacaucauggucggcaacgagaccggccuggagcucacccugaccaacacguccaucaucaaccacaaguucugcaaccugagcgacgcccacaagaagaaccucuacgaccacgcccugauguccaucaucagcaccuuccaccuguccauccccaacuucaaccaguacgaggccaugagcugcgacuucaacgggggcaagaucuccgugcaguacaaccucagccacaccuacgcgaucgacgccgccaaccacugcgggaccaucgccaacggcgugcugcagacguucaugcggauggcguggggcggguccuacaucgcccuggacagcggcugcggguccugggacugcaucaugaccagcuaccaguaccucaucauccagaacaccaccugggaggaccacugccaguucucccgccccagccccaucggcuaccuggggcugcucagccagcggacgcgcgacaucuacaucucccggcgccugcugggcaccuucaccuggacccucagcgacuccgagggcaacgagacgcccgggggcuacugccugacccgguggaugcugaucgaggccgagcucaagugcuucgggaacaccgccgucgccaagugcaacgagaagcacgacgaggaguucugcgacaugcugcgccuguucgacuucaacaagcaggcgauccggcgccucaagacccccgcccagaugagcauccagcugaucaacaaggccgugaacgcccugaucaacgaccagcucaucaugaagaaccaccuccgggacaucaugugcauccccuacugcaacuacuccaaguacugguaccugaaccacacggugaccgggaagaccagccugccccgcugcuggcuggucuccaacggcagcuaccugaacgagacccacuucuccgacgacaucgagcagcaggccgacaacaugaucacggagcuccugcagaaggaguacauggaccggcagggcaagaccccgcuggggcucguggaccuguucguguucagcaccuccuucuaccugaucagcaucuuccugcaccucguccgcaucccgacccaccggcacgugaucggcaagcccugccccaagccccaccgccugaaccacauggggaucugcuccugcggccuguacaagcacccgggggugcccgucaaguggaagcggugaggacuagucccuguucccagagcccacuuuuuuuucuuuuuuugaaauaaaauagccugucuuucagaucucaaaggcucuuuucagagccaccaaaaaaaaaaaaaaaaaaaaaaaaaaaaaaaaaaaaaaaaaaaaaaaaaaaaaaaaaaaaaaaaagaauu

SEQ ID NO: 28594 - RNA, 1733 nt, Artificial Sequence
  mRNA product Design a-2 (hSL-A64-N5) comprising derived and/or modified sequence from LASV(Lassa virus/H.sapiens-wt/NGA/2018/ISTH_0959;Clade II)__AVV65099__GPCmut5 (opt1)
aggagaguccgcucagccagguugcagaagcggcuuagcguguguccuaaucuucucucugcguguagguaggccugugccgcaaacaagcuuaccaugggccagaucaucaccuucuuccaggaggugccccacgucaucgaggaggugaugaacaucgugcugaucgcccucagccugcuggccauccucaaggggaucuacaacgucgugaccugcggccuguucgggcugguguccuuccuccugcugugcggccgcagcugcuccacgaccuacaagggggucuacgagcuccagacccuggagcuggacauggcgagccucaacaugaccaugccgcuguccugcacgaagaacaacagccaccacuacaucauggugggcaacgagaccggccuggagcucacccugaccaacacguccaucaucaaccacaaguucugcaaccugagcgacgcccacaagaagaaccucuacgaccacgcccugauguccaucaucagcaccuuccaccuguccauccccaacuucaaccaguacgaggccaugagcugcgacuucaacgggggcaagaucuccgugcaguacaaccucagccacgccuacgcgaucgacgccgccaaccacugcgggaccaucgccaacggcguccugcagaccuucaugcggauggcguggggcggguccuacaucgcccuggacagcggcugcggguccugggacugcaucaugacgagcuaccaguaccucaucauccagaacaccaccugggaggaccacugccaguucucccgccccagccccaucggcuaccuggggcugcucagccagcggacccgcgacaucuacaucucccggcgccugcugggcacguucaccuggacccucagcgacuccgagggcaacgagacccccgggggcuacugccugacgcgguggaugcugaucgaggccgagcucaagugcuucgggaacaccgccguggccaagugcaacgagaagcacgacgaggaguucugcgacaugcugcgccuguucgacuucaacaagcaggcgauccggcgccucaagacccccgcccagaugagcauccagcugaucaacaaggccgugaacgcccugaucaacgaccagcucaucaugaagaaccaccuccgggacaucaugugcaucccguacugcaacuacuccaaguacugguaccugaaccacaccgucacggggaagaccagccugccccgcugcuggcugguguccaacggcagcuaccugaacgagacccacuucuccgacgacaucgagcagcaggccgacaacaugaucaccgagcuccugcagaaggaguacaucgaccggcagggcaagacgccccuggggcucguggaccuguucgucuucagcaccuccuucuaccugaucagcaucuuccugcaccucgugaagaucccgacccaccgccacgugaucggcaagcccugccccaagccccaccggcugaaccacauggggaucugcuccugcggccuguacaagcacccggggguccccgugaaguggaagcgcugaggacuagucccuguucccagagcccacuuuuuuuucuuuuuuugaaauaaaauagccugucuuucagaucucaaaggcucuuuucagagccaccaaaaaaaaaaaaaaaaaaaaaaaaaaaaaaaaaaaaaaaaaaaaaaaaaaaaaaaaaaaaaaaaagaauu

SEQ ID NO: 28595 - RNA, 1733 nt, Artificial Sequence
  mRNA product Design a-2 (hSL-A64-N5) comprising derived and/or modified sequence from LASV(LASV003-NIG-2008;Clade II)__AIT17580__GPCmut5 (opt1)
aggagaguccgcucagccagguugcagaagcggcuuagcguguguccuaaucuucucucugcguguagguaggccugugccgcaaacaagcuuaccaugggccagaucaucaccuucuuccaggaggugccccacgucaucgaggaggugaugaacaucgugcugaucgcccucagccugcuggccauccucaaggggaucuacaacgucgcgaccugcggccuguucgggcugguguccuuccuccugcugugcggccgcagcugcuccacgaccuacaaggggguguacgagcuccagacccuggagcuggacauggccagccucaacaugaccaugccgcuguccugcacgaagaacaacagccaccacuacaucauggucggcaacgagaccggccuggagcucacccugaccaacacguccaucaucaaccacaaguucugcaaccugagcgacgcccacaagaagaaccucuacgaccacgcccugauguccaucaucagcaccuuccaccuguccauccccaacuucaaccaguacgaggccaugagcugcgacuucaacgggggcaagaucuccgugcaguacaaccucagccacaccuacgcgguggacgccgccaaccacugcgggaccaucgccaacggcguccugcagacguucaugcggauggcguggggcggguccuacaucgcccuggacagcggcugcggguccugggacugcaucaugaccagcuaccaguaccucaucauccagaacaccaccugggaggaccacugccaguucucccgccccagccccaucggcuaccuggggcugcucagccagcggacgcgcgacaucuacaucucccggcgccugcugggcaccuucaccuggacccucagcgacuccgagagcaacgagacgccgggcggguacugccugacccgguggaugcugaucgaggccgagcucaagugcuucggcaacaccgccguggccaagugcaacgagaagcacgacgaggaguucugcgacaugcugcgccuguucgacuucaacaagcaggcgauccggcgccucaaggcccccgcccagauguccauccagcugaucaacaaggccgugaacgcccugaucaacgaccagcucaucaugaagaaccaccuccgggacaucaugugcauccccuacugcaacuacagcaaguacugguaccugaaccacaccgucacgggccgcaccucccugccccggugcuggcuggugagcaacggguccuaccugaacgagacccacuucagcgacgacaucgagcagcaggcggacaacaugaucaccgagcuccugcagaaggaguacauggaccgccagggcaagacgccccugggccucguggaccuguucgucuucuccaccagcuucuaccugaucuccaucuuccugcaccucgugaagaucccgacccaccggcacgugaucgggaagcccugccccaagccccaccgccugaaccacaugggcaucugcagcugcgggcuguacaagcacccgggcguccccgugaaguggaagcggugaggacuagucccuguucccagagcccacuuuuuuuucuuuuuuugaaauaaaauagccugucuuucagaucucaaaggcucuuuucagagccaccaaaaaaaaaaaaaaaaaaaaaaaaaaaaaaaaaaaaaaaaaaaaaaaaaaaaaaaaaaaaaaaaagaauu

SEQ ID NO: 28596 - RNA, 1733 nt, Artificial Sequence
  mRNA product Design a-2 (hSL-A64-N5) comprising derived and/or modified sequence from LASV(LASV035-NIG-2009;Clade II)__AIT17588__GPCmut5 (opt1)
aggagaguccgcucagccagguugcagaagcggcuuagcguguguccuaaucuucucucugcguguagguaggccugugccgcaaacaagcuuaccaugggccagaucaucaccuucuuccaggaggugccccacgucaucgaggaggugaugaacaucgugcugaucgcccucagccugcuggccauccucaaggggaucuacaacgucgcgaccugcggccuguucgggcugguguccuuccuccugcugugcggccgcagcugcuccacgaccuacaaggggguguacgagcuccagacccuggagcuggacauggccagccucaacaugaccaugccgcuguccugcacgaagaacaacagccaccacuacaucauggucggcaacgagaccggccuggagcucacccugaccaacacguccaucaucaaccacaaguucugcaaccugagcgacgcccacaagaagaaccucuacgaccacgcccugauguccaucaucagcaccuuccaccuguccauccccaacuucaaccaguacgaggccaugagcugcgacuucaacgggggcaagaucuccgugcaguacaaccucagccacgcguacgccguggacgccgccaaccacugcgggaccaucgcgaacggcguccugcagaccuucaugcggauggccuggggcggguccuacaucgcccuggacagcggcugcggguccugggacugcaucaugacgagcuaccaguaccucaucauccagaacaccaccugggaggaccacugccaguucucccgccccagccccaucggcuaccuggggcugcucagccagcggacccgcgacaucuacaucucccggcgccugcugggcacguucaccuggacccucagcgacuccgagggcaacgagacccccgggggcuacugccugacgcgguggaugcugaucgaggccgagcucaagugcuucgggaacaccgccguggcgaagugcaacgagaagcacgacgaggaguucugcgacaugcugcgccuguucgacuucaacaagcaggccauccggcgccucaaggcccccgcccagaugagcauccagcugaucaacaaggccgugaacgcgcugaucaacgaccagcucaucaugaagaaccaccuccgggacaucaugugcauccccuacugcaacuacuccaaguacugguaccugaaccacaccgucaccgggaagacgagccugccccgcugcuggcugguguccaacggcagcuaccugaacgagacccacuucuccgacgacaucgagcagcaggccgacaacaugaucaccgagcuccugcagaaggaguacaucgaccggcagggcaagaccccgcuggggcucguggaccuguucgucuucagcacguccuucuaccugaucagcaucuuccugcaccucgugaagaucccgacccaccgccacgugaucggcaagcccugccccaagccccaccggcugaaccacauggggaucugcuccugcggccuguacaagcacccggggguccccgugaaguggaagcgcugaggacuagucccuguucccagagcccacuuuuuuuucuuuuuuugaaauaaaauagccugucuuucagaucucaaaggcucuuuucagagccaccaaaaaaaaaaaaaaaaaaaaaaaaaaaaaaaaaaaaaaaaaaaaaaaaaaaaaaaaaaaaaaaaagaauu

SEQ ID NO: 28597 - RNA, 1733 nt, Artificial Sequence
  mRNA product Design a-2 (hSL-A64-N5) comprising derived and/or modified sequence from LASV(LASV1000-NIG-2009;Clade II)__AIT17782__GPCmut5 (opt1)
aggagaguccgcucagccagguugcagaagcggcuuagcguguguccuaaucuucucucugcguguagguaggccugugccgcaaacaagcuuaccaugggccagaucaucaccuucuuccaggaggugccccacgucaucgaggaggugaugaacaucgugcugaucgcccucagccugcuggccauccucaaggggaucuacaacgucgcgaccugcggccuguucgggcugguguccuuccuccugcugugcggccgcagcugcuccacgaccuacaaggggguguacgagcuccagacccuggagcuggacauggccagccucaacaugaccaugccgcuguccugcacgaagaacaacagccaccacuacaucauggucggcaacgagaccggccuggagcucacccugaccaacacguccaucaucaaccacaaguucugcaaccugagcgacgcccacaagaagaaccucuacgaccacgcccugauguccaucaucagcaccuuccaccuguccauccccaacuucaaccaguacgaggccaugagcugcgacuucaacgggggcaagaucuccgugcaguacaaccucagccacaccuacgcgguggacgccgccaaccacugcgggaccaucgccaacggcguccugcagacguucaugcggauggcguggggcggguccuacaucgcccuggacagcggcugcggguccugggacugcaucaugaccagcuaccaguaccucaucauccagaacaccaccugggaggaccacugccaguucucccgccccagccccaucggcuaccuggggcugcucagccagcggacgcgcgacaucuacaucucccggcgccugcugggcaccuucaccuggacccucagcgacuccgagggcaacgagacgcccgggggcuacugccugacccgguggaugcugaucgaggccgagcucaagugcuucgggaacaccgccguggccaagugcaacgagaagcacgacgaggaguucugcgacaugcugcgccuguucgacuucaacaagcaggcgaucaagcggcucaagacccccgcccagaugagcauccagcugaucaacaaggccgugaacgcccugaucaacgaccagcucaucaugaagaaccaccuccgcgacaucaugugcauccccuacugcaacuacuccaaguacugguaccugaaccacacggucaccgggaagaccagccugccccggugcuggcugguguccaacggcagcuaccugaacgagacccacuucuccgacgacaucgagcagcaggccgacaacaugaucacggagcuccugcagaaggaguacaucgaccgccagggcaagaccccgcuggggcucguggaccuguucgucuucagcaccuccuucuaccugaucagcaucuuccugcaccucgugaagaucccgacccaccggcacguggucggcaagcccugccccaagccccaccgccugaaccacauggggaucugcuccugcggccuguacaagcacccgggggugcccgugaaguggaagcggugaggacuagucccuguucccagagcccacuuuuuuuucuuuuuuugaaauaaaauagccugucuuucagaucucaaaggcucuuuucagagccaccaaaaaaaaaaaaaaaaaaaaaaaaaaaaaaaaaaaaaaaaaaaaaaaaaaaaaaaaaaaaaaaaagaauu

SEQ ID NO: 28598 - RNA, 1733 nt, Artificial Sequence
  mRNA product Design a-2 (hSL-A64-N5) comprising derived and/or modified sequence from LASV(LASV221-NIG-2010;Clade II)__AIT17624__GPCmut5 (opt1)
aggagaguccgcucagccagguugcagaagcggcuuagcguguguccuaaucuucucucugcguguagguaggccugugccgcaaacaagcuuaccaugggccagaucaucaccuucuuccaggaggugccccacgucaucgaggaggugaugaacaucgugcugaucgcccucagccugcuggccauccucaaggggaucuacaacgucgcgaccugcggccuguucgggcugguguccuuccuccugcugugcggccgcagcugcuccacgaccuacaaggggguguacgagcuccagacccuggagcuggacauggccagccucaacaugaccaugccgcuguccugcacgaagaacaacagccaccacuacaucauggucggcaacgagaccggccuggagcucacccugaccaacacguccaucaucaaccacaaguucugcaaccugagcgacgcccacaagaagaaccucuacgaccacgcccugauguccaucaucagcaccuuccaccuguccauccccaacuucaaccaguacgaggccaugagcugcgacuucaacgggggcaagaucuccgugcaguacaaccucagccacaccuacgcgaucgacgccgccaaccacugcgggaccaucgccaacggcgugcugcagacguucaugcggauggcguggggcggguccuacaucgcccuggacagcggcugcggguccugggacugcaucaugaccagcuaccaguaccucaucauccagaacaccaccugggaggaccacugccaguucucccgccccagccccaucggcuaccuggggcugcucagccagcggacgcgcgacaucuacaucucccggcgccugcugggcaccuucaccuggacccucagcgacuccgagggcaacgagacgcccgggggcuacugccugacccgguggaugcugaucgaggccgagcucaagugcuucgggaacaccgccgucgccaagugcaacgagaagcacgacgaggaguucugcgacaugcugcgccuguucgacuucaacaagcaggcgauccggcgccucaagacccccgcccagaugagcauccagcugaucaacaaggccgugaacgcccugaucaacgaccagcucaucaugaagaaccaccuccgggacaucaugugcauccccuacugcaacuacuccaaguacugguaccugaaccacacggugaccgggaagaccagccugccccgcugcuggcuggucuccaacggcagcuaccugaacgagacccacuucuccgacgacaucgagcagcaggccgacaacaugaucacggagaugcuccagaaggaguacauggaccggcagggcaagaccccgcuggggcugguggaccucuucguguucagcaccuccuucuaccugaucagcaucuuccugcaccuggucaagaucccgacccaccgccacgugaucggcaagcccugccccaagccccaccggcucaaccacauggggaucugcuccugcggccuguacaagcacccgggggugcccgucaaguggaagcgcugaggacuagucccuguucccagagcccacuuuuuuuucuuuuuuugaaauaaaauagccugucuuucagaucucaaaggcucuuuucagagccaccaaaaaaaaaaaaaaaaaaaaaaaaaaaaaaaaaaaaaaaaaaaaaaaaaaaaaaaaaaaaaaaaagaauu

SEQ ID NO: 28599 - RNA, 1733 nt, Artificial Sequence
  mRNA product Design a-2 (hSL-A64-N5) comprising derived and/or modified sequence from LASV(LASV237-NIG-2010;Clade II)__AIT17638__GPCmut5 (opt1)
aggagaguccgcucagccagguugcagaagcggcuuagcguguguccuaaucuucucucugcguguagguaggccugugccgcaaacaagcuuaccaugggccagaucaucaccuucuuccaggaggugccccacgucaucgaggaggugaugaacaucgugcugaucgcccucagccugcuggccauccucaaggggaucuacaacgucgcgaccugcggccuguucgggcugguguccuuccuccugcugugcggccgcagcugcuccacgaccuacaaggggguguacgagcuccagacccuggagcuggacauggccagccucaacaugaccaugccgcuguccugcacgaagaacaacagccaccacuacaucauggucggcaacgagaccggccuggagcucacccugaccaacacguccaucaucaaccacaaguucugcaaccugagcgacgcccacaagaaggaccucuacgaccacgcccugauguccaucaucagcaccuuccaccuguccauccccaacuucaaccaguacgaggccaugagcugcgacuucaacgggggcaagaucuccgugcaguacaaccucagccacaccuacgcgguggacgccgccaaccacugcgggaccaucgccaacggcguccugcagacguucaugcggauggcguggggcggguccuacaucgcccuggacagcggcugcggguccugggacugcaucaugaccagcuaccaguaccucaucauccagaacaccaccugggaggaccacugccaguucucccgccccagccccaucggcuaccuggggcugcucagccagcggacgcgcgacaucuacaucucccggcgccugcugggcaccuucaccuggacccucagcgacuccgagggcaacgagacgcccgggggcuacugccugacccgguggaugcugaucgaggccgagcucaagugcuucgggaacaccgccguggccaagugcaacgagaagcacgacgaggaguucugcgacaugcugcgccuguucgacuucaacaagcaggcgauccggcgccucaagacccccgcccagaugagcauccagcugaucaacaaggccgugaacgcccugaucaacgaccagcucaucaugaagaaccaccuccgggacaucaugugcauccccuacugcaacuacuccaaguacugguaccugaaccacacggucaccgggaagaccagccugccccgcugcuggcugguguccaacggcagcuaccugaacgagacccacuucuccgacgacaucgagcagcaggccgacaacaugaucacggagcuccugcagaaggaguacauggaccggcagggcaagaccccgcuggggcucguggaccuguucgucuucagcaccuccuucuaccugaucagcaucuuccugcaccucaucaagaucccgacccaccgccacaucacgggcaagcccugccccaagccccaccggcugaaccacauggggaucugcuccugcggccuguacaagcacccgggggugcccgugaaguggaagcgcugaggacuagucccuguucccagagcccacuuuuuuuucuuuuuuugaaauaaaauagccugucuuucagaucucaaaggcucuuuucagagccaccaaaaaaaaaaaaaaaaaaaaaaaaaaaaaaaaaaaaaaaaaaaaaaaaaaaaaaaaaaaaaaaaagaauu

SEQ ID NO: 28600 - RNA, 1733 nt, Artificial Sequence
  mRNA product Design a-2 (hSL-A64-N5) comprising derived and/or modified sequence from LASV(LASV253-NIG-2011;Clade II)__AIT17670__GPCmut5 (opt1)
aggagaguccgcucagccagguugcagaagcggcuuagcguguguccuaaucuucucucugcguguagguaggccugugccgcaaacaagcuuaccaugggccagaucaucaccuucuuccaggaggugccccacgucaucgaggaggugaugaacaucgugcugaucgcccucagccugcuggccauccucaaggggaucuacaacgucgcgaccugcggccuguucgggcugguguccuuccuccugcugugcggccgcagcugcuccacgaccuacaaggggguguacgagcuccagacccuggagcuggacauggccagccucaacaugaccaugccgcuguccugcacgaagaacaacagccaccacuacaucauggucggcaacgagaccggccuggagcucacccugaccaacacguccaucaucaaccacaaguucugcaaccugagcgacgcccacaagaagaaccucuacgaccacgcccugauguccaucaucagcaccuuccaccuguccauccccaacuucaaccaguacgaggccaugagcugcgacuucaacgggggcaagaucuccgugcaguacaaccucagccacaccuacgcgguggacgccgccaaccacugcgggaccaucgccaacggcguccugcagacguucaugcggauggcguggggcggguccuacaucgcccuggacagcggcugcggguccugggacugcaucaugaccagcuaccaguaccucaucauccagaacaccaccugggaggaccacugccaguucucccgccccagccccaucggcuaccuggggcugcucagccagcggacgcgcgacaucuacaucucccggcgccugcugggcaccuucaccuggacccucagcgacuccgagggcaacgagacgcccgggggcuacugccugacccgguggaugcugaucgaggccgagcucaagugcuucgggaacaccgccguggccaagugcaacgagaagcacgacgaggaguucugcgacaugcugcgccuguucgacuucaacaagcaggcgauccggcgccucaaggcccccgcccagaugagcauccagcugaucaacaaggccgugaacgcccugaucaacgaccagcucaucaugaagaaccaccuccgggacaucaugugcaucccguacugcaacuacuccaaguacugguaccugaaccacaccgucacggggcgcaccagccugccccggugcuggcugguguccaacggcagcuaccugaacgagacccacuucuccgacgacaucgagcagcaggcggacaacaugaucaccgagcuccugcagaaggaguacaucgaccgccagggcaagacgccccuggggcucguggaccuguucgucuucagcaccuccuucuaccugaucagcaucuuccugcaccucgugaagaucccgacccaccggcacaucaucggcaagcccugccccaagccccaccgccugaaccacauggggaucugcuccugcggccuguacaagcacccgggggugcccgucaaguggaagcggugaggacuagucccuguucccagagcccacuuuuuuuucuuuuuuugaaauaaaauagccugucuuucagaucucaaaggcucuuuucagagccaccaaaaaaaaaaaaaaaaaaaaaaaaaaaaaaaaaaaaaaaaaaaaaaaaaaaaaaaaaaaaaaaaagaauu

SEQ ID NO: 28601 - RNA, 1733 nt, Artificial Sequence
  mRNA product Design a-2 (hSL-A64-N5) comprising derived and/or modified sequence from LASV(LASV254-NIG-2011;Clade II)__AIT17674__GPCmut5 (opt1)
aggagaguccgcucagccagguugcagaagcggcuuagcguguguccuaaucuucucucugcguguagguaggccugugccgcaaacaagcuuaccaugggccagaucaucaccuucuuccaggaggugccccacgucaucgaggaggugaugaacaucgugcugaucgcccucagccugcuggccauccucaaggggaucuacaacgucgcgaccugcggccuguucgggcugguguccuuccuccugcugugcggccgcagcugcuccacgaccuacaaggggguguacgagcuccagacccuggagcuggacaugaccaaccucaacaugacgaugccgcugagcugcaccaagaacaacucccaccacuacaucauggucggcaacgagaccggccuggagcucacccugacgaacaccagcaucaucaaccacaaguucugcaaccuguccgacgcccacaagaagaaccucuacaaccacgcccugaugagcaucaucuccaccuuccaccugagcauccccaacuucaaccaguacgaggccauguccugcgacuucaacgggggcaagaucagcgugcaguacaaccucucccacagcuacgccguggacgcggccaaccacugcgggaccaucgccaacggcguccugcagacguucaugcggauggccuggggcggguccuacaucgcgcuggacagcggcugcgggaacugggacugcaucaugaccuccuaccaguaccucaucauccagaacaccaccugggaggaccacugccaguucagccgccccucccccaucggcuaccuggggcugcucagccagcggacgcgcgacaucuacaucagccggcgccugcugggcaccuucaccuggacccucuccgacagcgagggcaacgagacgcccgggggcuacugccugacccgguggaugcugaucgaggccgagcucaagugcuucgggaacaccgccguggccaagugcaacgagaagcacgacgaggaguucugcgacaugcugcgccuguucgacuucaacaagcaggccauccggcgccucaagacccccgcgcaggccaacauccagcugaucaacaaggccgugaacgcccugaucaacgaccagcucaucaugaagaaccaccuccgggacaucaugugcauccccuacugcaacuacuccaaguacugguaccugaaccacacggucaccgggaagaccagccugccccgcugcuggcugguguccaacggcagcuaccugaacgagacccacuucuccgacgacaucgagcagcaggccgacaacaugaucacggagcuccugcagaaggaguacauggaccggcagggcaagaccccgcuggggcucguggaccuguucgucuucagcaccuccuucuaccugaucagcaucuuccugcaccucgugaagaucccgacccaccgccacgugaucggcaagcccugccccaagccccaccggcugaaccacauggggaucugcuccugcggccuguacaagcacccggggguccccgugaaguggaagcgcugaggacuagucccuguucccagagcccacuuuuuuuucuuuuuuugaaauaaaauagccugucuuucagaucucaaaggcucuuuucagagccaccaaaaaaaaaaaaaaaaaaaaaaaaaaaaaaaaaaaaaaaaaaaaaaaaaaaaaaaaaaaaaaaaagaauu

SEQ ID NO: 28602 - RNA, 1733 nt, Artificial Sequence
  mRNA product Design a-2 (hSL-A64-N5) comprising derived and/or modified sequence from LASV(Nig08-A19;Clade III)__ADU56618__GPCmut5 (opt1)
aggagaguccgcucagccagguugcagaagcggcuuagcguguguccuaaucuucucucugcguguagguaggccugugccgcaaacaagcuuaccaugggccagaucgugaccuucuuccaggaggucccccacgugaucgaggaggugaugaacaucguccugaucgcccucagcauccuggccauccugaaggggcucuacaacaucgcgaccugcggccugaucgggcuggugacguuccuccugcuguccggccgcagcugcuccaugaccuacaaggggguguacgagcuccagacccuggagcugaacaugaacacccucaacaugacgaugccgcugagcugcaccaagaacaacucccaccacuacaucauggucggcaacgagaccggccuggagcucacccugacgaacaccagccugcuccaccacaaguucugcaaccuguccgacgcccacaagaagaaccuguacgaccacacccucaugagcaucaucuccaccuuccaccugagcauccccaacuucaaccaguacgaggccauguccugcgacuucaacgggggcaagaucacggugcaguacaaccugagccacuccuacgccaucgacgccgcgaaccacugcgggaccguggccaacggcguccuccagaccuucaugcggauggccuggggcgggagcuacaucgcccuggacuccggcugcgggaagugggacugcaucaugaccagcuaccaguaccugaucauccagaacacgaccugggaggaccacugccaguucucccggcccagccccaucggcuaccucgggcugcugucccagcgcacccgggacaucuacaucagccgccggcuccugggcaccuucacguggacccugagcgacuccgagggcaacgagacccccgggggcuacugccucacccgcuggaugcugaucgaggcggagcugaagugcuucgggaacacggccguggccaagugcaacgagaagcacgacgaggaguucugcgacaugcuccggcuguucgacuucaacaagcaggccauccgccggcugaaggcccccgcgcagaugagcauccagcucaucaacaaggccgugaacgcccugaucaacgaccagcugaucaugaagaaccaccuccgcgacaucaugugcauccccuacugcaacuacuccaaguacugguaccugaaccacaccagcaccgggcggaccucccugccccgcugcuggcucgucagcaacggcuccuaccugaacgagacgcacuucagcgacgacaucgagcagcaggccgacaacaugaucaccgagaugcugcagaaggaguaccucgaccggcagggcaagaccccgcuggggcugguggaccuguucguguucuccaccagcuucuaccucaucuccaucuuccugcaccuggucaagaucccgacgcaccgccacaucgugggcaagcccugccccaagccccaccggcucaaccacauggggaucugcagcugcggccuguacaagcagccgggggugcccguccgcuggaagcggugaggacuagucccuguucccagagcccacuuuuuuuucuuuuuuugaaauaaaauagccugucuuucagaucucaaaggcucuuuucagagccaccaaaaaaaaaaaaaaaaaaaaaaaaaaaaaaaaaaaaaaaaaaaaaaaaaaaaaaaaaaaaaaaaagaauu

SEQ ID NO: 28603 - RNA, 1736 nt, Artificial Sequence
  mRNA product Design a-2 (hSL-A64-N5) comprising derived and/or modified sequence from LASV(G1180-SLE-2010;Clade IV)__AIT17168__GPCmut5 (opt1)
aggagaguccgcucagccagguugcagaagcggcuuagcguguguccuaaucuucucucugcguguagguaggccugugccgcaaacaagcuuaccaugggccagaucgugaccuucuuccaggaggucccccacgugaucgaggaggugaugaacaucguccugaucgcccucagcauccuggccgugcugaaggggcucuacaacuucgcgaccugcggccugguggggcugcucaccuuccugcugcucugcggccgcuccugcaccgccagccgguacaagggggucuacgagcugcagacccuggagcucaacauggagacccugaacaugacgaugccgcuguccugcaccaagaacaacagccaccacuacaucauggugggcaacgagaccggccucgagcugacccugacgaacaccuccaucaucaaccacaaguucugcaaccucagcgacgcccacaagaagaaccuguacgaccacgcccugauguccaucaucagcaccuuccaccucuccauccccaacuucaaccaguacgaggccaugagcugcgacuucaacgggggcaagaucuccgugcaguacaaccugagccacuccuacgcgggggacgccgccaaccacugcggcaccgucgccaacggggugcugcagacguucaugcgcauggcguggggcggcagcuacaucgcccucgacuccgggugcggcagcugggacugcaucaugaccuccuaccaguaccugaucauccagaacaccaccugggaggaccacugccaguucagccggcccucccccaucggguaccugggccuccugagccagcgcacgcgggacaucuacaucagccgccggcugcucggcaccuucaccuggacccuguccgacagcgaggggaaggacacgccgggcggguacugccugacccgcuggaugcucaucgaggccgagcugaagugcuucggcaacaccgccguggccaagugcaacgagaagcacgacgaggaguucugcgacaugcugcggcuguucgacuucaacaagcaggcgauccagcgccugaaggcccccgcccagauguccauccagcugaucaacaaggccgucaacgcccucaucaacgaccagcugaucaugaagaaccaccuccgggacaucaugugcauccccuacugcaacuacagcaaguacugguaccucaaccacaccacgaccggcaagaccucccugcccaagugcuggcuggugagcaacggcuccuaccucaacgagacccacuucagcgacgacaucgagcagcaggcggacaacaugaucacggagaugcugcagaaggaguacauggagcgccaggggaagacgccccugggccucguggaccuguucgucuucuccaccagcuucuaccugaucuccaucuuccugcaccucgugaagaucccgacccaccggcacaucgugggcaagagcugccccaagccccaccgccugaaccacauggggaucugcuccugcgggcuguacaagcagcccggcgucccggugaaguggaagcggugaggacuagucccuguucccagagcccacuuuuuuuucuuuuuuugaaauaaaauagccugucuuucagaucucaaaggcucuuuucagagccaccaaaaaaaaaaaaaaaaaaaaaaaaaaaaaaaaaaaaaaaaaaaaaaaaaaaaaaaaaaaaaaaaagaauu

SEQ ID NO: 28604 - RNA, 1736 nt, Artificial Sequence
  mRNA product Design a-2 (hSL-A64-N5) comprising derived and/or modified sequence from LASV(G1442-SLE-2011;Clade IV)__AIT17180__GPCmut5 (opt1)
aggagaguccgcucagccagguugcagaagcggcuuagcguguguccuaaucuucucucugcguguagguaggccugugccgcaaacaagcuuaccaugggccagaucgugaccuucuuccaggaggucccccacgugaucgaggaggugaugaacaucguccugaucgcccucagcauccuggccgugcugaaggggcucuacaacguggcgaccugcggccugaucgggcuggucacguuccuccugcugugcggccgcuccugcaccaccacccucuacaaggggguguacgagcugcagacgcuggagcucaacauggagacccugaacaugaccaugccgcugagcugcaccaagaacaacucccaccacuacauccgggugggcaacgagacgggccucgagcugacccugaccaacaccagcaucaucaaccacaaguucugcaaccucuccgacgcccacaagaagaaccuguacgaccacgcccugaugagcaucaucuccacguuccaccucagcauccccaacuucaaccaguacgaggccauguccugcgacuucaacgggggcaagaucagcguccaguacaaccugucccacagcuacgccggggacgcggccaaccacugcggcaccguggccaacggggugcugcagaccuucaugcgcauggccuggggcggcuccuacaucgcgcucgacagcgggugcggcaacugggacugcaucaugaccuccuaccaguaccugaucauccagaacacgaccugggacgaccacugccaguucagccgccccucccccaucggguaccugggccuccugagccagcggacccgcgacgucuacaucucccggcgccugcucggcaccuucacguggacccugagcgacagcgaggggaaggacaccccgggcggguacugccugacccgguggaugcucaucgaggccgagcugaagugcuucggcaacacggccguggccaagugcaacgagaagcacgacgaggaguucugcgacaugcugcgccucuucgacuucaacaagcaggccauccagcggcugaaggcgcccgcccagauguccauccagcugaucaacaaggccgugaacgcccucaucaacgaccagcugaucaugaagaaccaccuccgcgacaucaugugcauccccuacugcaacuacagcaaguacugguaccugaacaacaccgccaccggcaagaccucccugcccaagugcuggcugaucagcaacggcuccuaccucaacgagacgcacuucagcgacgacaucgagcaggaggcggacaacaugaucaccgagaugcugcagaaggaguacauggagcggcaggggaagacgccccugggccucgucgaccuguucguguucuccaccagcuucuaccugaucuccaucuuccugcaccucgugaagaucccgacccaccgccacaucgucggcaagagcugccccaagccccaccggcugaaccacauggggaucugcuccugcgggcuguacaagcagcccggcgugccggugcgcuggaagcggugaggacuagucccuguucccagagcccacuuuuuuuucuuuuuuugaaauaaaauagccugucuuucagaucucaaaggcucuuuucagagccaccaaaaaaaaaaaaaaaaaaaaaaaaaaaaaaaaaaaaaaaaaaaaaaaaaaaaaaaaaaaaaaaaagaauu

SEQ ID NO: 28605 - RNA, 1736 nt, Artificial Sequence
  mRNA product Design a-2 (hSL-A64-N5) comprising derived and/or modified sequence from LASV(G3010-SLE-2013;Clade IV)__AIT17344__GPCmut5 (opt1)
aggagaguccgcucagccagguugcagaagcggcuuagcguguguccuaaucuucucucugcguguagguaggccugugccgcaaacaagcuuaccaugggccagaucgugaccuucuuccaggaggucccccacgugaucgaggaggugaugaacaucguccugaucgcccucagcauccuggccgugcugaaggggcucuacaacuucgcgaccugcggccugguggggcuggucacguuccuccugcugugcggccgcuccugcaccaccagccucuacaaggggguguacgagcugcagacccuggagcucaacauggagacgcugaacaugaccaugccgcuguccugcaccaagaacaacagccaccacuacaucauggugggcaacgagaccggccucgagcugacgcugaccaacaccuccaucaucaaccacaaguucugcaaccucagcgacgcccacaagaagaaccuguacaaccacgcccugauguccaucaucagcaccuuccaccucuccauccccaacuucaaccaguacgaggccaugagcugcgacuucaacgggggcaagaucuccguccaguacaaccugagccacuccuacgccggggacgcggccagccacugcggcacgguggccaacggggugcugcagaccuucaugcggauggccuggggcggcuccuacaucgcgcucgacagcgggugcggcaagugggacugcaucaugaccuccuaccaguaccugaucauccagaacaccacgugggaggaccacugccaguucagccgccccucccccaucggguaccugggccuccugagccagcggacccgcgacaucuacaucagccggcgccugcucggcaccuucaccuggacgcuguccgacagcgaggggaaggacaccccgggcggguacugccugacccgguggaugcucaucgaggccgagcugaagugcuucggcaacaccgccgucgccaagugcaacgagaagcacgacgaggaguucugcgacaugcugcgccucuucgacuucaacaagcaggccauccagcggcugaagacgcccgcgcagauguccauccagcugaucaacaaggccgugaacgcccucaucaacgaccagcugaucaugaagaaccaccuccgcgacaucaugugcauccccuacugcaacuacagcaaguacugguaccugaaccacaccaccaccggcaagacgucccugcccaagugcuggcuggugagcaacggcuccuaccucaacgagacccacuucagcgacgacaucgagcagcaggccgacaacaugaucaccgagaugcugcagaaggaguacauggagcggcaggggaagacgccccugggccucgucgaccuguucguguucuccaccagcuucuaccugaucuccaucuuccugcaccucgugaagaucccgacccaccgccacaucgucggcaagagcugccccaagccccaccggcugaaccacauggggaucugcuccugcgggcuguacaagcagcccggcgugccggugcgcuggaagcggugaggacuagucccuguucccagagcccacuuuuuuuucuuuuuuugaaauaaaauagccugucuuucagaucucaaaggcucuuuucagagccaccaaaaaaaaaaaaaaaaaaaaaaaaaaaaaaaaaaaaaaaaaaaaaaaaaaaaaaaaaaaaaaaaagaauu

SEQ ID NO: 28606 - RNA, 1736 nt, Artificial Sequence
  mRNA product Design a-2 (hSL-A64-N5) comprising derived and/or modified sequence from LASV(G502-SLE-2009;Clade IV)__AIT17126__GPCmut5 (opt1)
aggagaguccgcucagccagguugcagaagcggcuuagcguguguccuaaucuucucucugcguguagguaggccugugccgcaaacaagcuuaccaugggccagaucgugaccuucuuccaggaggucccccacgugaucgaggaggugaugaacaucguccugaucgcccucagcauccuggccgugcugaaggggcucuacaacuucgcgaccugcggccugguggggcugcucacguuccugcugcucugcggccgcuccugcaccaccgggcuguacaagggcgucuacgagcugcagacccucgagcugaacauggagacgcugaacaugaccaugccgcucagcugcaccaagaacaacucccaccacuacaucauggugggcaacgagaccgggcuggagcugacgcucaccaacaccagcaucaucaaccacaaguucugcaaccuguccgacgcccacaagaagaaccuguacgaccacgcccucaugagcaucaucuccaccuuccaccugagcauccccaacuucaaccaguacgaggccauguccugcgacuucaacggcgggaagaucagcgugcaguacaaccugucccacagcuacgccggcgacgcggccgaccacugcgggacggucgccaacggcgugcuccagaccuucaugcggauggccuggggcggguccuacaucgcgcuggacagcggcugcgggcggugggacugcaucaugaccuccuaccaguaccugaucauccagaacaccacgugggaggaccacugccaguucagccgccccucccccaucggcuaccucggccugcugagccagcggacccgcgacaucuacaucucccggcgccuccuggggaccuucaccuggacgcugagcgacagcgagggcaaggacacccccgggggcuacugccucacccgguggaugcugaucgaggccgagcugaagugcuucgggaacaccgccguggccaagugcaacgagaagcacgacgaggaguucugcgacaugcuccgccuguucgacuucaacaagcaggccauccagcggcugaaggcgcccgcccagauguccauccagcucaucaacaaggccgucaacgcccugaucaacgaccagcuggugaugaagaaccaccuccgcgacaucaugugcauccccuacugcaacuacagccgguacugguaccugaaccacacgaccaccggccgcaccucccugcccaagugcuggcucgugagcaacggguccuaccugaacgagacgcacuucagcgacgacaucgagcagcaggccgacaacaugaucaccgagaugcugcagaaggaguacauggagcggcagggcaagaccccgcucgggcuggucgaccuguucguguucuccaccagcuucuaccugaucuccaucuuccuccaccuggugaagaucccgacgcaccgccacaucgucggcaagagcugccccaagccccaccggcugaaccacauggggaucugcuccugcggccucuacaagcagcccggcgugccggugaaguggaagcgcugaggacuagucccuguucccagagcccacuuuuuuuucuuuuuuugaaauaaaauagccugucuuucagaucucaaaggcucuuuucagagccaccaaaaaaaaaaaaaaaaaaaaaaaaaaaaaaaaaaaaaaaaaaaaaaaaaaaaaaaaaaaaaaaaagaauu

SEQ ID NO: 28607 - RNA, 1736 nt, Artificial Sequence
  mRNA product Design a-2 (hSL-A64-N5) comprising derived and/or modified sequence from LASV(G733-SLE-2010;Clade IV)__AIT17154__GPCmut5 (opt1)
aggagaguccgcucagccagguugcagaagcggcuuagcguguguccuaaucuucucucugcguguagguaggccugugccgcaaacaagcuuaccaugggccagaucgugaccuucuuccaggaggucccccacgugaucgaggaggugaugaacaucguccugaucgcccucagcauccuggccgugcugaaggggcucuacaacuucgcgaccugcggcaucguggggcuggucuccuuccugcuccugugcggccgcagcugcacgaccucccuguacaaggggguguacgagcuccagacccuggagcugaacauggagacccucaacaugacgaugccgcugagcugcaccaagaacaacucccaccacuacaucauggugggcaacgagaccggccuggagcucacccugacgaacaccagcaucaucaaccacaaguucugcaaccuguccgacgcccacaagaagaaccucuacgaccacgcccugaugagcaucaucuccaccuuccaccugagcauccccaacuucaaccaguacgaggccauguccugcgacuucaacgggggcaagaucagcguccaguacaaccucucccacagcuacgccggggacgcggccaaccacugcggcaccaucgccaacggggugcugcagacguucaugcggauggccuggggcggcuccuacaucgcgcuggacagcgggugcgaccggugggacugcaucaugaccuccuaccaguaccucaucauccagaacaccaccugggaggaccacugccaguucagccgccccucccccaucggcuaccuggggcugcucagccagcggacgcgcgacaucuacaucagccggcgccugcugggcaccuucaccuggacccucuccgacagcgagggcaaggacacgcccgggggcuacugccugacccgguggaugcugaucgaggccgagcucaagugcuucgggaacaccgccguggccaagugcaacgagaagcacgacgaggaguucugcgacaugcugcgccuguucgacuucaacaagcaggccauccagcggcucaaggcgcccgcccagauguccauccagcugaucaacaaggccgucaacgcccugaucaacgaccagcucaucaugaagaaccaccuccgcgacaucaugugcauccccuacugcaacuacagcaaguacugguaccugaaccacaccacgaccgggaagaccucccugcccaagugcuggcuggugagcaacggcuccuaccugaacgagacccacuucagcgacgacaucgagcagcaggccgacaacaugaucacggagaugcuccagaaggaguacauggagcggcagggcaagaccccgcuggggcugguggaccucuucgucuucuccaccagcuucuaccugaucuccaucuuccugcaccuggugaagaucccgacccaccgccacguggucggcaagagcugccccaagccccaccggcucaaccacauggggaucugcuccugcggccuguacgggcagcccggcgugccggugaaguggaagcgcugaggacuagucccuguucccagagcccacuuuuuuuucuuuuuuugaaauaaaauagccugucuuucagaucucaaaggcucuuuucagagccaccaaaaaaaaaaaaaaaaaaaaaaaaaaaaaaaaaaaaaaaaaaaaaaaaaaaaaaaaaaaaaaaaagaauu

SEQ ID NO: 28608 - RNA, 1736 nt, Artificial Sequence
  mRNA product Design a-2 (hSL-A64-N5) comprising derived and/or modified sequence from MOPV/LASV reassortant(IGS-1;Clade IV)__AFY05576__GPCmut5 (opt1)
aggagaguccgcucagccagguugcagaagcggcuuagcguguguccuaaucuucucucugcguguagguaggccugugccgcaaacaagcuuaccaugggccagaucgugaccuucuuccaggaggucccccacgugaucgaggaggugaugaacaucguccugaucgcccucagcgugcuggccgugcugaaggggcucuacaacuucgcgaccugcggccuggucgggcuggugacguuccuccugcugugcggccgcuccugcaccaccagccucuacaaggggguguacgagcugcagacccuggagcucaacauggagacgcugaacaugaccaugccgcuguccugcaccaagaacaacagccaccacuacaucauggucggcaacgagaccggccucgagcugacgcugaccaacaccuccaucaucaaccacaaguucugcaaccucagcgacgcccacaagaagaaccuguacgaccacgcccugauguccaucaucagcaccuuccaccucuccauccccaacuucaaccaguacgaggccaugagcugcgacuucaacgggggcaagaucuccgugcaguacaaccugagccacuccuacgccggggacgcggccaaccacugcggcacgguggccaacgggguccugcagaccuucaugcggauggccuggggcggcagcuacaucgcgcucgacuccgggugcggcaacugggacugcaucaugaccagcuaccaguaccugaucauccagaacaccacgugggaggaccacugccaguucucccggcccagccccaucggguaccugggccuccugucccagcgcacccgggacaucuacaucagccgccggcugcucggcaccuucaccuggacgcugagcgacuccgagggggaggacaccccgggcggguacugccugacccgcuggaugcucaucgaggccgagcugaagugcuucggcaacaccgccguggccaagugcaacgagaagcacgacgaggaguucugcgacaugcugcggcuguucgacuucaacaagcaggccauccagcgccugaaggcgcccgcccagaugagcauccagcugaucaacaaggccgugaacgcccucaucaacgaccagcugaucaugaagaaccaccuccgggacaucaugugcauccccuacugcaacuacuccaaguacugguaccucaaccacacgaccaccggccgcaccagccugcccaagugcuggcuggucuccaacggcagcuaccucaacgagacgcacuucuccgacgacaucgagcagcaggccgacaacaugaucaccgagaugcugcagaaggaguacauggagcggcaggggaagacgccccugggccucguggaccuguucguguucagcaccuccuucuaccugaucagcaucuuccugcaccucgucaagaucccgacccaccgccacaucguggggaaguccugccccaagccccaccggcugaaccacaugggcaucugcagcugcgggcuguacaagcagcccggcgugccggucaaguggaagcgcugaggacuagucccuguucccagagcccacuuuuuuuucuuuuuuugaaauaaaauagccugucuuucagaucucaaaggcucuuuucagagccaccaaaaaaaaaaaaaaaaaaaaaaaaaaaaaaaaaaaaaaaaaaaaaaaaaaaaaaaaaaaaaaaaagaauu

SEQ ID NO: 28609 - RNA, 1736 nt, Artificial Sequence
  mRNA product Design a-2 (hSL-A64-N5) comprising derived and/or modified sequence from LASV(LM765-SLE-2012;Clade IV)__AIT17814__GPCmut5 (opt1)
aggagaguccgcucagccagguugcagaagcggcuuagcguguguccuaaucuucucucugcguguagguaggccugugccgcaaacaagcuuaccaugggccagaucgugaccuucuuccaggaggucccccacgugaucgaggaggugaugaacaucguccugaucgcccucagcauccuggccgugcugaaggggcucuacaacuucgcgaccugcggccugguggggcuggucacguuccuccugcugugcggccgcuccugcaccaccagccucuacaaggggguguacgagcugcagacccuggagcucaacauggagacgcugaacaugaccaugccgcuguccugcaccaagaacaacagccaccacuacaucauggugggcaacgagaccggccucgagcugacgcugaccaacaccuccaucaucgaccacaaguucugcaaccucagcgacgcccaccggaagaaccuguacgaccacgcccugauguccaucaucagcaccuuccaccucuccauccccaacuucaaccaguacgaggccaugagcugcgacuucaacgggggcaagaucuccguccaguacaaccugagccacuccuacgccaaggacgcggccgaccacugcgggacgguggccaacggcgugcugcagaccuucaugcgcauggccuggggcgggagcuacaucgcgcucgacuccggcugcgggcgcugggacugcaucaugaccagcuaccaguaccugaucauccagaacaccacgugggaggaccacugccaguucucccggcccagccccaucggcuaccuggggcuccugucccagcgcacccgggacaucuacaucagccgccggcugcucggcaccuucaccuggacgcugagcgacuccgagggcaaggacacccccgggggcuacugccugacccgcuggaugcucaucgaggccgagcugaagugcuucgggaacaccgccgucgccaagugcaacgagaagcacgacgaggaguucugcgacaugcugcggcuguucgacuucaacaagcaggccauccagcgccugaaggcgcccgcccagaugagcauccagcugaucaacaaggccgugaacgcccucaucaacgaccagcugaucaugaagaaccaccuccgggacaucaugugcauccccuacugcaacuacuccaaguacugguaccucaaccacacgaccaccgggaagaccagccugcccaagugcuggcugguguccaacggcagcuaccucaacgagacgcacuucuccgacgacaucgagcagcaggccgacaacaugaucaccgagaugcugcagaaggaguacauggagcgccagggcaagaccccgcuggggcucgucgaccuguucguguucagcaccuccuucuaccugaucagcaucuuccugcaccucgugaagaucccgacgcaccggcacaucgucggcaagcccugccccaagccccaccgccugaaccacauggggaucugcuccugcggccuguacaagcagccgggggugcccgugaaguggaagcggugaggacuagucccuguucccagagcccacuuuuuuuucuuuuuuugaaauaaaauagccugucuuucagaucucaaaggcucuuuucagagccaccaaaaaaaaaaaaaaaaaaaaaaaaaaaaaaaaaaaaaaaaaaaaaaaaaaaaaaaaaaaaaaaaagaauu

SEQ ID NO: 28610 - RNA, 1736 nt, Artificial Sequence
  mRNA product Design a-2 (hSL-A64-N5) comprising derived and/or modified sequence from LASV(LM776-SLE-2012;Clade IV)__AIT17824__GPCmut5 (opt1)
aggagaguccgcucagccagguugcagaagcggcuuagcguguguccuaaucuucucucugcguguagguaggccugugccgcaaacaagcuuaccaugggccagaucgugaccuucuuccaggaggucccccacgugaucgaggaggugaugaacaucguccugaucgcccucagcauccuggccgugcugaaggggcucuacaacuucgcgaccugcggccugguggggcuggucacguuccuccugcugugcggccgcuccugcaccaccagcguguacaaggggguguacgagcuccagacccuggagcugaacauggagacgcucaacaugaccaugccgcuguccugcaccaagaacaacagccaccacuacaucauggucggcaacgagaccggccuggagcucacgcugaccaacaccuccaucaucaaccacaaguucugcaaccugagcgacgcccacaagaagaaccucuacgaccacgcccugauguccaucaucagcaccuuccaccuguccauccccaacuucaaccaguacgaggccaugagcugcgacuucaacgggggcaagaucuccgugcaguacaaccucagccacuccuacgccggggacgcggccaaccacugcggcacgguggccaacgggguccugcagaccuucaugcggauggccuggggcggcagcuacaucgcgcuggacuccgggugcggcaagugggacugcaucaugaccagcuaccaguaccucaucauccagaacaccacgugggaggaccacugccaguucucccgccccagccccaucggguaccugggccugcucucccagcggacccgcgacaucuacaucagccggcgccugcugggcaccuucaccuggacgcucagcgacuccgaggggaaggacaccccgggcggguacugccugacccgguggaugcugaucgaggccgagcucaagugcuucggcaacaccgccguggccaagugcaacgagaagcacgacgaggaguucugcgacaugcugcgccuguucgacuucaacaagcaggccauccagcggcucaaggcgcccgcccagaugagcauccagcugaucaacaaggccgugaacgcccugaucaacgaccagcucaucaugaagaaccaccuccgcgacaucaugugcauccccuacugcaacuacuccaaguacugguaccugaaccacacgaccaccggcaagaccagccugcccaagugcuggcuggucuccaacggcagcuaccugaacgagacgcacuucuccgacgacaucgagcagcaggccgacaacaugaucaccgagaugcuccagaaggaguacauggagcggcaggggaagacgccccugggccugguggaccucuucguguucagcaccuccuucuaccugaucagcaucuuccugcaccuggucaagaucccgacccaccgccacaucguggggaaguccugccccaagccccaccggcucaaccacaugggcaucugcagcugcgggcuguacaagcagcccggcgugccgguccgcuggaagcggugaggacuagucccuguucccagagcccacuuuuuuuucuuuuuuugaaauaaaauagccugucuuucagaucucaaaggcucuuuucagagccaccaaaaaaaaaaaaaaaaaaaaaaaaaaaaaaaaaaaaaaaaaaaaaaaaaaaaaaaaaaaaaaaaagaauu

SEQ ID NO: 28611 - RNA, 1736 nt, Artificial Sequence
  mRNA product Design a-2 (hSL-A64-N5) comprising derived and/or modified sequence from LASV(Mad39;Clade IV)__ANH09722__GPCmut5 (opt1)
aggagaguccgcucagccagguugcagaagcggcuuagcguguguccuaaucuucucucugcguguagguaggccugugccgcaaacaagcuuaccaugggccagaucgugaccuucuuccaggaggucccccacgugaucgaggaggugaugaacaucguccugaucgcccucagcauccuggccgugcugaaggggcucuacaacguggcgaccugcggccugaucgggcuggucacguuccuccugcugugcggccgcuccugcaccaccacccucuacaaggggguguacgagcugcaggcccuggagcucaacauggagacgcugaacaugaccaugccgcugagcugcaccaagaacaacucccaccacuacauccgggugggcaacgagaccggccucgagcugacgcugaccaacaccagccucaucaaccacaaguucugcaaccuguccgacgcccacaagaagaaccuguacgaccacgcccucaugagcaucaucuccaccuuccaccugagcauccccaacuucaaccaguacgaggccauguccugcgacuucaacgacgggaagaucagcguccaguacaaccugucccacacguacgcgggcgacaccgccaaccacugcgggaccguggccaacggcgugcuccagaccuucaugcgcauggccuggggcgggagcuacaucgcgcuggacuccggcugcgggggcugggacugcaucaugacgagcuaccaguaccugaucauccagaacaccaccugggaggaccacugccaguucucccggcccagccccaucggguaccucggccugcugucccagcggacccgcgacaucuacaucagccggcgccuccugggcacguucaccuggacccuguccgacagcgaggggaaggacaccccgggcggguacugccucacgcgguggaugcugaucgaggccgagcugaagugcuucggcaacaccgccgucgccaagugcaacgagaagcacgacgaggaguucugcgacaugcuccgccuguucgacuucaacaagcaggccauccagcggcugaaggcgcccgcccagaugagcauccagcucaucaacaaggccgugaacgcccugaucaacgaccagcugaucaugaagaaccaccuccgcgacaucaugugcauccccuacugcaacuacuccaaguacugguaccugaaccacaccgugaccggcaagacgagccugcccaagugcuggcucgucuccaacggcagcuaccugaacgagacccacuucuccgacgacaucgagcagcaggccgacaacaugaucaccgagaugcugcagaaggaguacauggagcggcaggggaagacgccccucggccugguggaccuguucguguucagcaccuccuucuaccugaucagcaucuuccuccaccuggucaagaucccgacccaccgccacgugguggggaagcccugccccaagccccaccggcugaaccacaugggcaucugcuccugcggguucuacaagcagccgggcguccccgugcgcuggaagcggugaggacuagucccuguucccagagcccacuuuuuuuucuuuuuuugaaauaaaauagccugucuuucagaucucaaaggcucuuuucagagccaccaaaaaaaaaaaaaaaaaaaaaaaaaaaaaaaaaaaaaaaaaaaaaaaaaaaaaaaaaaaaaaaaagaauu

SEQ ID NO: 28612 - RNA, 1736 nt, Artificial Sequence
  mRNA product Design a-2 (hSL-A64-N5) comprising derived and/or modified sequence from LASV(Z0947-SLE-2011;Clade IV)__AIT17840__GPCmut5 (opt1)
aggagaguccgcucagccagguugcagaagcggcuuagcguguguccuaaucuucucucugcguguagguaggccugugccgcaaacaagcuuaccaugggccagaucgugaccuucuuccaggaggucccccacgugaucgaggaggugaugaacaucguccugaucgcccucagcauccuggccgugcugaaggggcucuacaacuucgcgaccugcggccugguggggcuggucacguuccuccugcugugcggccgcuccugcaccaucagccucuacaaggggguguacgagcugcagacccuggagcucaacauggagacccugaacaugacgaugccgcuguccugcaccaagaacaacagccaccacuacaucauggugggcaacgagaccggccucgagcugacccugacgaacaccuccaucaucaaccacaaguucugcaaccucagcgacgcccacaagaagaaccuguacgaccacgcccugauguccaucaucagcaccuuccaccucuccauccccaacuucaaccaguacgaggccaugagcugcgacuucaacgggggcaagaucuccguccaguacaaccugagccacuccuacgccggggacgcggccaaccacugcggcaccguggccaacggggugcugcagacguucaugcggauggccuggggcggcagcuacaucgcgcucgacuccgggugcgaccggugggacugcaucaugaccagcuaccaguaccugaucauccagaacaccaccugggaggaccacugccaguucucccgccccagccccaucggcuaccuggggcuccugucccagcggacgcgcgacaucuacaucagccggcgccugcucggcaccuucaccuggacccugagcgacuccgagggcaaggacacgcccgggggcuacugccugacccgguggaugcucaucgaggccgagcugaagugcuucgggaacaccgccgucgccaagugcaacgagaagcacgacgaggaguucugcgacaugcugcgccucuucgacuucaacaagcaggccauccagcggcugaaggcgcccgcccagaugagcauccagcugaucaacaaggccgugaacgcccucaucaacgaccagcugaucaugaagaaccaccuccgcgacaucaugugcauccccuacugcaacuacuccaaguacugguaccugaaccacaccacgaccgggaagaccagccugcccaagugcuggcugguguccaacggcagcuaccucaacgagacccacuucuccgacgacaucgagcagcaggccgacaacaugaucacggagaugcugcagaaggaguacauggagcggcagggcaagaccccgcuggggcucgucgaccuguucguguucagcaccuccuucuaccugaucagcaucuuccugcaccucgugaagaucccgacccaccgccacaucgucggcaagcccugccccaagccccaccggcugaaccacauggggaucugcuccugcggccuguacaagcagccgggggugcccgugaaguggaagcgcugaggacuagucccuguucccagagcccacuuuuuuuucuuuuuuugaaauaaaauagccugucuuucagaucucaaaggcucuuuucagagccaccaaaaaaaaaaaaaaaaaaaaaaaaaaaaaaaaaaaaaaaaaaaaaaaaaaaaaaaaaaaaaaaaagaauu

SEQ ID NO: 28613 - RNA, 1736 nt, Artificial Sequence
  mRNA product Design a-2 (hSL-A64-N5) comprising derived and/or modified sequence from LASV(Josiah;Clade IV)__NP_694870__GPCmut5 (opt1)
aggagaguccgcucagccagguugcagaagcggcuuagcguguguccuaaucuucucucugcguguagguaggccugugccgcaaacaagcuuaccaugggccagaucgugaccuucuuccaggaggucccccacgugaucgaggaggugaugaacaucguccugaucgcccucagcgugcuggccgugcugaaggggcucuacaacuucgcgaccugcggccuggucgggcuggugacguuccuccugcugugcggccgcuccugcaccaccagccucuacaaggggguguacgagcugcagacccuggagcucaacauggagacgcugaacaugaccaugccgcuguccugcaccaagaacaacagccaccacuacaucauggucggcaacgagaccggccucgagcugacgcugaccaacaccuccaucaucaaccacaaguucugcaaccucagcgacgcccacaagaagaaccuguacgaccacgcccugauguccaucaucagcaccuuccaccucuccauccccaacuucaaccaguacgaggccaugagcugcgacuucaacgggggcaagaucuccgugcaguacaaccugagccacuccuacgccggggacgcggccaaccacugcggcacgguggccaacgggguccugcagaccuucaugcggauggccuggggcggcagcuacaucgcgcucgacuccgggugcggcaacugggacugcaucaugaccagcuaccaguaccugaucauccagaacaccacgugggaggaccacugccaguucucccgccccagccccaucggguaccugggccuccugucccagcggacccgcgacaucuacaucagccggcgccugcucggcaccuucaccuggacgcugagcgacuccgaggggaaggacaccccgggcggguacugccugacccgguggaugcucaucgaggccgagcugaagugcuucggcaacaccgccguggccaagugcaacgagaagcacgacgaggaguucugcgacaugcugcgccucuucgacuucaacaagcaggccauccagcggcugaaggcgcccgcccagaugagcauccagcugaucaacaaggccgugaacgcccucaucaacgaccagcugaucaugaagaaccaccuccgcgacaucaugugcauccccuacugcaacuacuccaaguacugguaccugaaccacacgaccaccgggcggaccagccugcccaagugcuggcuggucuccaacggcagcuaccucaacgagacgcacuucuccgacgacaucgagcagcaggccgacaacaugaucaccgagaugcugcagaaggaguacauggagcgccagggcaagaccccgcuggggcugguggaccucuucguguucagcaccuccuucuaccugaucagcaucuuccugcaccucgucaagauccccacgcaccggcacaucgugggcaaguccugccccaagccccaccgccugaaccacauggggaucugcagcugcggccuguacaagcagccgggggugcccgucaaguggaagcggugaggacuagucccuguucccagagcccacuuuuuuuucuuuuuuugaaauaaaauagccugucuuucagaucucaaaggcucuuuucagagccaccaaaaaaaaaaaaaaaaaaaaaaaaaaaaaaaaaaaaaaaaaaaaaaaaaaaaaaaaaaaaaaaaagaauu

SEQ ID NO: 28614 - RNA, 1733 nt, Artificial Sequence
  mRNA product Design a-2 (hSL-A64-N5) comprising derived and/or modified sequence from LASV(LP;Clade I)__AAF86701__GPCmut5 (opt1)
aggagaguccgcucagccagguugcagaagcggcuuagcguguguccuaaucuucucucugcguguagguaggccugugccgcaaacaagcuuaccaugggccagaucaucaccuucuuccaggaggugccccacgucaucgaggaggugaugaacaucgugcugaucgcccucagccugcuggccauccucaaggggcuguacaacaucgcgaccugcggcaucaucgggcuggucgccuuccucuuccugugcggcaaguccugcagccugacgcucaagggcggguacgagcugcagacccuggagcucaacauggagacccugaacaugaccaugccgcuguccugcacgaagaacagcucccaccacuacauccgcgugggcaacgagaccgggcucgagcugacccugaccaacacgagcaucaucaaccacaaguucugcaaccucuccgacgcccacaagaagaaccuguacgaccacgcccugaugagcaucaucuccaccuuccaccucagcauccccaacuucaaccaguacgaggccauguccugcgacuucaacggcgggaagaucagcgugcaguacaaccugucccacagcuacgcgggcgacgccgccgagcacugcgggaccgucgccaacggcgugcugcagaccuucaugcggauggcguggggcgggcgcuacaucgcccucgacuccggcugcgggaacugggacugcaucaugacgagcuaccaguaccugaucauccagaacaccaccugggaggaccacugccaguucucccggcccagccccaucggcuaccugggccuccugucccagcgcacccgggacaucuacaucagccgccggcugcucgggacguucaccuggacccugagcgacuccgagggcaacgagacccccgggggcuacugccugacgcgcuggaugcucaucgaggccgagcugaagugcuucgggaacaccgccguggccaagugcaacgagaagcacgacgaggaguucugcgacaugcugcggcuguucgacuucaacaagcaggcgauccgccggcugaaggccccggcccagaugagcauccagcugaucaacaaggccgucaacgcccucaucaacgaccagcugaucaugaagaaccaccuccgcgacaucaugugcauccccuacugcaacuacuccaaguacugguaccucaaccacaccagcuccggccggaccagccugcccaagugcuggcugaucuccaacggcagcuaccucaacgagacgcaguucuccgacgacaucgagcagcaggcggacaacaugaucaccgagaugcugcagaaggaguacaucgagcgccaggggaagaccccgcugggccugguggacaucuucaucuucagcaccuccuucuaccucaucagcaucuuccugcaccugaucaagauccccacgcaccggcacaucguggggaagcccugccccaagccgcaccgccucaaccacaugggcgucugcuccugcgggcuguacaagcaccccggcgugcccaccaaguggaagcggugaggacuagucccuguucccagagcccacuuuuuuuucuuuuuuugaaauaaaauagccugucuuucagaucucaaaggcucuuuucagagccaccaaaaaaaaaaaaaaaaaaaaaaaaaaaaaaaaaaaaaaaaaaaaaaaaaaaaaaaaaaaaaaaaagaauu

SEQ ID NO: 28615 - RNA, 1733 nt, Artificial Sequence
  mRNA product Design a-2 (hSL-A64-N5) comprising derived and/or modified sequence from LASV(803213;Clade II)__AAF86703__GPCmut5 (opt1)
aggagaguccgcucagccagguugcagaagcggcuuagcguguguccuaaucuucucucugcguguagguaggccugugccgcaaacaagcuuaccaugggccagaucaucaccuucuuccaggaggugccccacgucaucgaggaggugaugaacaucgugcugaucgcccucagccugcuggccauccucaaggggaucuacaacgucgcgaccugcggccuguucgggcugaucuccuuccuccugcugugcggccgcagcugcuccgugacguacaaggggguguacgagcuccagacccuggagcugaacauggccaaccucaacaugaccaugccgcugagcugcaccaagaacaacucccaccacuacaucauggucggcaacgagacgggccuggagcucacccugaccaacaccagcaucaucaaccacaaguucugcaaccuguccgacgcccacaagaagaaccucuacgaccacgcccugaugagcaucaucuccacguuccaccugagcauccccaacuucaaccaguacgaggccauguccugcgacuucaacgggggcaagaucagcgugcaguacaaccucucccacagcuucgcgguggacgccgccaaccacugcgggaccaucgccaacggcguccugcagaccuucaugcggauggcguggggcggguccuacaucgcccuggacagcggcugcgggaacugggacugcaucaugaccuccuaccaguaccucaucauccagaacacgaccugggaggaccacugccaguucagccgccccucccccaucggcuaccuggggcugcucagccagcggacccgcgacaucuacaucagccggcgccugcugggcaccuucacguggacccucuccgacagcgagggcaacgaggcccccgggggcuacugccugacccgguggaugcugaucgaggccgagcucaagugcuucgggaacaccgccguggcgaagugcaacgagaagcacgacgaggaguucugcgacaugcugcgccuguucgacuucaacaagcaggccaucaagcggcucaagacgccggcccagauguccauccagcugaucaacaaggccgugaacgcccugaucaacgaccagcucaucaugaagaaccaccuccgcgacaucaugugcauccccuacugcaacuacagccgguacugguaccugaaccacaccgucaccggcaagaccucccugccccgcugcuggcuggugagcaacggguccuaccugaacgagacgcacuucagcgacgacaucgagcagcaggcggacaacaugaucaccgagaugcuccagaaggaguacauggaccggcagggcaagaccccgcugggccugguggaccuguucgucuucuccaccagcuucuaccucaucuccaucuuccugcaccuggugaagauccccacgcaccgccacaucguggggaagcccugccccaagccgcaccggcucaaccacaugggcaucugcagcugcgggcuguacaagcaccccggcguccccgugaaguggaagcgcugaggacuagucccuguucccagagcccacuuuuuuuucuuuuuuugaaauaaaauagccugucuuucagaucucaaaggcucuuuucagagccaccaaaaaaaaaaaaaaaaaaaaaaaaaaaaaaaaaaaaaaaaaaaaaaaaaaaaaaaaaaaaaaaaagaauu

SEQ ID NO: 28616 - RNA, 1733 nt, Artificial Sequence
  mRNA product Design a-2 (hSL-A64-N5) comprising derived and/or modified sequence from LASV(GA391;Clade III)__CAA36645__GPCmut5 (opt1)
aggagaguccgcucagccagguugcagaagcggcuuagcguguguccuaaucuucucucugcguguagguaggccugugccgcaaacaagcuuaccaugggccagaucgugaccuucuuccaggaggucccccacgugaucgaggaggugaugaacaucguccugaucgcccucagcauccuggccauccugaaggggcucuacaacguggcgaccugcggccugaucgggcuggugacguuccuccugcuguccggccgcagcugcucccucaucuacaaggggaccuacgagcugcagacccuggagcucaacauggagacccugaacaugacgaugccgcugagcugcaccaagaacaacucccaccacuacauccgggucggcaacgagaccggccucgagcugacccugacgaacaccagcauccucaaccacaaguucugcaaccuguccgacgcccacaagcgcaaccuguacgaccacagccucauguccaucaucagcaccuuccaccuguccauccccaacuucaaccaguacgaggccaugagcugcgacuucaacgggggcaagaucaccgugcaguacaaccugucccacagcuucgccguggacgccgcggggcacugcggcacgcucgccaacgggguccugcagaccuucaugcggauggccuggggcggcuccuacaucgcccuggacagcgggugcggcaacugggacugcaucaugaccuccuaccaguaccucaucauccagaacaccacgugggacgaccacugccaguucagccgccccucccccaucggguaccugggccugcucagccagcggacccgcgacaucuacaucagccggcgccugcugggcaccuucaccuggacgcucuccgacagcgaggggaacgagaccccgggcggguacugccugacccgguggaugcugaucgaggcggagcucaagugcuucggcaacaccgccguggccaagugcaacgagaagcacgacgaggaguucugcgacaugcugcgccuguucgacuucaacaagcaggccauccggcgccucaagacgcccgcccagauguccauccagcugaucaacaaggcggugaacgcccugaucaacgaccagcucaucaugaagaaccaccuccgggacaucaugugcauccccuacugcaacuacagccgcuacugguaccugaaccacaccuccaccgggaagaccagccugccccggugcuggcugaucuccaacggcagcuaccugaacgagacgaaguucuccgacgacaucgagcagcaggccgacaacaugaucaccgagaugcugcagaaggaguacaucgaccgccagggcaagaccccgcucgggcuggucgaccuguucguguucagcaccuccuucuaccucaucagcaucuuccugcaccuggugaagauccccacgcaccggcacaucgucggcaagcccugccccaagccgcaccgccucaaccacauggggaucugcuccugcggccuguacaagcagcccggggugcccgugcgguggaagcgcugaggacuagucccuguucccagagcccacuuuuuuuucuuuuuuugaaauaaaauagccugucuuucagaucucaaaggcucuuuucagagccaccaaaaaaaaaaaaaaaaaaaaaaaaaaaaaaaaaaaaaaaaaaaaaaaaaaaaaaaaaaaaaaaaagaauu

SEQ ID NO: 28617 - RNA, 1736 nt, Artificial Sequence
  mRNA product Design a-2 (hSL-A64-N5) comprising derived and/or modified sequence from LASV(AV;Clade V)__CCA30314__GPCmut5 (opt1)
aggagaguccgcucagccagguugcagaagcggcuuagcguguguccuaaucuucucucugcguguagguaggccugugccgcaaacaagcuuaccaugggccagaucgugaccuucuuccaggaggucccccacgugaucgaggaggugaugaacaucguccugaucgcccucagcauccuggccgugcugaaggggcucuacaacaucgcgaccugcggccugaucgggcugaucacguuccuccugcugugcggccgcuccugcagcuccaaccucuacaaggggguguacgagcugcagagccuggaccucaacauggagacccugaacaugaccaugccgcuguccugcaccaagaacaacagccaccacuacauccgggucggcaacgacacgggccucgagcugacccugaccaacaccuccauccucaaccacaaguucugcaaccugagcgacgcccacaagaaggaccuguacgaccacgcccucauguccaucaucagcacguuccaccuguccauccccaacuucaaccaguacgaggccaugagcugcgacuucaacgggggcaagaucuccgugcaguacaaccugagccacuccuacgccaucgacgcggccaaccacugcgggaccguggccaacggcauccuccagaccuucaugcgcauggccuggggcgggagcuacaucgcgcuggacuccggcugcgggaacugggacugcaucaugaccagcuaccaguaccugaucauccagaacacgaccugggagaaccacugccaguucucccggcccagccccaucggcuaccucgggcugcugagccagcgcacccgggacaucuacaucucccgccggcuccugggcaccuucacguggacccugagcgacuccgagggcaacgccacccccgggggcuacugccucacccgcuggaugcugaucgaggccgagcugaagugcuucgggaacacggccgucgccaagugcaacgagaagcacgacgaggaguucugcgacaugcuccggcuguucgacuucaacaagcaggcgaucagccgccugaaguccccggcccagaugagcauccagcucaucaacaaggccgugaacgcccugaucaacgaccagcugaucaugaagaaccaccuccgggacaucaugugcauccccuacugcaacuacuccaaguacugguaccugaaccacaccaucaccggcaagaccagccugcccaagugcuggcucguguccaacgggagcuaccugaacgagacgcacuucuccgacgacaucgagcagcaggccgacaacaugaucaccgagaugcugcagaaggaguacauggagcgccagggcaagaccccgcugggccucgucgaccuguucguguucagcaccuccuucuaccugaucagcaucuuccuccggcuggugaagauccccacgcaccgccacaucgucgggaagcccugccccaagccgcaccggcugaaccacaugggcaucugcuccugcgggcucuacaagcagcccggcgugcccgugcgcuggaagcggugaggacuagucccuguucccagagcccacuuuuuuuucuuuuuuugaaauaaaauagccugucuuucagaucucaaaggcucuuuucagagccaccaaaaaaaaaaaaaaaaaaaaaaaaaaaaaaaaaaaaaaaaaaaaaaaaaaaaaaaaaaaaaaaaagaauu

SEQ ID NO: 28618 - RNA, 1733 nt, Artificial Sequence
  mRNA product Design a-2 (hSL-A64-N5) comprising derived and/or modified sequence from LASV(Togo/2016/7082;Clade VI)__AMR44577__GPCmut5 (opt1)
aggagaguccgcucagccagguugcagaagcggcuuagcguguguccuaaucuucucucugcguguagguaggccugugccgcaaacaagcuuaccaugggccagaucaucaccuucuuccaggaggugccccacgucaucgaggaggugaugaacaucgugcugaucgcccucagccugcuggccauccucaagggggucuacaacguggcgaccugcggcaucaucgggcuggugacguuccuguuccucugcggccgcuccugcagccugaucuacaagggguccuacgagcugcagacccucgagcugaacauggagacccugaacaugaccaugccgcucagcugcacgaagaacuccagccaccacuacauccgggucggcaacgagaccggccuggagcugacccucaccaacacguccaucaucaaccacaaguucugcaaccugagcgacgcccacaagcgcaaccuguacgaccacgcccucauguccauccugagcaccuuccaccuguccauccccaacuucaaccaguacgaggccaugagcugcgacuucaacgggggcaagaucuccgugcaguacaaccucagccacgccuacgcgguggacgccgccgagcacugcgggaccgucgccaacggcgugcugcagaccuucaugcggauggcguggggcggguccuacaucgcccuggacagcggcugcgggaacugggacugcaucaugacguccuaccaguaccucaucauccagaacaccaccugggaggaccacugccaguucagccgccccucccccaucggcuaccuggggcugcucagccagcggacccgcgacaucuacaucagccggcgccugcugggcacguucaccuggacccucuccgacagcgagggcaacgagacccccgggggcuacugccugacgcgguggaugcugaucgaggccgagcucaagugcuucgggaacaccgccguggccaagugcaacgagaagcacgacgaggaguucugcgacaugcugcgccuguucgacuucaacaagcaggcgauccagcggcucaaguccccggcccagaugagcauccagcugaucaacaaggccgucaacgcccugaucaacgaccagcucaucaugaagaaccaccuccgcgacaugaugugcauccccuacugcaacuacuccaaguacugguaccugaaccacaccagcuccggccggaccagccugcccaagugcuggcugguguccaacgggagcuaccugaacgagacgcacuucuccgacgacaucgagcagcaggccgacaacaugaucaccgagaugcuccagaaggaguacaucgaccgccagggcaagaccccgcugggccugguggaccuguucgucuucagcaccuccuucuaccucaucagcaucuuccugcaccugaucaagauccccacgcaccggcacaucguggggaagcccugccccaagccgcaccgccucaaccacaugggcaucugcuccugcgggcuguacaagcagcccggcgugcccacccgguggaagcgcugaggacuagucccuguucccagagcccacuuuuuuuucuuuuuuugaaauaaaauagccugucuuucagaucucaaaggcucuuuucagagccaccaaaaaaaaaaaaaaaaaaaaaaaaaaaaaaaaaaaaaaaaaaaaaaaaaaaaaaaaaaaaaaaaagaauu

SEQ ID NO: 28619 - RNA, 1733 nt, Artificial Sequence
  mRNA product Design a-2 (hSL-A64-N5) comprising derived and/or modified sequence from LASV(KAK-428;Clade n.d. (VII))__ANH09740__GPCmut5 (opt1)
aggagaguccgcucagccagguugcagaagcggcuuagcguguguccuaaucuucucucugcguguagguaggccugugccgcaaacaagcuuaccaugggccagaucgugaccuucuuccaggaggucccccacgugaucgaggaggugaugaacaucguccugaucgcccucagccugcuggccauccucaaggggcuguacaacuucgcgaccugcggcgugaucgggcugaucacguuccuccugcugugcggccgcuccugcagcgccaccuacaaggggcaguacgagcuccagacccuggagcugaacauggagucccucaacaugaccaugccgcugagcugcacgaagaacaacucccaccacuacauccgggccggcaacaacaccggccuggagcucacccugaccaacacgagcaucaucucccacaaguucugcaaccugagcgacgcccacaagaagaaccucuacgaccacacccugauguccaucaucaccaccuuccaccugagcauccccaacuucaaccaguacgaggccauguccugcgacuucaacgggggcaagaucagcauccaguacaaccucucccacagcuacgcgggggacgccgcccagcacugcggcacgguggccaacgggguccugcagaccuucaugcgcauggcguggggcggcuccuaccuggcccucgacagcgggugccggggcugggacugcaucaucuccagcuaccaguaccugaucauccagaacaccaccugggacgaccacugccaguucucccgccccagccccaucggguaccugggcuucgugagccagaagacgcgggacaucuacaucucccgccggcuccugggcaccuucaccuggacccugagcgacuccgaggggcacgacaugccgggcggguacugccucacgcgcuggaugcugaucgaggccgaccugaagugcuucggcaacaccgccguggccaagugcaacgagaagcacgacgaggaguucugcgacauguggcggcuguucgacuucaacaagcaggcgauccagcgccugaaggcccccgcccagaugaacauccagcugaucaacaaggccgucaacgcccucaucaacgaccagcugaugaugaagaaccaccuccgggacaucaugugcauccccuacugcaacuacagcaaguucugguaccucaacaacaccaccacggggcgcaccucccugccccggugcuggcugaucagcaacggcuccuaccucaacgagacccacuucagcgacgacaucgagcagcaggcggacaacaugaucaccgagaugcugcagaaggaguacauggaccgccagggcaagacgccgcuggggcucguggaccuguucguguucuccaccagcuucuaccugaucaccaucuuccugcaccucgucaagauccccacccaccggcacaucgugggcaagcccugccccaagccgcaccgccugaaccacauggggaucugcuccugcggccuguacaagcagcccggggugcccguccgguggaagcgcugaggacuagucccuguucccagagcccacuuuuuuuucuuuuuuugaaauaaaauagccugucuuucagaucucaaaggcucuuuucagagccaccaaaaaaaaaaaaaaaaaaaaaaaaaaaaaaaaaaaaaaaaaaaaaaaaaaaaaaaaaaaaaaaaagaauu

SEQ ID NO: 28620 - RNA, 1733 nt, Artificial Sequence; identical to SEQ ID NO: 28614
  mRNA product Design a-2 (hSL-A64-N5) comprising derived and/or modified sequence from LASV(Pinneo-NIG-1969;Clade I)__AIT17836__GPCmut5 (opt1)

SEQ ID NO: 28621 - RNA, 1733 nt, Artificial Sequence
  mRNA product Design a-2 (hSL-A64-N5) comprising derived and/or modified sequence from LASV(ISTH0009-NIG-2011;Clade II)__AIT17404__GPCmut5 (opt1)
aggagaguccgcucagccagguugcagaagcggcuuagcguguguccuaaucuucucucugcguguagguaggccugugccgcaaacaagcuuaccaugggccagaucaucaccuucuuccaggaggugccccacgucaucgaggaggugaugaacaucgugcugaucgcccucagccugcuggccauccucaaggggaucuacaacgucgcgaccugcggccuguucgggcugguguccuuccuccugcugugcggccgcagcugcuccacgaccuacaaggggguguacgagcuccagacccuggagcuggacauggccagccucaacaugaccaugccgcuguccugcacgaagaacaacagccaccacuacaucauggucggcaacgagaccggccuggagcucacccugaccaacacguccaucaucaaccacaaguucugcaaccugagcgacgcccacaagaagaaccucuacgaccacgcccugauguccaucaucagcaccuuccaccuguccauccccaacuucaaccaguacgaggccaugagcugcgacuucaacgggggcaagaucuccgugcaguacaaccucagccacgcguacgccguggacgccgccaaccacugcgggaccaucgcgaacggcguccugcagaccuucaugcggauggccuggggcggguccuacaucgcccuggacagcggcugcggguccugggacugcaucaugacgagcuaccaguaccucaucauccagaacaccaccugggaggaccacugccaguucucccgccccagccccaucggcuaccuggggcugcucagccagcggacccgcgacaucuacaucucccggcgccugcugggcacguucaccuggacccucagcgacuccgagggcaacgagacccccgggggcuacugccugacgcgguggaugcugaucgaggccgagcucaagugcuucgggaacaccgccguggcgaagugcaacgagaagcacgacgaggaguucugcgacaugcugcgccuguucgacuucaacaagcaggccauccggcgccucaagaccccggcccagaugagcauccagcugaucaacaaggccgugaacgcccugaucaacgaccagcucaucaugaagaaccaccuccgggacaucaugugcauccccuacugcaacuacuccaaguacugguaccugaaccacaccgucacgggcaagaccagccugccccgcugcuggcugguguccaacgggagcuaccugaacgagacccacuucuccgacgacaucgagcagcaggcggacaacaugaucaccgagcuccugcagaaggaguacauggaccggcagggcaagacgccgcugggccugguggaccucuucgucuucagcaccuccuucuaccugaucagcaucuuccugcaccucaucaagauccccacccaccgccacaucaccgggaagcccugccccaagccgcaccggcugaaccacaugggcaucugcuccugcgggcuguacaagcaccccggcgugcccgugaaguggaagcgcugaggacuagucccuguucccagagcccacuuuuuuuucuuuuuuugaaauaaaauagccugucuuucagaucucaaaggcucuuuucagagccaccaaaaaaaaaaaaaaaaaaaaaaaaaaaaaaaaaaaaaaaaaaaaaaaaaaaaaaaaaaaaaaaaagaauu

SEQ ID NO: 28622 - RNA, 1733 nt, Artificial Sequence
  mRNA product Design a-2 (hSL-A64-N5) comprising derived and/or modified sequence from LASV(ISTH2010-NIG-2012;Clade II)__AIT17482__GPCmut5 (opt1)
aggagaguccgcucagccagguugcagaagcggcuuagcguguguccuaaucuucucucugcguguagguaggccugugccgcaaacaagcuuaccaugggccagaucaucaccuucuuccaggaggugccccacgucaucgaggaggugaugaacaucgugcugaucgcccucagccugcuggccauccucaaggggaucuacaacgucgcgaccugcggccuguucgggcugguguccuuccuccugcugugcggccgcagcugcuccacgaccuacaaggggguguacgagcuccagacccuggagcuggacauggccagccucaacaugaccaugccgcuguccugcacgaagaacaacagccaccacuacaucauggucggcaacgagaccggccuggagcucacccugaccaacacguccaucaucaaccacaaguucugcaaccugagcgacgcccacaagaagaaccucuacgaccacgcccugauguccaucaucagcaccuuccaccuguccauccccaacuucaaccaguacgaggccaugagcugcgacuucaacgggggcaagaucuccgugcaguacaaccucagccacgcguacgccguggacgccgccaaccacugcgggaccaucgcgaacggcguccugcagaccuucaugcggauggccuggggcggguccuacaucgcccuggacagcggcugcggguccugggacugcaucaugacgagcuaccaguaccucaucauccagaacaucaccugggaggaccacugccaguucucccgccccagccccaucggcuaccuggggcugcucagccagcggacccgcgacaucuacaucucccggcgccugcugggcaccuucacguggacccucagcgacuccgagggcaacgagacccccgggggcuacugccugacccgguggaugcugaucgaggccgagcucaagugcuucgggaacacggccguggcgaagugcaacgagaagcacgacgaggaguucugcgacaugcugcgccuguucgacuucaacaagcaggccauccggcgccucaagaccccggcccagaugagcauccagcugaucaacaaggccgugaacgcccugaucaacgaccagcucaucaugaagaaccaccuccgggacaucaugugcauccccuacugcaacuacuccaaguacugguaccugaaccacaccgucaccggcaagacgagccugccccgcugcuggcugguguccaacgggagcuaccugaacgagacccacuucuccgacgacaucgagcagcaggcggacaacaugaucaccgagcuccugcagaaggaguacaucgaccggcagggcaagaccccgcugggccugguggaccucuucgucuucagcacguccuucuaccugaucagcaucuuccugcaccucgugaagauccccacccaccgccacguggucgggaagcccugccccaagccgcaccggcugaaccacaugggcaucugcuccugcgggcuguacaagcaccccggcgugcccgugaaguggaagcgcugaggacuagucccuguucccagagcccacuuuuuuuucuuuuuuugaaauaaaauagccugucuuucagaucucaaaggcucuuuucagagccaccaaaaaaaaaaaaaaaaaaaaaaaaaaaaaaaaaaaaaaaaaaaaaaaaaaaaaaaaaaaaaaaaagaauu

SEQ ID NO: 28623 - RNA, 1733 nt, Artificial Sequence
  mRNA product Design a-2 (hSL-A64-N5) comprising derived and/or modified sequence from LASV(Lassa virus/H.sapiens-wt/NGA/2015/ISTH_0543;Clade II)__AVO03639__GPCmut5 (opt1)
aggagaguccgcucagccagguugcagaagcggcuuagcguguguccuaaucuucucucugcguguagguaggccugugccgcaaacaagcuuaccaugggccagaucaucaccuucuuccaggaggugccccacgucaucgaggaggugaugaacaucgugcugaucgcccucagccugcuggccauccucaaggggaucuacaacgucgcgaccugcggccuguucgggcugguguccuuccuccugcugugcggccgcagcugcuccacgaccuacaaggggguguacgagcuccagacccuggagcuggacauggccaaccucaacaugaccaugccgcugagcugcacgaagaacaacucccaccacuacaucauggucggcaacgagaccggccuggagcucacccugaccaacacgagcaucaucaaccacaaguucugcaaccuguccgacgcccacaagaagaaccucuacgaccacgcccugaugagcaucaucuccaccuuccaccugagcauccccaacuucaaccaguacgaggccauguccugcgacuucaacgggggcaagaucagcgugcaguacaaccucucccacaccuacgcgguggacgccgccaaccacugcgggaccaucgccaacggcguccugcagacguucaugcggauggcguggggcgggagcuacaucgcccuggacuccggcugcgggagcugggacugcaucaugaccuccuaccaguaccucgugauccagaacaccaccugggaggaccacugccaguucagccgccccucccccaucggcuaccuggggcugcucagccagcggacgcgcgacaucuacaucagccggcgccugcugggcaccuucaccuggacccucuccgacagcgagggcaacgagacgcccgggggcuacugccugacccgguggaugcugaucgaggccgagcucaagugcuucgggaacaccgccguggccaagugcaacgagaagcacgacgaggaguucugcgacaugcugcgccuguucgacuucaacaagcaggcgauccggcgccucaagaccccggcccagauguccauccagcugaucaacaaggccgucaacgcccugaucaacgaccagcucaucaugaagaaccaccuccgggacaucaugugcauccccuacugcaacuacagcaaguacugguaccugaaccacacggugaccggcaagaccucccugccccgcugcuggcuggugagcaacggguccuaccugaacgagacccacuucagcgacgacaucgagcagcaggccgacaacaugaucacggagcuccugcagaaggaguacaucgaccggcagggcaagaccccgcugggccuggucgaccucuucguguucuccaccagcuucuaccugaucuccaucuuccugcaccucgugaagauccccacccaccgccacaucacggggaagcccugccccaagccgcaccggcugaaccacaugggcaucugcagcugcgggcuguacaagcaccccggcguccccgugaaguggaagcgcugaggacuagucccuguucccagagcccacuuuuuuuucuuuuuuugaaauaaaauagccugucuuucagaucucaaaggcucuuuucagagccaccaaaaaaaaaaaaaaaaaaaaaaaaaaaaaaaaaaaaaaaaaaaaaaaaaaaaaaaaaaaaaaaaagaauu

SEQ ID NO: 28624 - RNA, 1733 nt, Artificial Sequence
  mRNA product Design a-2 (hSL-A64-N5) comprising derived and/or modified sequence from LASV(Lassa virus/H.sapiens-wt/NGA/2016/ISTH_0009;Clade II)__AVO03571__GPCmut5 (opt1)
aggagaguccgcucagccagguugcagaagcggcuuagcguguguccuaaucuucucucugcguguagguaggccugugccgcaaacaagcuuaccaugggccagaucaucaccuucuuccaggaggugccccacgucaucgaggaggugaugaacaucgugcugaucgcccucagccugcuggccauccucaaggggaucuacaacgucgcgaccugcggccugcuggggcucguguccuuccugcugcucugcggccgcagcugcuccacgaccuacaaggggguguacgagcugcagacccuggagcucgacauggccagccugaacaugaccaugccgcuguccugcacgaagaacaacagccaccacuacaucauggucggcaacgagaccggccucgagcugacccugaccaacacguccaucaucaaccacaaguucugcaaccucagcgacgcccacaagaagaaccuguacgaccacgcccugauguccaucaucagcaccuuccaccucuccauccccaacuucaaccaguacgaggccaugagcugcgacuucaacgggggccggaucuccgugcaguacaaccugagccacuccuacgcgguggacgccgccaaccacugcgggaccaucgccaacggcguccugcagaccuucaugcgcauggcguggggcgggagcuacaucgcccucgacuccggcugcgggagcugggacugcaucaugacguccuaccaguaccugaucauccagaacaccaccugggaggaccacugccaguucagccggcccagccccaucggcuaccuggggcuccugucccagcgcacccgggacaucuacaucagccgccggcugcucggcacguucaccuggacccuguccgacagcgagggcaacgagacccccgggggcuacugccugacgcgcuggaugcucaucgaggccgagcugaagugcuucgggaacaccgccguggccaagugcaacgagaagcacgacgaggaguucugcgacaugcugcggcuguucgacuucaacaagcaggcgauccgccggcugaagaccccggcccagauguccauccagcugaucaacaaggccgugaacgcccucaucaacgaccagcugaucaugaagaaccaccuccgcgacaucaugugcauccccuacugcaacuacagcaaguacugguaccucaaccacaccgucacgggcaagaccucccugccccggugcuggcuggugagcaacggguccuaccucaacgagacccacuucagcgacgacaucgagcagcaggccgacaacaugaucaccgagcugcugcagaaggaguacaucgaccgccagggcaagacgccgcugggccucguggaccuguucgucuucuccaccagcuucuaccugaucuccaucuuccuccaccuggugaagauccccacccaccggcacaucaccgggaagcccugccccaagccgcaccgccugaaccacaugggcaucugcagcugcgggcucuacaaccaccccggcgugcccgucaaguggaagcggugaggacuagucccuguucccagagcccacuuuuuuuucuuuuuuugaaauaaaauagccugucuuucagaucucaaaggcucuuuucagagccaccaaaaaaaaaaaaaaaaaaaaaaaaaaaaaaaaaaaaaaaaaaaaaaaaaaaaaaaaaaaaaaaaagaauu

SEQ ID NO: 28625 - RNA, 1733 nt, Artificial Sequence
  mRNA product Design a-2 (hSL-A64-N5) comprising derived and/or modified sequence from LASV(Lassa virus/H.sapiens-wt/NGA/2016/ISTH_0017;Clade II)__AVO03567__GPCmut5 (opt1)
aggagaguccgcucagccagguugcagaagcggcuuagcguguguccuaaucuucucucugcguguagguaggccugugccgcaaacaagcuuaccaugggccagaucaucaccuucuuccaggaggugccccacgucaucgaggaggugaugaacaucgugcugaucgcccucagccugcuggccauccucaaggggaucuacaacgucgcgaccugcggccuguucgggcugguguccuuccuccugcugugcggccgcagcugcuccacgaccuacaaggggguguacgagcuccagacccuggagcuggacauggccagccucaacaugaccaugccgcuguccugcacgaagaacaacagccaccacuacaucauggucggcaacgagaccggccuggagcucacccugaccaacacguccaucaucaaccacaaguucugcaaccugagcgacgcccacaagaagaaccucuacgaccacgcccugauguccaucaucagcaccuuccaccuguccauccccaacuucaaccaguacgaggccaugagcugcgacuucaacgggggcaagaucuccgugcaguacaaccucagccacaccuacgcgaucgacgccgccaaccacugcgggaccaucgccaacggcgugcugcagacguucaugcggauggcguggggcggguccuacaucgcccuggacagcggcugcggguccugggacugcaucaugaccagcuaccaguaccucaucauccagaacaccaccugggaggaccacugccaguucucccgccccagccccaucggcuaccuggggcugcucagccagcggacgcgcgacaucuacaucucccggcgccugcugggcaccuucaccuggacccucagcgacuccgagggcaacgagacgcccgggggcuacugccugacccgguggaugcugaucgaggccgagcucaagugcuucgggaacaccgccgucgccaagugcaacgagaagcacgacgaggaguucugcgacaugcugcgccuguucgacuucaacaagcaggcgauccggcgccucaagaccccggcccagaugagcauccagcugaucaacaaggccgugaacgcccugaucaacgaccagcucaucaugaagaaccaccuccgggacaucaugugcauccccuacugcaacuacuccaaguacugguaccugaaccacacggugaccggcaagaccagccugccccgcugcuggcuggucuccaacgggagcuaccugaacgagacccacuucuccgacgacaucgagcagcaggccgacaacaugaucacggagcuccugcagaaggaguacauggaccggcagggcaagaccccgcugggccugguggaccucuucguguucagcaccuccuucuaccugaucagcaucuuccugcaccucguccgcauccccacccaccggcacgugaucgggaagcccugccccaagccgcaccgccugaaccacaugggcaucugcuccugcgggcuguacaagcaccccggcgugcccgucaaguggaagcggugaggacuagucccuguucccagagcccacuuuuuuuucuuuuuuugaaauaaaauagccugucuuucagaucucaaaggcucuuuucagagccaccaaaaaaaaaaaaaaaaaaaaaaaaaaaaaaaaaaaaaaaaaaaaaaaaaaaaaaaaaaaaaaaaagaauu

SEQ ID NO: 28626 - RNA, 1733 nt, Artificial Sequence
  mRNA product Design a-2 (hSL-A64-N5) comprising derived and/or modified sequence from LASV(Lassa virus/H.sapiens-wt/NGA/2018/ISTH_0959;Clade II)__AVV65099__GPCmut5 (opt1)
aggagaguccgcucagccagguugcagaagcggcuuagcguguguccuaaucuucucucugcguguagguaggccugugccgcaaacaagcuuaccaugggccagaucaucaccuucuuccaggaggugccccacgucaucgaggaggugaugaacaucgugcugaucgcccucagccugcuggccauccucaaggggaucuacaacgucgugaccugcggccuguucgggcugguguccuuccuccugcugugcggccgcagcugcuccacgaccuacaagggggucuacgagcuccagacccuggagcuggacauggcgagccucaacaugaccaugccgcuguccugcacgaagaacaacagccaccacuacaucauggugggcaacgagaccggccuggagcucacccugaccaacacguccaucaucaaccacaaguucugcaaccugagcgacgcccacaagaagaaccucuacgaccacgcccugauguccaucaucagcaccuuccaccuguccauccccaacuucaaccaguacgaggccaugagcugcgacuucaacgggggcaagaucuccgugcaguacaaccucagccacgccuacgcgaucgacgccgccaaccacugcgggaccaucgccaacggcguccugcagaccuucaugcggauggcguggggcggguccuacaucgcccuggacagcggcugcggguccugggacugcaucaugacgagcuaccaguaccucaucauccagaacaccaccugggaggaccacugccaguucucccgccccagccccaucggcuaccuggggcugcucagccagcggacccgcgacaucuacaucucccggcgccugcugggcacguucaccuggacccucagcgacuccgagggcaacgagacccccgggggcuacugccugacgcgguggaugcugaucgaggccgagcucaagugcuucgggaacaccgccguggccaagugcaacgagaagcacgacgaggaguucugcgacaugcugcgccuguucgacuucaacaagcaggcgauccggcgccucaagaccccggcccagaugagcauccagcugaucaacaaggccgugaacgcccugaucaacgaccagcucaucaugaagaaccaccuccgggacaucaugugcauccccuacugcaacuacuccaaguacugguaccugaaccacaccgucacgggcaagaccagccugccccgcugcuggcugguguccaacgggagcuaccugaacgagacccacuucuccgacgacaucgagcagcaggccgacaacaugaucaccgagcuccugcagaaggaguacaucgaccggcagggcaagacgccgcugggccugguggaccucuucgucuucagcaccuccuucuaccugaucagcaucuuccugcaccucgugaagauccccacccaccgccacgugaucgggaagcccugccccaagccgcaccggcugaaccacaugggcaucugcuccugcgggcuguacaagcaccccggcguccccgugaaguggaagcgcugaggacuagucccuguucccagagcccacuuuuuuuucuuuuuuugaaauaaaauagccugucuuucagaucucaaaggcucuuuucagagccaccaaaaaaaaaaaaaaaaaaaaaaaaaaaaaaaaaaaaaaaaaaaaaaaaaaaaaaaaaaaaaaaaagaauu

SEQ ID NO: 28627 - RNA, 1733 nt, Artificial Sequence
  mRNA product Design a-2 (hSL-A64-N5) comprising derived and/or modified sequence from LASV(LASV003-NIG-2008;Clade II)__AIT17580__GPCmut5 (opt1)
aggagaguccgcucagccagguugcagaagcggcuuagcguguguccuaaucuucucucugcguguagguaggccugugccgcaaacaagcuuaccaugggccagaucaucaccuucuuccaggaggugccccacgucaucgaggaggugaugaacaucgugcugaucgcccucagccugcuggccauccucaaggggaucuacaacgucgcgaccugcggccuguucgggcugguguccuuccuccugcugugcggccgcagcugcuccacgaccuacaaggggguguacgagcuccagacccuggagcuggacauggccagccucaacaugaccaugccgcuguccugcacgaagaacaacagccaccacuacaucauggucggcaacgagaccggccuggagcucacccugaccaacacguccaucaucaaccacaaguucugcaaccugagcgacgcccacaagaagaaccucuacgaccacgcccugauguccaucaucagcaccuuccaccuguccauccccaacuucaaccaguacgaggccaugagcugcgacuucaacgggggcaagaucuccgugcaguacaaccucagccacaccuacgcgguggacgccgccaaccacugcgggaccaucgccaacggcguccugcagacguucaugcggauggcguggggcggguccuacaucgcccuggacagcggcugcggguccugggacugcaucaugaccagcuaccaguaccucaucauccagaacaccaccugggaggaccacugccaguucucccgccccagccccaucggcuaccuggggcugcucagccagcggacgcgcgacaucuacaucucccggcgccugcugggcaccuucaccuggacccucagcgacuccgagagcaacgagacgccgggcggguacugccugacccgguggaugcugaucgaggccgagcucaagugcuucggcaacaccgccguggccaagugcaacgagaagcacgacgaggaguucugcgacaugcugcgccuguucgacuucaacaagcaggcgauccggcgccucaaggcccccgcccagauguccauccagcugaucaacaaggccgugaacgcccugaucaacgaccagcucaucaugaagaaccaccuccgggacaucaugugcauccccuacugcaacuacagcaaguacugguaccugaaccacaccgucacggggcgcaccucccugccccggugcuggcuggugagcaacggcuccuaccugaacgagacccacuucagcgacgacaucgagcagcaggcggacaacaugaucaccgagcuccugcagaaggaguacauggaccgccaggggaagacgccgcugggccugguggaccucuucgucuucuccaccagcuucuaccugaucuccaucuuccugcaccucgugaagauccccacccaccggcacgugaucggcaagcccugccccaagccgcaccgccugaaccacauggggaucugcagcugcggccuguacaagcaccccgggguccccgugaaguggaagcggugaggacuagucccuguucccagagcccacuuuuuuuucuuuuuuugaaauaaaauagccugucuuucagaucucaaaggcucuuuucagagccaccaaaaaaaaaaaaaaaaaaaaaaaaaaaaaaaaaaaaaaaaaaaaaaaaaaaaaaaaaaaaaaaaagaauu

SEQ ID NO: 28628 - RNA, 1733 nt, Artificial Sequence
  mRNA product Design a-2 (hSL-A64-N5) comprising derived and/or modified sequence from LASV(LASV035-NIG-2009;Clade II)__AIT17588__GPCmut5 (opt1)
aggagaguccgcucagccagguugcagaagcggcuuagcguguguccuaaucuucucucugcguguagguaggccugugccgcaaacaagcuuaccaugggccagaucaucaccuucuuccaggaggugccccacgucaucgaggaggugaugaacaucgugcugaucgcccucagccugcuggccauccucaaggggaucuacaacgucgcgaccugcggccuguucgggcugguguccuuccuccugcugugcggccgcagcugcuccacgaccuacaaggggguguacgagcuccagacccuggagcuggacauggccagccucaacaugaccaugccgcuguccugcacgaagaacaacagccaccacuacaucauggucggcaacgagaccggccuggagcucacccugaccaacacguccaucaucaaccacaaguucugcaaccugagcgacgcccacaagaagaaccucuacgaccacgcccugauguccaucaucagcaccuuccaccuguccauccccaacuucaaccaguacgaggccaugagcugcgacuucaacgggggcaagaucuccgugcaguacaaccucagccacgcguacgccguggacgccgccaaccacugcgggaccaucgcgaacggcguccugcagaccuucaugcggauggccuggggcggguccuacaucgcccuggacagcggcugcggguccugggacugcaucaugacgagcuaccaguaccucaucauccagaacaccaccugggaggaccacugccaguucucccgccccagccccaucggcuaccuggggcugcucagccagcggacccgcgacaucuacaucucccggcgccugcugggcacguucaccuggacccucagcgacuccgagggcaacgagacccccgggggcuacugccugacgcgguggaugcugaucgaggccgagcucaagugcuucgggaacaccgccguggcgaagugcaacgagaagcacgacgaggaguucugcgacaugcugcgccuguucgacuucaacaagcaggccauccggcgccucaaggccccggcccagaugagcauccagcugaucaacaaggccgugaacgcgcugaucaacgaccagcucaucaugaagaaccaccuccgggacaucaugugcauccccuacugcaacuacuccaaguacugguaccugaaccacaccgucaccggcaagacgagccugccccgcugcuggcugguguccaacgggagcuaccugaacgagacccacuucuccgacgacaucgagcagcaggccgacaacaugaucaccgagcuccugcagaaggaguacaucgaccggcagggcaagaccccgcugggccugguggaccucuucgucuucagcacguccuucuaccugaucagcaucuuccugcaccucgugaagauccccacccaccgccacgugaucgggaagcccugccccaagccgcaccggcugaaccacaugggcaucugcuccugcgggcuguacaagcaccccggcguccccgugaaguggaagcgcugaggacuagucccuguucccagagcccacuuuuuuuucuuuuuuugaaauaaaauagccugucuuucagaucucaaaggcucuuuucagagccaccaaaaaaaaaaaaaaaaaaaaaaaaaaaaaaaaaaaaaaaaaaaaaaaaaaaaaaaaaaaaaaaaagaauu

SEQ ID NO: 28629 - RNA, 1733 nt, Artificial Sequence
  mRNA product Design a-2 (hSL-A64-N5) comprising derived and/or modified sequence from LASV(LASV1000-NIG-2009;Clade II)__AIT17782__GPCmut5 (opt1)
aggagaguccgcucagccagguugcagaagcggcuuagcguguguccuaaucuucucucugcguguagguaggccugugccgcaaacaagcuuaccaugggccagaucaucaccuucuuccaggaggugccccacgucaucgaggaggugaugaacaucgugcugaucgcccucagccugcuggccauccucaaggggaucuacaacgucgcgaccugcggccuguucgggcugguguccuuccuccugcugugcggccgcagcugcuccacgaccuacaaggggguguacgagcuccagacccuggagcuggacauggccagccucaacaugaccaugccgcuguccugcacgaagaacaacagccaccacuacaucauggucggcaacgagaccggccuggagcucacccugaccaacacguccaucaucaaccacaaguucugcaaccugagcgacgcccacaagaagaaccucuacgaccacgcccugauguccaucaucagcaccuuccaccuguccauccccaacuucaaccaguacgaggccaugagcugcgacuucaacgggggcaagaucuccgugcaguacaaccucagccacaccuacgcgguggacgccgccaaccacugcgggaccaucgccaacggcguccugcagacguucaugcggauggcguggggcggguccuacaucgcccuggacagcggcugcggguccugggacugcaucaugaccagcuaccaguaccucaucauccagaacaccaccugggaggaccacugccaguucucccgccccagccccaucggcuaccuggggcugcucagccagcggacgcgcgacaucuacaucucccggcgccugcugggcaccuucaccuggacccucagcgacuccgagggcaacgagacgcccgggggcuacugccugacccgguggaugcugaucgaggccgagcucaagugcuucgggaacaccgccguggccaagugcaacgagaagcacgacgaggaguucugcgacaugcugcgccuguucgacuucaacaagcaggcgaucaagcggcucaagaccccggcccagaugagcauccagcugaucaacaaggccgugaacgcccugaucaacgaccagcucaucaugaagaaccaccuccgcgacaucaugugcauccccuacugcaacuacuccaaguacugguaccugaaccacacggucaccggcaagaccagccugccccggugcuggcugguguccaacgggagcuaccugaacgagacccacuucuccgacgacaucgagcagcaggccgacaacaugaucacggagcuccugcagaaggaguacaucgaccgccagggcaagaccccgcugggccugguggaccucuucgucuucagcaccuccuucuaccugaucagcaucuuccugcaccucgugaagauccccacccaccggcacguggucgggaagcccugccccaagccgcaccgccugaaccacaugggcaucugcuccugcgggcuguacaagcaccccggcgugcccgugaaguggaagcggugaggacuagucccuguucccagagcccacuuuuuuuucuuuuuuugaaauaaaauagccugucuuucagaucucaaaggcucuuuucagagccaccaaaaaaaaaaaaaaaaaaaaaaaaaaaaaaaaaaaaaaaaaaaaaaaaaaaaaaaaaaaaaaaaagaauu

SEQ ID NO: 28630 - RNA, 1733 nt, Artificial Sequence
  mRNA product Design a-2 (hSL-A64-N5) comprising derived and/or modified sequence from LASV(LASV221-NIG-2010;Clade II)__AIT17624__GPCmut5 (opt1)
aggagaguccgcucagccagguugcagaagcggcuuagcguguguccuaaucuucucucugcguguagguaggccugugccgcaaacaagcuuaccaugggccagaucaucaccuucuuccaggaggugccccacgucaucgaggaggugaugaacaucgugcugaucgcccucagccugcuggccauccucaaggggaucuacaacgucgcgaccugcggccuguucgggcugguguccuuccuccugcugugcggccgcagcugcuccacgaccuacaaggggguguacgagcuccagacccuggagcuggacauggccagccucaacaugaccaugccgcuguccugcacgaagaacaacagccaccacuacaucauggucggcaacgagaccggccuggagcucacccugaccaacacguccaucaucaaccacaaguucugcaaccugagcgacgcccacaagaagaaccucuacgaccacgcccugauguccaucaucagcaccuuccaccuguccauccccaacuucaaccaguacgaggccaugagcugcgacuucaacgggggcaagaucuccgugcaguacaaccucagccacaccuacgcgaucgacgccgccaaccacugcgggaccaucgccaacggcgugcugcagacguucaugcggauggcguggggcggguccuacaucgcccuggacagcggcugcggguccugggacugcaucaugaccagcuaccaguaccucaucauccagaacaccaccugggaggaccacugccaguucucccgccccagccccaucggcuaccuggggcugcucagccagcggacgcgcgacaucuacaucucccggcgccugcugggcaccuucaccuggacccucagcgacuccgagggcaacgagacgcccgggggcuacugccugacccgguggaugcugaucgaggccgagcucaagugcuucgggaacaccgccgucgccaagugcaacgagaagcacgacgaggaguucugcgacaugcugcgccuguucgacuucaacaagcaggcgauccggcgccucaagaccccggcccagaugagcauccagcugaucaacaaggccgugaacgcccugaucaacgaccagcucaucaugaagaaccaccuccgggacaucaugugcauccccuacugcaacuacuccaaguacugguaccugaaccacacggugaccggcaagaccagccugccccgcugcuggcuggucuccaacgggagcuaccugaacgagacccacuucuccgacgacaucgagcagcaggccgacaacaugaucacggagaugcuccagaaggaguacauggaccggcagggcaagaccccgcugggccugguggaccuguucguguucagcaccuccuucuaccucaucagcaucuuccugcaccuggucaagauccccacccaccgccacgugaucgggaagcccugccccaagccgcaccggcucaaccacaugggcaucugcuccugcgggcuguacaagcaccccggcgugcccgucaaguggaagcgcugaggacuagucccuguucccagagcccacuuuuuuuucuuuuuuugaaauaaaauagccugucuuucagaucucaaaggcucuuuucagagccaccaaaaaaaaaaaaaaaaaaaaaaaaaaaaaaaaaaaaaaaaaaaaaaaaaaaaaaaaaaaaaaaaagaauu

SEQ ID NO: 28631 - RNA, 1733 nt, Artificial Sequence
  mRNA product Design a-2 (hSL-A64-N5) comprising derived and/or modified sequence from LASV(LASV237-NIG-2010;Clade II)__AIT17638__GPCmut5 (opt1)
aggagaguccgcucagccagguugcagaagcggcuuagcguguguccuaaucuucucucugcguguagguaggccugugccgcaaacaagcuuaccaugggccagaucaucaccuucuuccaggaggugccccacgucaucgaggaggugaugaacaucgugcugaucgcccucagccugcuggccauccucaaggggaucuacaacgucgcgaccugcggccuguucgggcugguguccuuccuccugcugugcggccgcagcugcuccacgaccuacaaggggguguacgagcuccagacccuggagcuggacauggccagccucaacaugaccaugccgcuguccugcacgaagaacaacagccaccacuacaucauggucggcaacgagaccggccuggagcucacccugaccaacacguccaucaucaaccacaaguucugcaaccugagcgacgcccacaagaaggaccucuacgaccacgcccugauguccaucaucagcaccuuccaccuguccauccccaacuucaaccaguacgaggccaugagcugcgacuucaacgggggcaagaucuccgugcaguacaaccucagccacaccuacgcgguggacgccgccaaccacugcgggaccaucgccaacggcguccugcagacguucaugcggauggcguggggcggguccuacaucgcccuggacagcggcugcggguccugggacugcaucaugaccagcuaccaguaccucaucauccagaacaccaccugggaggaccacugccaguucucccgccccagccccaucggcuaccuggggcugcucagccagcggacgcgcgacaucuacaucucccggcgccugcugggcaccuucaccuggacccucagcgacuccgagggcaacgagacgcccgggggcuacugccugacccgguggaugcugaucgaggccgagcucaagugcuucgggaacaccgccguggccaagugcaacgagaagcacgacgaggaguucugcgacaugcugcgccuguucgacuucaacaagcaggcgauccggcgccucaagaccccggcccagaugagcauccagcugaucaacaaggccgugaacgcccugaucaacgaccagcucaucaugaagaaccaccuccgggacaucaugugcauccccuacugcaacuacuccaaguacugguaccugaaccacacggucaccggcaagaccagccugccccgcugcuggcugguguccaacgggagcuaccugaacgagacccacuucuccgacgacaucgagcagcaggccgacaacaugaucacggagcuccugcagaaggaguacauggaccggcagggcaagaccccgcugggccugguggaccucuucgucuucagcaccuccuucuaccugaucagcaucuuccugcaccucaucaagauccccacccaccgccacaucacggggaagcccugccccaagccgcaccggcugaaccacaugggcaucugcuccugcgggcuguacaagcaccccggcgugcccgugaaguggaagcgcugaggacuagucccuguucccagagcccacuuuuuuuucuuuuuuugaaauaaaauagccugucuuucagaucucaaaggcucuuuucagagccaccaaaaaaaaaaaaaaaaaaaaaaaaaaaaaaaaaaaaaaaaaaaaaaaaaaaaaaaaaaaaaaaaagaauu

SEQ ID NO: 28632 - RNA, 1733 nt, Artificial Sequence
  mRNA product Design a-2 (hSL-A64-N5) comprising derived and/or modified sequence from LASV(LASV253-NIG-2011;Clade II)__AIT17670__GPCmut5 (opt1)
aggagaguccgcucagccagguugcagaagcggcuuagcguguguccuaaucuucucucugcguguagguaggccugugccgcaaacaagcuuaccaugggccagaucaucaccuucuuccaggaggugccccacgucaucgaggaggugaugaacaucgugcugaucgcccucagccugcuggccauccucaaggggaucuacaacgucgcgaccugcggccuguucgggcugguguccuuccuccugcugugcggccgcagcugcuccacgaccuacaaggggguguacgagcuccagacccuggagcuggacauggccagccucaacaugaccaugccgcuguccugcacgaagaacaacagccaccacuacaucauggucggcaacgagaccggccuggagcucacccugaccaacacguccaucaucaaccacaaguucugcaaccugagcgacgcccacaagaagaaccucuacgaccacgcccugauguccaucaucagcaccuuccaccuguccauccccaacuucaaccaguacgaggccaugagcugcgacuucaacgggggcaagaucuccgugcaguacaaccucagccacaccuacgcgguggacgccgccaaccacugcgggaccaucgccaacggcguccugcagacguucaugcggauggcguggggcggguccuacaucgcccuggacagcggcugcggguccugggacugcaucaugaccagcuaccaguaccucaucauccagaacaccaccugggaggaccacugccaguucucccgccccagccccaucggcuaccuggggcugcucagccagcggacgcgcgacaucuacaucucccggcgccugcugggcaccuucaccuggacccucagcgacuccgagggcaacgagacgcccgggggcuacugccugacccgguggaugcugaucgaggccgagcucaagugcuucgggaacaccgccguggccaagugcaacgagaagcacgacgaggaguucugcgacaugcugcgccuguucgacuucaacaagcaggcgauccggcgccucaaggccccggcccagaugagcauccagcugaucaacaaggccgugaacgcccugaucaacgaccagcucaucaugaagaaccaccuccgggacaucaugugcauccccuacugcaacuacuccaaguacugguaccugaaccacaccgucacgggccgcaccagccugccccggugcuggcugguguccaacgggagcuaccugaacgagacccacuucuccgacgacaucgagcagcaggcggacaacaugaucaccgagcuccugcagaaggaguacaucgaccgccagggcaagacgccgcugggccugguggaccucuucgucuucagcaccuccuucuaccugaucagcaucuuccugcaccucgugaagauccccacccaccggcacaucaucgggaagcccugccccaagccgcaccgccugaaccacaugggcaucugcuccugcgggcuguacaagcaccccggcgugcccgucaaguggaagcggugaggacuagucccuguucccagagcccacuuuuuuuucuuuuuuugaaauaaaauagccugucuuucagaucucaaaggcucuuuucagagccaccaaaaaaaaaaaaaaaaaaaaaaaaaaaaaaaaaaaaaaaaaaaaaaaaaaaaaaaaaaaaaaaaagaauu

SEQ ID NO: 28633 - RNA, 1733 nt, Artificial Sequence
  mRNA product Design a-2 (hSL-A64-N5) comprising derived and/or modified sequence from LASV(LASV254-NIG-2011;Clade II)__AIT17674__GPCmut5 (opt1)
aggagaguccgcucagccagguugcagaagcggcuuagcguguguccuaaucuucucucugcguguagguaggccugugccgcaaacaagcuuaccaugggccagaucaucaccuucuuccaggaggugccccacgucaucgaggaggugaugaacaucgugcugaucgcccucagccugcuggccauccucaaggggaucuacaacgucgcgaccugcggccuguucgggcugguguccuuccuccugcugugcggccgcagcugcuccacgaccuacaaggggguguacgagcuccagacccuggagcuggacaugaccaaccucaacaugacgaugccgcugagcugcaccaagaacaacucccaccacuacaucauggucggcaacgagaccggccuggagcucacccugacgaacaccagcaucaucaaccacaaguucugcaaccuguccgacgcccacaagaagaaccucuacaaccacgcccugaugagcaucaucuccaccuuccaccugagcauccccaacuucaaccaguacgaggccauguccugcgacuucaacgggggcaagaucagcgugcaguacaaccucucccacagcuacgccguggacgcggccaaccacugcgggaccaucgccaacggcguccugcagacguucaugcggauggccuggggcggguccuacaucgcgcuggacagcggcugcgggaacugggacugcaucaugaccuccuaccaguaccucaucauccagaacaccaccugggaggaccacugccaguucagccgccccucccccaucggcuaccuggggcugcucagccagcggacgcgcgacaucuacaucagccggcgccugcugggcaccuucaccuggacccucuccgacagcgagggcaacgagacgcccgggggcuacugccugacccgguggaugcugaucgaggccgagcucaagugcuucgggaacaccgccguggccaagugcaacgagaagcacgacgaggaguucugcgacaugcugcgccuguucgacuucaacaagcaggccauccggcgccucaagaccccggcgcaggccaacauccagcugaucaacaaggccgugaacgcccugaucaacgaccagcucaucaugaagaaccaccuccgggacaucaugugcauccccuacugcaacuacuccaaguacugguaccugaaccacacggucaccggcaagaccagccugccccgcugcuggcugguguccaacgggagcuaccugaacgagacccacuucuccgacgacaucgagcagcaggccgacaacaugaucacggagcuccugcagaaggaguacauggaccggcagggcaagaccccgcugggccugguggaccucuucgucuucagcaccuccuucuaccugaucagcaucuuccugcaccucgugaagauccccacccaccgccacgugaucgggaagcccugccccaagccgcaccggcugaaccacaugggcaucugcuccugcgggcuguacaagcaccccggcguccccgugaaguggaagcgcugaggacuagucccuguucccagagcccacuuuuuuuucuuuuuuugaaauaaaauagccugucuuucagaucucaaaggcucuuuucagagccaccaaaaaaaaaaaaaaaaaaaaaaaaaaaaaaaaaaaaaaaaaaaaaaaaaaaaaaaaaaaaaaaaagaauu

SEQ ID NO: 28634 - RNA, 1733 nt, Artificial Sequence
  mRNA product Design a-2 (hSL-A64-N5) comprising derived and/or modified sequence from LASV(Nig08-A19;Clade III)__ADU56618__GPCmut5 (opt1)
aggagaguccgcucagccagguugcagaagcggcuuagcguguguccuaaucuucucucugcguguagguaggccugugccgcaaacaagcuuaccaugggccagaucgugaccuucuuccaggaggucccccacgugaucgaggaggugaugaacaucguccugaucgcccucagcauccuggccauccugaaggggcucuacaacaucgcgaccugcggccugaucgggcuggugacguuccuccugcuguccggccgcagcugcuccaugaccuacaaggggguguacgagcuccagacccuggagcugaacaugaacacccucaacaugacgaugccgcugagcugcaccaagaacaacucccaccacuacaucauggucggcaacgagaccggccuggagcucacccugacgaacaccagccugcuccaccacaaguucugcaaccuguccgacgcccacaagaagaaccuguacgaccacacccucaugagcaucaucuccaccuuccaccugagcauccccaacuucaaccaguacgaggccauguccugcgacuucaacgggggcaagaucacggugcaguacaaccugagccacuccuacgccaucgacgccgcgaaccacugcgggaccguggccaacggcguccuccagaccuucaugcggauggccuggggcgggagcuacaucgcccuggacuccggcugcgggaagugggacugcaucaugaccagcuaccaguaccugaucauccagaacacgaccugggaggaccacugccaguucucccgccccagccccaucggcuaccucgggcugcugucccagcggacccgcgacaucuacaucagccggcgccuccugggcaccuucacguggacccugagcgacuccgagggcaacgagacccccgggggcuacugccucacccgguggaugcugaucgaggcggagcugaagugcuucgggaacacggccguggccaagugcaacgagaagcacgacgaggaguucugcgacaugcuccgccuguucgacuucaacaagcaggccauccggcgccugaaggccccggcgcagaugagcauccagcucaucaacaaggccgugaacgcccugaucaacgaccagcugaucaugaagaaccaccuccgggacaucaugugcauccccuacugcaacuacuccaaguacugguaccugaaccacaccagcaccggccgcaccucccugccccggugcuggcucgucagcaacggguccuaccugaacgagacgcacuucagcgacgacaucgagcagcaggccgacaacaugaucaccgagaugcugcagaaggaguaccuggaccgccagggcaagaccccgcucggccugguggaccuguucguguucuccaccagcuucuaccucaucuccaucuuccugcaccuggucaagauccccacgcaccggcacaucguggggaagcccugccccaagccgcaccgccucaaccacaugggcaucugcagcugcgggcuguacaagcagcccggcgugcccguccgguggaagcgcugaggacuagucccuguucccagagcccacuuuuuuuucuuuuuuugaaauaaaauagccugucuuucagaucucaaaggcucuuuucagagccaccaaaaaaaaaaaaaaaaaaaaaaaaaaaaaaaaaaaaaaaaaaaaaaaaaaaaaaaaaaaaaaaaagaauu

SEQ ID NO: 28635 - RNA, 1736 nt, Artificial Sequence
  mRNA product Design a-2 (hSL-A64-N5) comprising derived and/or modified sequence from LASV(G1180-SLE-2010;Clade IV)__AIT17168__GPCmut5 (opt1)
aggagaguccgcucagccagguugcagaagcggcuuagcguguguccuaaucuucucucugcguguagguaggccugugccgcaaacaagcuuaccaugggccagaucgugaccuucuuccaggaggucccccacgugaucgaggaggugaugaacaucguccugaucgcccucagcauccuggccgugcugaaggggcucuacaacuucgcgaccugcggccugguggggcugcucacguuccugcugcucugcggccgcuccugcaccgccagccgguacaagggggucuacgagcugcagacccuggagcucaacauggagacccugaacaugacgaugccgcuguccugcaccaagaacaacagccaccacuacaucauggugggcaacgagaccggccucgagcugacccugacgaacaccuccaucaucaaccacaaguucugcaaccucagcgacgcccacaagaagaaccuguacgaccacgcccugauguccaucaucagcaccuuccaccucuccauccccaacuucaaccaguacgaggccaugagcugcgacuucaacgggggcaagaucuccgugcaguacaaccugagccacuccuacgcgggggacgccgccaaccacugcggcaccgucgccaacggggugcugcagacguucaugcgcauggcguggggcggcagcuacaucgcccucgacuccgggugcggcagcugggacugcaucaugaccuccuaccaguaccugaucauccagaacaccaccugggaggaccacugccaguucagccggcccucccccaucggguaccugggccuccugagccagcgcacgcgggacaucuacaucagccgccggcugcucggcaccuucaccuggacccuguccgacagcgaggggaaggacacgccgggcggguacugccugacccgcuggaugcucaucgaggccgagcugaagugcuucggcaacaccgccguggccaagugcaacgagaagcacgacgaggaguucugcgacaugcugcggcuguucgacuucaacaagcaggcgauccagcgccugaaggcccccgcccagauguccauccagcugaucaacaaggccgucaacgcccucaucaacgaccagcugaucaugaagaaccaccuccgggacaucaugugcauccccuacugcaacuacagcaaguacugguaccucaaccacaccacgaccgggaagaccucccugcccaagugcuggcuggugagcaacggcuccuaccucaacgagacccacuucagcgacgacaucgagcagcaggcggacaacaugaucacggagaugcugcagaaggaguacauggagcgccagggcaagaccccgcuggggcugguggaccucuucgucuucuccaccagcuucuaccugaucuccaucuuccugcaccucgugaagauccccacccaccggcacaucgugggcaagagcugccccaagccccaccgccugaaccacauggggaucugcuccugcggccuguacaagcagccggggguccccgugaaguggaagcggugaggacuagucccuguucccagagcccacuuuuuuuucuuuuuuugaaauaaaauagccugucuuucagaucucaaaggcucuuuucagagccaccaaaaaaaaaaaaaaaaaaaaaaaaaaaaaaaaaaaaaaaaaaaaaaaaaaaaaaaaaaaaaaaaagaauu

SEQ ID NO: 28636 - RNA, 1736 nt, Artificial Sequence
  mRNA product Design a-2 (hSL-A64-N5) comprising derived and/or modified sequence from LASV(G1442-SLE-2011;Clade IV)__AIT17180__GPCmut5 (opt1)
aggagaguccgcucagccagguugcagaagcggcuuagcguguguccuaaucuucucucugcguguagguaggccugugccgcaaacaagcuuaccaugggccagaucgugaccuucuuccaggaggucccccacgugaucgaggaggugaugaacaucguccugaucgcccucagcauccuggccgugcugaaggggcucuacaacguggcgaccugcggccugaucgggcuggucacguuccuccugcugugcggccgcuccugcaccaccacccucuacaaggggguguacgagcugcagacgcuggagcucaacauggagacccugaacaugaccaugccgcugagcugcaccaagaacaacucccaccacuacauccgggugggcaacgagacgggccucgagcugacccugaccaacaccagcaucaucaaccacaaguucugcaaccucuccgacgcccacaagaagaaccuguacgaccacgcccugaugagcaucaucuccacguuccaccucagcauccccaacuucaaccaguacgaggccauguccugcgacuucaacgggggcaagaucagcguccaguacaaccugucccacagcuacgccggggacgcggccaaccacugcggcaccguggccaacggggugcugcagaccuucaugcgcauggccuggggcggcuccuacaucgcgcucgacagcgggugcggcaacugggacugcaucaugaccuccuaccaguaccugaucauccagaacacgaccugggacgaccacugccaguucagccggcccucccccaucggguaccugggccuccugagccagcgcacccgggacgucuacaucucccgccggcugcucggcaccuucacguggacccugagcgacagcgaggggaaggacaccccgggcggguacugccugacccgcuggaugcucaucgaggccgagcugaagugcuucggcaacacggccguggccaagugcaacgagaagcacgacgaggaguucugcgacaugcugcggcuguucgacuucaacaagcaggccauccagcgccugaaggcgcccgcccagauguccauccagcugaucaacaaggccgugaacgcccucaucaacgaccagcugaucaugaagaaccaccuccgggacaucaugugcauccccuacugcaacuacagcaaguacugguaccucaacaacaccgccaccgggaagaccucccugcccaagugcuggcugaucagcaacggcuccuaccucaacgagacgcacuucagcgacgacaucgagcaggaggcggacaacaugaucaccgagaugcugcagaaggaguacauggagcgccagggcaagaccccgcuggggcuggucgaccucuucguguucuccaccagcuucuaccugaucuccaucuuccugcaccucgugaagauccccacgcaccggcacaucgucggcaagagcugccccaagccccaccgccugaaccacauggggaucugcuccugcggccuguacaagcagccgggggugcccgugcgguggaagcgcugaggacuagucccuguucccagagcccacuuuuuuuucuuuuuuugaaauaaaauagccugucuuucagaucucaaaggcucuuuucagagccaccaaaaaaaaaaaaaaaaaaaaaaaaaaaaaaaaaaaaaaaaaaaaaaaaaaaaaaaaaaaaaaaaagaauu

SEQ ID NO: 28637 - RNA, 1736 nt, Artificial Sequence
  mRNA product Design a-2 (hSL-A64-N5) comprising derived and/or modified sequence from LASV(G3010-SLE-2013;Clade IV)__AIT17344__GPCmut5 (opt1)
aggagaguccgcucagccagguugcagaagcggcuuagcguguguccuaaucuucucucugcguguagguaggccugugccgcaaacaagcuuaccaugggccagaucgugaccuucuuccaggaggucccccacgugaucgaggaggugaugaacaucguccugaucgcccucagcauccuggccgugcugaaggggcucuacaacuucgcgaccugcggccugguggggcuggucacguuccuccugcugugcggccgcuccugcaccaccagccucuacaaggggguguacgagcugcagacccuggagcucaacauggagacgcugaacaugaccaugccgcuguccugcaccaagaacaacagccaccacuacaucauggugggcaacgagaccggccucgagcugacgcugaccaacaccuccaucaucaaccacaaguucugcaaccucagcgacgcccacaagaagaaccuguacaaccacgcccugauguccaucaucagcaccuuccaccucuccauccccaacuucaaccaguacgaggccaugagcugcgacuucaacgggggcaagaucuccguccaguacaaccugagccacuccuacgccggggacgcggccagccacugcggcacgguggccaacggggugcugcagaccuucaugcggauggccuggggcggcuccuacaucgcgcucgacagcgggugcggcaagugggacugcaucaugaccuccuaccaguaccugaucauccagaacaccacgugggaggaccacugccaguucagccgccccucccccaucggguaccugggccuccugagccagcggacccgcgacaucuacaucagccggcgccugcucggcaccuucaccuggacgcuguccgacagcgaggggaaggacaccccgggcggguacugccugacccgguggaugcucaucgaggccgagcugaagugcuucggcaacaccgccgucgccaagugcaacgagaagcacgacgaggaguucugcgacaugcugcgccucuucgacuucaacaagcaggccauccagcggcugaagacgcccgcgcagauguccauccagcugaucaacaaggccgugaacgcccucaucaacgaccagcugaucaugaagaaccaccuccgcgacaucaugugcauccccuacugcaacuacagcaaguacugguaccugaaccacaccaccaccgggaagacgucccugcccaagugcuggcuggugagcaacggcuccuaccucaacgagacccacuucagcgacgacaucgagcagcaggccgacaacaugaucaccgagaugcugcagaaggaguacauggagcggcagggcaagaccccgcuggggcuggucgaccucuucguguucuccacgagcuucuaccugaucuccaucuuccugcaccucgugaagauccccacccaccgccacaucgucggcaagagcugccccaagccccaccggcugaaccacauggggaucugcuccugcggccuguacaagcagccgggggugcccgugcgcuggaagcggugaggacuagucccuguucccagagcccacuuuuuuuucuuuuuuugaaauaaaauagccugucuuucagaucucaaaggcucuuuucagagccaccaaaaaaaaaaaaaaaaaaaaaaaaaaaaaaaaaaaaaaaaaaaaaaaaaaaaaaaaaaaaaaaaagaauu

SEQ ID NO: 28638 - RNA, 1736 nt, Artificial Sequence
  mRNA product Design a-2 (hSL-A64-N5) comprising derived and/or modified sequence from LASV(G502-SLE-2009;Clade IV)__AIT17126__GPCmut5 (opt1)
aggagaguccgcucagccagguugcagaagcggcuuagcguguguccuaaucuucucucugcguguagguaggccugugccgcaaacaagcuuaccaugggccagaucgugaccuucuuccaggaggucccccacgugaucgaggaggugaugaacaucguccugaucgcccucagcauccuggccgugcugaaggggcucuacaacuucgcgaccugcggccugguggggcugcucacguuccugcugcucugcggccgcuccugcaccaccgggcuguacaagggcgucuacgagcugcagacccucgagcugaacauggagacgcugaacaugaccaugccgcucagcugcaccaagaacaacucccaccacuacaucauggugggcaacgagaccgggcuggagcugacgcucaccaacaccagcaucaucaaccacaaguucugcaaccuguccgacgcccacaagaagaaccuguacgaccacgcccucaugagcaucaucuccaccuuccaccugagcauccccaacuucaaccaguacgaggccauguccugcgacuucaacggcgggaagaucagcgugcaguacaaccugucccacagcuacgccggcgacgcggccgaccacugcgggacggucgccaacggcgugcuccagaccuucaugcggauggccuggggcggguccuacaucgcgcuggacagcggcugcgggcgcugggacugcaucaugaccuccuaccaguaccugaucauccagaacaccacgugggaggaccacugccaguucagccggcccucccccaucggcuaccucggccugcugagccagcgcacccgggacaucuacaucucccgccggcuccuggggaccuucaccuggacgcugagcgacagcgagggcaaggacacccccgggggcuacugccucacccgcuggaugcugaucgaggccgagcugaagugcuucgggaacaccgccguggccaagugcaacgagaagcacgacgaggaguucugcgacaugcuccggcuguucgacuucaacaagcaggccauccagcgccugaaggcgccggcccagauguccauccagcucaucaacaaggccgucaacgcccugaucaacgaccagcuggugaugaagaaccaccuccgggacaucaugugcauccccuacugcaacuacagccgcuacugguaccugaaccacacgaccaccggccggaccucccugcccaagugcuggcucgugagcaacggcuccuaccugaacgagacgcacuucagcgacgacaucgagcagcaggccgacaacaugaucaccgagaugcugcagaaggaguacauggagcgccaggggaagaccccgcugggccucgucgaccuguucguguucuccaccagcuucuaccugaucuccaucuuccuccaccuggugaagauccccacgcaccggcacaucgucggcaagagcugccccaagccccaccgccugaaccacauggggaucugcuccugcgggcucuacaagcagccgggcgugcccgugaaguggaagcggugaggacuagucccuguucccagagcccacuuuuuuuucuuuuuuugaaauaaaauagccugucuuucagaucucaaaggcucuuuucagagccaccaaaaaaaaaaaaaaaaaaaaaaaaaaaaaaaaaaaaaaaaaaaaaaaaaaaaaaaaaaaaaaaaagaauu

SEQ ID NO: 28639 - RNA, 1736 nt, Artificial Sequence
  mRNA product Design a-2 (hSL-A64-N5) comprising derived and/or modified sequence from LASV(G733-SLE-2010;Clade IV)__AIT17154__GPCmut5 (opt1)
aggagaguccgcucagccagguugcagaagcggcuuagcguguguccuaaucuucucucugcguguagguaggccugugccgcaaacaagcuuaccaugggccagaucgugaccuucuuccaggaggucccccacgugaucgaggaggugaugaacaucguccugaucgcccucagcauccuggccgugcugaaggggcucuacaacuucgcgaccugcggcaucguggggcuggucuccuuccugcuccugugcggccgcagcugcacgaccucccuguacaaggggguguacgagcuccagacccuggagcugaacauggagacccucaacaugacgaugccgcugagcugcaccaagaacaacucccaccacuacaucauggugggcaacgagaccggccuggagcucacccugacgaacaccagcaucaucaaccacaaguucugcaaccuguccgacgcccacaagaagaaccucuacgaccacgcccugaugagcaucaucuccaccuuccaccugagcauccccaacuucaaccaguacgaggccauguccugcgacuucaacgggggcaagaucagcguccaguacaaccucucccacagcuacgccggggacgcggccaaccacugcggcaccaucgccaacggggugcugcagacguucaugcggauggccuggggcggcuccuacaucgcgcuggacagcgggugcgaccgcugggacugcaucaugaccuccuaccaguaccucaucauccagaacaccaccugggaggaccacugccaguucagccggcccucccccaucggcuaccuggggcugcucagccagcgcacgcgggacaucuacaucagccgccggcugcugggcaccuucaccuggacccucuccgacagcgagggcaaggacacgcccgggggcuacugccugacccgcuggaugcugaucgaggccgagcucaagugcuucgggaacaccgccguggccaagugcaacgagaagcacgacgaggaguucugcgacaugcugcggcuguucgacuucaacaagcaggccauccagcgccucaaggcgccggcccagauguccauccagcugaucaacaaggccgucaacgcccugaucaacgaccagcucaucaugaagaaccaccuccgggacaucaugugcauccccuacugcaacuacagcaaguacugguaccugaaccacaccacgaccggcaagaccucccugcccaagugcuggcuggugagcaacggguccuaccugaacgagacccacuucagcgacgacaucgagcagcaggccgacaacaugaucacggagaugcuccagaaggaguacauggagcgccagggcaagaccccgcugggccugguggaccuguucgucuucuccaccagcuucuaccucaucuccaucuuccugcaccuggugaagauccccacccaccggcacguggucggcaagagcugccccaagccccaccgccucaaccacauggggaucugcuccugcgggcuguacggccagccgggggugcccgugaaguggaagcggugaggacuagucccuguucccagagcccacuuuuuuuucuuuuuuugaaauaaaauagccugucuuucagaucucaaaggcucuuuucagagccaccaaaaaaaaaaaaaaaaaaaaaaaaaaaaaaaaaaaaaaaaaaaaaaaaaaaaaaaaaaaaaaaaagaauu

SEQ ID NO: 28640 - RNA, 1736 nt, Artificial Sequence
  mRNA product Design a-2 (hSL-A64-N5) comprising derived and/or modified sequence from MOPV/LASV reassortant(IGS-1;Clade IV)__AFY05576__GPCmut5 (opt1)
aggagaguccgcucagccagguugcagaagcggcuuagcguguguccuaaucuucucucugcguguagguaggccugugccgcaaacaagcuuaccaugggccagaucgugaccuucuuccaggaggucccccacgugaucgaggaggugaugaacaucguccugaucgcccucagcgugcuggccgugcugaaggggcucuacaacuucgcgaccugcggccuggucgggcuggugacguuccuccugcugugcggccgcuccugcaccaccagccucuacaaggggguguacgagcugcagacccuggagcucaacauggagacgcugaacaugaccaugccgcuguccugcaccaagaacaacagccaccacuacaucauggucggcaacgagaccggccucgagcugacgcugaccaacaccuccaucaucaaccacaaguucugcaaccucagcgacgcccacaagaagaaccuguacgaccacgcccugauguccaucaucagcaccuuccaccucuccauccccaacuucaaccaguacgaggccaugagcugcgacuucaacgggggcaagaucuccgugcaguacaaccugagccacuccuacgccggggacgcggccaaccacugcggcacgguggccaacgggguccugcagaccuucaugcggauggccuggggcggcagcuacaucgcgcucgacuccgggugcggcaacugggacugcaucaugaccagcuaccaguaccugaucauccagaacaccacgugggaggaccacugccaguucucccgccccagccccaucggguaccugggccuccugucccagcggacccgcgacaucuacaucagccggcgccugcucggcaccuucaccuggacgcugagcgacuccgagggggaggacaccccgggcggguacugccugacccgguggaugcucaucgaggccgagcugaagugcuucggcaacaccgccguggccaagugcaacgagaagcacgacgaggaguucugcgacaugcugcgccucuucgacuucaacaagcaggccauccagcggcugaaggcgcccgcccagaugagcauccagcugaucaacaaggccgugaacgcccucaucaacgaccagcugaucaugaagaaccaccuccgcgacaucaugugcauccccuacugcaacuacuccaaguacugguaccugaaccacacgaccaccgggcggaccagccugcccaagugcuggcuggucuccaacggcagcuaccucaacgagacgcacuucuccgacgacaucgagcagcaggccgacaacaugaucaccgagaugcugcagaaggaguacauggagcgccagggcaagaccccgcuggggcugguggaccucuucguguucagcaccuccuucuaccugaucagcaucuuccugcaccucgucaagauccccacgcaccggcacaucgugggcaaguccugccccaagccccaccgccugaaccacauggggaucugcagcugcggccuguacaagcagccgggggugcccgucaaguggaagcggugaggacuagucccuguucccagagcccacuuuuuuuucuuuuuuugaaauaaaauagccugucuuucagaucucaaaggcucuuuucagagccaccaaaaaaaaaaaaaaaaaaaaaaaaaaaaaaaaaaaaaaaaaaaaaaaaaaaaaaaaaaaaaaaaagaauu

SEQ ID NO: 28641 - RNA, 1736 nt, Artificial Sequence
  mRNA product Design a-2 (hSL-A64-N5) comprising derived and/or modified sequence from LASV(LM765-SLE-2012;Clade IV)__AIT17814__GPCmut5 (opt1)
aggagaguccgcucagccagguugcagaagcggcuuagcguguguccuaaucuucucucugcguguagguaggccugugccgcaaacaagcuuaccaugggccagaucgugaccuucuuccaggaggucccccacgugaucgaggaggugaugaacaucguccugaucgcccucagcauccuggccgugcugaaggggcucuacaacuucgcgaccugcggccugguggggcuggucacguuccuccugcugugcggccgcuccugcaccaccagccucuacaaggggguguacgagcugcagacccuggagcucaacauggagacgcugaacaugaccaugccgcuguccugcaccaagaacaacagccaccacuacaucauggugggcaacgagaccggccucgagcugacgcugaccaacaccuccaucaucgaccacaaguucugcaaccucagcgacgcccaccggaagaaccuguacgaccacgcccugauguccaucaucagcaccuuccaccucuccauccccaacuucaaccaguacgaggccaugagcugcgacuucaacgggggcaagaucuccguccaguacaaccugagccacuccuacgccaaggacgcggccgaccacugcgggacgguggccaacggcgugcugcagaccuucaugcgcauggccuggggcgggagcuacaucgcgcucgacuccggcugcgggcggugggacugcaucaugaccagcuaccaguaccugaucauccagaacaccacgugggaggaccacugccaguucucccgccccagccccaucggcuaccuggggcuccugucccagcggacccgcgacaucuacaucagccggcgccugcucggcaccuucaccuggacgcugagcgacuccgagggcaaggacacccccgggggcuacugccugacccgguggaugcucaucgaggccgagcugaagugcuucgggaacaccgccgucgccaagugcaacgagaagcacgacgaggaguucugcgacaugcugcgccucuucgacuucaacaagcaggccauccagcggcugaaggcgccggcccagaugagcauccagcugaucaacaaggccgugaacgcccucaucaacgaccagcugaucaugaagaaccaccuccgcgacaucaugugcauccccuacugcaacuacuccaaguacugguaccugaaccacacgaccaccggcaagaccagccugcccaagugcuggcugguguccaacgggagcuaccucaacgagacgcacuucuccgacgacaucgagcagcaggccgacaacaugaucaccgagaugcugcagaaggaguacauggagcggcagggcaagaccccgcugggccuggucgaccucuucguguucagcaccuccuucuaccugaucagcaucuuccugcaccucgugaagauccccacgcaccgccacaucgucgggaagcccugccccaagccgcaccggcugaaccacaugggcaucugcuccugcgggcuguacaagcagcccggcgugcccgugaaguggaagcgcugaggacuagucccuguucccagagcccacuuuuuuuucuuuuuuugaaauaaaauagccugucuuucagaucucaaaggcucuuuucagagccaccaaaaaaaaaaaaaaaaaaaaaaaaaaaaaaaaaaaaaaaaaaaaaaaaaaaaaaaaaaaaaaaaagaauu

SEQ ID NO: 28642 - RNA, 1736 nt, Artificial Sequence
  mRNA product Design a-2 (hSL-A64-N5) comprising derived and/or modified sequence from LASV(LM776-SLE-2012;Clade IV)__AIT17824__GPCmut5 (opt1)
aggagaguccgcucagccagguugcagaagcggcuuagcguguguccuaaucuucucucugcguguagguaggccugugccgcaaacaagcuuaccaugggccagaucgugaccuucuuccaggaggucccccacgugaucgaggaggugaugaacaucguccugaucgcccucagcauccuggccgugcugaaggggcucuacaacuucgcgaccugcggccugguggggcuggucacguuccuccugcugugcggccgcuccugcaccaccagcguguacaaggggguguacgagcuccagacccuggagcugaacauggagacgcucaacaugaccaugccgcuguccugcaccaagaacaacagccaccacuacaucauggucggcaacgagaccggccuggagcucacgcugaccaacaccuccaucaucaaccacaaguucugcaaccugagcgacgcccacaagaagaaccucuacgaccacgcccugauguccaucaucagcaccuuccaccuguccauccccaacuucaaccaguacgaggccaugagcugcgacuucaacgggggcaagaucuccgugcaguacaaccucagccacuccuacgccggggacgcggccaaccacugcggcacgguggccaacgggguccugcagaccuucaugcggauggccuggggcggcagcuacaucgcgcuggacuccgggugcggcaagugggacugcaucaugaccagcuaccaguaccucaucauccagaacaccacgugggaggaccacugccaguucucccgccccagccccaucggguaccugggccugcucucccagcggacccgcgacaucuacaucagccggcgccugcugggcaccuucaccuggacgcucagcgacuccgaggggaaggacaccccgggcggguacugccugacccgguggaugcugaucgaggccgagcucaagugcuucggcaacaccgccguggccaagugcaacgagaagcacgacgaggaguucugcgacaugcugcgccuguucgacuucaacaagcaggccauccagcggcucaaggcgcccgcccagaugagcauccagcugaucaacaaggccgugaacgcccugaucaacgaccagcucaucaugaagaaccaccuccgcgacaucaugugcauccccuacugcaacuacuccaaguacugguaccugaaccacacgaccaccgggaagaccagccugcccaagugcuggcuggucuccaacggcagcuaccugaacgagacgcacuucuccgacgacaucgagcagcaggccgacaacaugaucaccgagaugcuccagaaggaguacauggagcggcagggcaagaccccgcuggggcugguggaccuguucguguucagcaccuccuucuaccucaucagcaucuuccugcaccuggucaagauccccacgcaccgccacaucgugggcaaguccugccccaagccccaccggcucaaccacauggggaucugcagcugcggccuguacaagcagccgggggugcccguccgcuggaagcggugaggacuagucccuguucccagagcccacuuuuuuuucuuuuuuugaaauaaaauagccugucuuucagaucucaaaggcucuuuucagagccaccaaaaaaaaaaaaaaaaaaaaaaaaaaaaaaaaaaaaaaaaaaaaaaaaaaaaaaaaaaaaaaaaagaauu

SEQ ID NO: 28643 - RNA, 1736 nt, Artificial Sequence
  mRNA product Design a-2 (hSL-A64-N5) comprising derived and/or modified sequence from LASV(Mad39;Clade IV)__ANH09722__GPCmut5 (opt1)
aggagaguccgcucagccagguugcagaagcggcuuagcguguguccuaaucuucucucugcguguagguaggccugugccgcaaacaagcuuaccaugggccagaucgugaccuucuuccaggaggucccccacgugaucgaggaggugaugaacaucguccugaucgcccucagcauccuggccgugcugaaggggcucuacaacguggcgaccugcggccugaucgggcuggucacguuccuccugcugugcggccgcuccugcaccaccacccucuacaaggggguguacgagcugcaggcccuggagcucaacauggagacgcugaacaugaccaugccgcugagcugcaccaagaacaacucccaccacuacauccgggugggcaacgagaccggccucgagcugacgcugaccaacaccagccucaucaaccacaaguucugcaaccuguccgacgcccacaagaagaaccuguacgaccacgcccucaugagcaucaucuccaccuuccaccugagcauccccaacuucaaccaguacgaggccauguccugcgacuucaacgacgggaagaucagcguccaguacaaccugucccacacguacgcgggcgacaccgccaaccacugcgggaccguggccaacggcgugcuccagaccuucaugcgcauggccuggggcgggagcuacaucgcgcuggacuccggcugcgggggcugggacugcaucaugacgagcuaccaguaccugaucauccagaacaccaccugggaggaccacugccaguucucccggcccagccccaucggguaccucggccugcugucccagcgcacccgggacaucuacaucagccgccggcuccugggcacguucaccuggacccuguccgacagcgaggggaaggacaccccgggcggguacugccucacgcgcuggaugcugaucgaggccgagcugaagugcuucggcaacaccgccgucgccaagugcaacgagaagcacgacgaggaguucugcgacaugcuccggcuguucgacuucaacaagcaggccauccagcgccugaaggcgcccgcccagaugagcauccagcucaucaacaaggccgugaacgcccugaucaacgaccagcugaucaugaagaaccaccuccgggacaucaugugcauccccuacugcaacuacuccaaguacugguaccugaaccacaccgugaccgggaagacgagccugcccaagugcuggcucgucuccaacggcagcuaccugaacgagacccacuucuccgacgacaucgagcagcaggccgacaacaugaucaccgagaugcugcagaaggaguacauggagcgccagggcaagaccccgcuggggcucguggaccuguucguguucagcacguccuucuaccugaucagcaucuuccuccaccuggucaagauccccacccaccggcacguggugggcaagcccugccccaagccgcaccgccugaaccacauggggaucugcuccugcggcuucuacaagcagcccgggguccccgugcgguggaagcgcugaggacuagucccuguucccagagcccacuuuuuuuucuuuuuuugaaauaaaauagccugucuuucagaucucaaaggcucuuuucagagccaccaaaaaaaaaaaaaaaaaaaaaaaaaaaaaaaaaaaaaaaaaaaaaaaaaaaaaaaaaaaaaaaaagaauu

SEQ ID NO: 28644 - RNA, 1736 nt, Artificial Sequence
  mRNA product Design a-2 (hSL-A64-N5) comprising derived and/or modified sequence from LASV(Z0947-SLE-2011;Clade IV)__AIT17840__GPCmut5 (opt1)
aggagaguccgcucagccagguugcagaagcggcuuagcguguguccuaaucuucucucugcguguagguaggccugugccgcaaacaagcuuaccaugggccagaucgugaccuucuuccaggaggucccccacgugaucgaggaggugaugaacaucguccugaucgcccucagcauccuggccgugcugaaggggcucuacaacuucgcgaccugcggccugguggggcuggucacguuccuccugcugugcggccgcuccugcaccaucagccucuacaaggggguguacgagcugcagacccuggagcucaacauggagacccugaacaugacgaugccgcuguccugcaccaagaacaacagccaccacuacaucauggugggcaacgagaccggccucgagcugacccugacgaacaccuccaucaucaaccacaaguucugcaaccucagcgacgcccacaagaagaaccuguacgaccacgcccugauguccaucaucagcaccuuccaccucuccauccccaacuucaaccaguacgaggccaugagcugcgacuucaacgggggcaagaucuccguccaguacaaccugagccacuccuacgccggggacgcggccaaccacugcggcaccguggccaacggggugcugcagacguucaugcggauggccuggggcggcagcuacaucgcgcucgacuccgggugcgaccgcugggacugcaucaugaccagcuaccaguaccugaucauccagaacaccaccugggaggaccacugccaguucucccggcccagccccaucggcuaccuggggcuccugucccagcgcacgcgggacaucuacaucagccgccggcugcucggcaccuucaccuggacccugagcgacuccgagggcaaggacacgcccgggggcuacugccugacccgcuggaugcucaucgaggccgagcugaagugcuucgggaacaccgccgucgccaagugcaacgagaagcacgacgaggaguucugcgacaugcugcggcuguucgacuucaacaagcaggccauccagcgccugaaggcgccggcccagaugagcauccagcugaucaacaaggccgugaacgcccucaucaacgaccagcugaucaugaagaaccaccuccgggacaucaugugcauccccuacugcaacuacuccaaguacugguaccucaaccacaccacgaccggcaagaccagccugcccaagugcuggcugguguccaacgggagcuaccucaacgagacccacuucuccgacgacaucgagcagcaggccgacaacaugaucacggagaugcugcagaaggaguacauggagcgccagggcaagaccccgcugggccuggucgaccucuucguguucagcaccuccuucuaccugaucagcaucuuccugcaccucgugaagauccccacccaccggcacaucgucgggaagcccugccccaagccgcaccgccugaaccacaugggcaucugcuccugcgggcuguacaagcagcccggcgugcccgugaaguggaagcggugaggacuagucccuguucccagagcccacuuuuuuuucuuuuuuugaaauaaaauagccugucuuucagaucucaaaggcucuuuucagagccaccaaaaaaaaaaaaaaaaaaaaaaaaaaaaaaaaaaaaaaaaaaaaaaaaaaaaaaaaaaaaaaaaagaauu

SEQ ID NO: 28645 - RNA, 1736 nt, Artificial Sequence
  mRNA product Design a-2 (hSL-A64-N5) comprising derived and/or modified sequence from LASV(Josiah;Clade IV)__NP_694870__GPCmut5 (opt4)
aggagaguccgcucagccagguugcagaagcggcuuagcguguguccuaaucuucucucugcguguagguaggccugugccgcaaacaagcuuaccaugggccagaucgugaccuucuuccaggaggugccccacgugaucgaggaggugaugaacaucgugcugaucgcccugagcgugcuggccgugcugaagggccuguacaacuucgccaccugcggccuggugggccuggugaccuuccugcugcugugcggcagaagcugcaccaccagccuguacaagggcguguacgagcugcagacccuggagcugaacauggagacccugaacaugaccaugccccugagcugcaccaagaacaacagccaccacuacaucauggugggcaacgagaccggccuggagcugacccugaccaacaccagcaucaucaaccacaaguucugcaaccugagcgacgcccacaagaagaaccuguacgaccacgcccugaugagcaucaucagcaccuuccaccugagcauccccaacuucaaccaguacgaggccaugagcugcgacuucaacggcggcaagaucagcgugcaguacaaccugagccacagcuacgccggcgacgccgccaaccacugcggcaccguggccaacggcgugcugcagaccuucaugagaauggccuggggcggcagcuacaucgcccuggacagcggcugcggcaacugggacugcaucaugaccagcuaccaguaccugaucauccagaacaccaccugggaggaccacugccaguucagcagacccagccccaucggcuaccugggccugcugagccagagaaccagagacaucuacaucagcagaagacugcugggcaccuucaccuggacccugagcgacagcgagggcaaggacacccccggcggcuacugccugaccagauggaugcugaucgaggccgagcugaagugcuucggcaacaccgccguggccaagugcaacgagaagcacgacgaggaguucugcgacaugcugagacuguucgacuucaacaagcaggccauccagagacugaaggcccccgcccagaugagcauccagcugaucaacaaggccgugaacgcccugaucaacgaccagcugaucaugaagaaccaccugagagacaucaugugcauccccuacugcaacuacagcaaguacugguaccugaaccacaccaccaccggcagaaccagccugcccaagugcuggcuggugagcaacggcagcuaccugaacgagacccacuucagcgacgacaucgagcagcaggccgacaacaugaucaccgagaugcugcagaaggaguacauggagagacagggcaagaccccccugggccugguggaccuguucguguucagcaccagcuucuaccugaucagcaucuuccugcaccuggugaagauccccacccacagacacaucgugggcaagagcugccccaagccccacagacugaaccacaugggcaucugcagcugcggccuguacaagcagcccggcgugcccgugaaguggaagagaugaggacuagucccuguucccagagcccacuuuuuuuucuuuuuuugaaauaaaauagccugucuuucagaucucaaaggcucuuuucagagccaccaaaaaaaaaaaaaaaaaaaaaaaaaaaaaaaaaaaaaaaaaaaaaaaaaaaaaaaaaaaaaaaaagaauu

SEQ ID NO: 28646 - RNA, 1733 nt, Artificial Sequence
  mRNA product Design a-2 (hSL-A64-N5) comprising derived and/or modified sequence from LASV(LP;Clade I)__AAF86701__GPCmut5 (opt4)
aggagaguccgcucagccagguugcagaagcggcuuagcguguguccuaaucuucucucugcguguagguaggccugugccgcaaacaagcuuaccaugggccagaucaucaccuucuuccaggaggugccccacgugaucgaggaggugaugaacaucgugcugaucgcccugagccugcuggccauccugaagggccuguacaacaucgccaccugcggcaucaucggccugguggccuuccuguuccugugcggcaagagcugcagccugacccugaagggcggcuacgagcugcagacccuggagcugaacauggagacccugaacaugaccaugccccugagcugcaccaagaacagcagccaccacuacaucagagugggcaacgagaccggccuggagcugacccugaccaacaccagcaucaucaaccacaaguucugcaaccugagcgacgcccacaagaagaaccuguacgaccacgcccugaugagcaucaucagcaccuuccaccugagcauccccaacuucaaccaguacgaggccaugagcugcgacuucaacggcggcaagaucagcgugcaguacaaccugagccacagcuacgccggcgacgccgccgagcacugcggcaccguggccaacggcgugcugcagaccuucaugagaauggccuggggcggcagauacaucgcccuggacagcggcugcggcaacugggacugcaucaugaccagcuaccaguaccugaucauccagaacaccaccugggaggaccacugccaguucagcagacccagccccaucggcuaccugggccugcugagccagagaaccagagacaucuacaucagcagaagacugcugggcaccuucaccuggacccugagcgacagcgagggcaacgagacccccggcggcuacugccugaccagauggaugcugaucgaggccgagcugaagugcuucggcaacaccgccguggccaagugcaacgagaagcacgacgaggaguucugcgacaugcugagacuguucgacuucaacaagcaggccaucagaagacugaaggcccccgcccagaugagcauccagcugaucaacaaggccgugaacgcccugaucaacgaccagcugaucaugaagaaccaccugagagacaucaugugcauccccuacugcaacuacagcaaguacugguaccugaaccacaccagcagcggcagaaccagccugcccaagugcuggcugaucagcaacggcagcuaccugaacgagacccaguucagcgacgacaucgagcagcaggccgacaacaugaucaccgagaugcugcagaaggaguacaucgagagacagggcaagaccccccugggccugguggacaucuucaucuucagcaccagcuucuaccugaucagcaucuuccugcaccugaucaagauccccacccacagacacaucgugggcaagcccugccccaagccccacagacugaaccacaugggcgugugcagcugcggccuguacaagcaccccggcgugcccaccaaguggaagagaugaggacuagucccuguucccagagcccacuuuuuuuucuuuuuuugaaauaaaauagccugucuuucagaucucaaaggcucuuuucagagccaccaaaaaaaaaaaaaaaaaaaaaaaaaaaaaaaaaaaaaaaaaaaaaaaaaaaaaaaaaaaaaaaaagaauu

SEQ ID NO: 28647 - RNA, 1733 nt, Artificial Sequence
  mRNA product Design a-2 (hSL-A64-N5) comprising derived and/or modified sequence from LASV(803213;Clade II)__AAF86703__GPCmut5 (opt4)
aggagaguccgcucagccagguugcagaagcggcuuagcguguguccuaaucuucucucugcguguagguaggccugugccgcaaacaagcuuaccaugggccagaucaucaccuucuuccaggaggugccccacgugaucgaggaggugaugaacaucgugcugaucgcccugagccugcuggccauccugaagggcaucuacaacguggccaccugcggccuguucggccugaucagcuuccugcugcugugcggcagaagcugcagcgugaccuacaagggcguguacgagcugcagacccuggagcugaacauggccaaccugaacaugaccaugccccugagcugcaccaagaacaacagccaccacuacaucauggugggcaacgagaccggccuggagcugacccugaccaacaccagcaucaucaaccacaaguucugcaaccugagcgacgcccacaagaagaaccuguacgaccacgcccugaugagcaucaucagcaccuuccaccugagcauccccaacuucaaccaguacgaggccaugagcugcgacuucaacggcggcaagaucagcgugcaguacaaccugagccacagcuucgccguggacgccgccaaccacugcggcaccaucgccaacggcgugcugcagaccuucaugagaauggccuggggcggcagcuacaucgcccuggacagcggcugcggcaacugggacugcaucaugaccagcuaccaguaccugaucauccagaacaccaccugggaggaccacugccaguucagcagacccagccccaucggcuaccugggccugcugagccagagaaccagagacaucuacaucagcagaagacugcugggcaccuucaccuggacccugagcgacagcgagggcaacgaggcccccggcggcuacugccugaccagauggaugcugaucgaggccgagcugaagugcuucggcaacaccgccguggccaagugcaacgagaagcacgacgaggaguucugcgacaugcugagacuguucgacuucaacaagcaggccaucaagagacugaagacccccgcccagaugagcauccagcugaucaacaaggccgugaacgcccugaucaacgaccagcugaucaugaagaaccaccugagagacaucaugugcauccccuacugcaacuacagcagauacugguaccugaaccacaccgugaccggcaagaccagccugcccagaugcuggcuggugagcaacggcagcuaccugaacgagacccacuucagcgacgacaucgagcagcaggccgacaacaugaucaccgagaugcugcagaaggaguacauggacagacagggcaagaccccccugggccugguggaccuguucguguucagcaccagcuucuaccugaucagcaucuuccugcaccuggugaagauccccacccacagacacaucgugggcaagcccugccccaagccccacagacugaaccacaugggcaucugcagcugcggccuguacaagcaccccggcgugcccgugaaguggaagagaugaggacuagucccuguucccagagcccacuuuuuuuucuuuuuuugaaauaaaauagccugucuuucagaucucaaaggcucuuuucagagccaccaaaaaaaaaaaaaaaaaaaaaaaaaaaaaaaaaaaaaaaaaaaaaaaaaaaaaaaaaaaaaaaaagaauu

SEQ ID NO: 28648 - RNA, 1733 nt, Artificial Sequence
  mRNA product Design a-2 (hSL-A64-N5) comprising derived and/or modified sequence from LASV(GA391;Clade III)__CAA36645__GPCmut5 (opt4)
aggagaguccgcucagccagguugcagaagcggcuuagcguguguccuaaucuucucucugcguguagguaggccugugccgcaaacaagcuuaccaugggccagaucgugaccuucuuccaggaggugccccacgugaucgaggaggugaugaacaucgugcugaucgcccugagcauccuggccauccugaagggccuguacaacguggccaccugcggccugaucggccuggugaccuuccugcugcugagcggcagaagcugcagccugaucuacaagggcaccuacgagcugcagacccuggagcugaacauggagacccugaacaugaccaugccccugagcugcaccaagaacaacagccaccacuacaucagagugggcaacgagaccggccuggagcugacccugaccaacaccagcauccugaaccacaaguucugcaaccugagcgacgcccacaagagaaaccuguacgaccacagccugaugagcaucaucagcaccuuccaccugagcauccccaacuucaaccaguacgaggccaugagcugcgacuucaacggcggcaagaucaccgugcaguacaaccugagccacagcuucgccguggacgccgccggccacugcggcacccuggccaacggcgugcugcagaccuucaugagaauggccuggggcggcagcuacaucgcccuggacagcggcugcggcaacugggacugcaucaugaccagcuaccaguaccugaucauccagaacaccaccugggacgaccacugccaguucagcagacccagccccaucggcuaccugggccugcugagccagagaaccagagacaucuacaucagcagaagacugcugggcaccuucaccuggacccugagcgacagcgagggcaacgagacccccggcggcuacugccugaccagauggaugcugaucgaggccgagcugaagugcuucggcaacaccgccguggccaagugcaacgagaagcacgacgaggaguucugcgacaugcugagacuguucgacuucaacaagcaggccaucagaagacugaagacccccgcccagaugagcauccagcugaucaacaaggccgugaacgcccugaucaacgaccagcugaucaugaagaaccaccugagagacaucaugugcauccccuacugcaacuacagcagauacugguaccugaaccacaccagcaccggcaagaccagccugcccagaugcuggcugaucagcaacggcagcuaccugaacgagaccaaguucagcgacgacaucgagcagcaggccgacaacaugaucaccgagaugcugcagaaggaguacaucgacagacagggcaagaccccccugggccugguggaccuguucguguucagcaccagcuucuaccugaucagcaucuuccugcaccuggugaagauccccacccacagacacaucgugggcaagcccugccccaagccccacagacugaaccacaugggcaucugcagcugcggccuguacaagcagcccggcgugcccgugagauggaagagaugaggacuagucccuguucccagagcccacuuuuuuuucuuuuuuugaaauaaaauagccugucuuucagaucucaaaggcucuuuucagagccaccaaaaaaaaaaaaaaaaaaaaaaaaaaaaaaaaaaaaaaaaaaaaaaaaaaaaaaaaaaaaaaaaagaauu

SEQ ID NO: 28649 - RNA, 1736 nt, Artificial Sequence
  mRNA product Design a-2 (hSL-A64-N5) comprising derived and/or modified sequence from LASV(AV;Clade V)__CCA30314__GPCmut5 (opt4)
aggagaguccgcucagccagguugcagaagcggcuuagcguguguccuaaucuucucucugcguguagguaggccugugccgcaaacaagcuuaccaugggccagaucgugaccuucuuccaggaggugccccacgugaucgaggaggugaugaacaucgugcugaucgcccugagcauccuggccgugcugaagggccuguacaacaucgccaccugcggccugaucggccugaucaccuuccugcugcugugcggcagaagcugcagcagcaaccuguacaagggcguguacgagcugcagagccuggaccugaacauggagacccugaacaugaccaugccccugagcugcaccaagaacaacagccaccacuacaucagagugggcaacgacaccggccuggagcugacccugaccaacaccagcauccugaaccacaaguucugcaaccugagcgacgcccacaagaaggaccuguacgaccacgcccugaugagcaucaucagcaccuuccaccugagcauccccaacuucaaccaguacgaggccaugagcugcgacuucaacggcggcaagaucagcgugcaguacaaccugagccacagcuacgccaucgacgccgccaaccacugcggcaccguggccaacggcauccugcagaccuucaugagaauggccuggggcggcagcuacaucgcccuggacagcggcugcggcaacugggacugcaucaugaccagcuaccaguaccugaucauccagaacaccaccugggagaaccacugccaguucagcagacccagccccaucggcuaccugggccugcugagccagagaaccagagacaucuacaucagcagaagacugcugggcaccuucaccuggacccugagcgacagcgagggcaacgccacccccggcggcuacugccugaccagauggaugcugaucgaggccgagcugaagugcuucggcaacaccgccguggccaagugcaacgagaagcacgacgaggaguucugcgacaugcugagacuguucgacuucaacaagcaggccaucagcagacugaagagccccgcccagaugagcauccagcugaucaacaaggccgugaacgcccugaucaacgaccagcugaucaugaagaaccaccugagagacaucaugugcauccccuacugcaacuacagcaaguacugguaccugaaccacaccaucaccggcaagaccagccugcccaagugcuggcuggugagcaacggcagcuaccugaacgagacccacuucagcgacgacaucgagcagcaggccgacaacaugaucaccgagaugcugcagaaggaguacauggagagacagggcaagaccccccugggccugguggaccuguucguguucagcaccagcuucuaccugaucagcaucuuccugagacuggugaagauccccacccacagacacaucgugggcaagcccugccccaagccccacagacugaaccacaugggcaucugcagcugcggccuguacaagcagcccggcgugcccgugagauggaagagaugaggacuagucccuguucccagagcccacuuuuuuuucuuuuuuugaaauaaaauagccugucuuucagaucucaaaggcucuuuucagagccaccaaaaaaaaaaaaaaaaaaaaaaaaaaaaaaaaaaaaaaaaaaaaaaaaaaaaaaaaaaaaaaaaagaauu

SEQ ID NO: 28650 - RNA, 1733 nt, Artificial Sequence
  mRNA product Design a-2 (hSL-A64-N5) comprising derived and/or modified sequence from LASV(Togo/2016/7082;Clade VI)__AMR44577__GPCmut5 (opt4)
aggagaguccgcucagccagguugcagaagcggcuuagcguguguccuaaucuucucucugcguguagguaggccugugccgcaaacaagcuuaccaugggccagaucaucaccuucuuccaggaggugccccacgugaucgaggaggugaugaacaucgugcugaucgcccugagccugcuggccauccugaagggcguguacaacguggccaccugcggcaucaucggccuggugaccuuccuguuccugugcggcagaagcugcagccugaucuacaagggcagcuacgagcugcagacccuggagcugaacauggagacccugaacaugaccaugccccugagcugcaccaagaacagcagccaccacuacaucagagugggcaacgagaccggccuggagcugacccugaccaacaccagcaucaucaaccacaaguucugcaaccugagcgacgcccacaagagaaaccuguacgaccacgcccugaugagcauccugagcaccuuccaccugagcauccccaacuucaaccaguacgaggccaugagcugcgacuucaacggcggcaagaucagcgugcaguacaaccugagccacgccuacgccguggacgccgccgagcacugcggcaccguggccaacggcgugcugcagaccuucaugagaauggccuggggcggcagcuacaucgcccuggacagcggcugcggcaacugggacugcaucaugaccagcuaccaguaccugaucauccagaacaccaccugggaggaccacugccaguucagcagacccagccccaucggcuaccugggccugcugagccagagaaccagagacaucuacaucagcagaagacugcugggcaccuucaccuggacccugagcgacagcgagggcaacgagacccccggcggcuacugccugaccagauggaugcugaucgaggccgagcugaagugcuucggcaacaccgccguggccaagugcaacgagaagcacgacgaggaguucugcgacaugcugagacuguucgacuucaacaagcaggccauccagagacugaagagccccgcccagaugagcauccagcugaucaacaaggccgugaacgcccugaucaacgaccagcugaucaugaagaaccaccugagagacaugaugugcauccccuacugcaacuacagcaaguacugguaccugaaccacaccagcagcggcagaaccagccugcccaagugcuggcuggugagcaacggcagcuaccugaacgagacccacuucagcgacgacaucgagcagcaggccgacaacaugaucaccgagaugcugcagaaggaguacaucgacagacagggcaagaccccccugggccugguggaccuguucguguucagcaccagcuucuaccugaucagcaucuuccugcaccugaucaagauccccacccacagacacaucgugggcaagcccugccccaagccccacagacugaaccacaugggcaucugcagcugcggccuguacaagcagcccggcgugcccaccagauggaagagaugaggacuagucccuguucccagagcccacuuuuuuuucuuuuuuugaaauaaaauagccugucuuucagaucucaaaggcucuuuucagagccaccaaaaaaaaaaaaaaaaaaaaaaaaaaaaaaaaaaaaaaaaaaaaaaaaaaaaaaaaaaaaaaaaagaauu

SEQ ID NO: 28651 - RNA, 1733 nt, Artificial Sequence
  mRNA product Design a-2 (hSL-A64-N5) comprising derived and/or modified sequence from LASV(KAK-428;Clade n.d. (VII))__ANH09740__GPCmut5 (opt4)
aggagaguccgcucagccagguugcagaagcggcuuagcguguguccuaaucuucucucugcguguagguaggccugugccgcaaacaagcuuaccaugggccagaucgugaccuucuuccaggaggugccccacgugaucgaggaggugaugaacaucgugcugaucgcccugagccugcuggccauccugaagggccuguacaacuucgccaccugcggcgugaucggccugaucaccuuccugcugcugugcggcagaagcugcagcgccaccuacaagggccaguacgagcugcagacccuggagcugaacauggagagccugaacaugaccaugccccugagcugcaccaagaacaacagccaccacuacaucagagccggcaacaacaccggccuggagcugacccugaccaacaccagcaucaucagccacaaguucugcaaccugagcgacgcccacaagaagaaccuguacgaccacacccugaugagcaucaucaccaccuuccaccugagcauccccaacuucaaccaguacgaggccaugagcugcgacuucaacggcggcaagaucagcauccaguacaaccugagccacagcuacgccggcgacgccgcccagcacugcggcaccguggccaacggcgugcugcagaccuucaugagaauggccuggggcggcagcuaccuggcccuggacagcggcugcagaggcugggacugcaucaucagcagcuaccaguaccugaucauccagaacaccaccugggacgaccacugccaguucagcagacccagccccaucggcuaccugggcuucgugagccagaagaccagagacaucuacaucagcagaagacugcugggcaccuucaccuggacccugagcgacagcgagggccacgacaugcccggcggcuacugccugaccagauggaugcugaucgaggccgaccugaagugcuucggcaacaccgccguggccaagugcaacgagaagcacgacgaggaguucugcgacauguggagacuguucgacuucaacaagcaggccauccagagacugaaggcccccgcccagaugaacauccagcugaucaacaaggccgugaacgcccugaucaacgaccagcugaugaugaagaaccaccugagagacaucaugugcauccccuacugcaacuacagcaaguucugguaccugaacaacaccaccaccggcagaaccagccugcccagaugcuggcugaucagcaacggcagcuaccugaacgagacccacuucagcgacgacaucgagcagcaggccgacaacaugaucaccgagaugcugcagaaggaguacauggacagacagggcaagaccccccugggccugguggaccuguucguguucagcaccagcuucuaccugaucaccaucuuccugcaccuggugaagauccccacccacagacacaucgugggcaagcccugccccaagccccacagacugaaccacaugggcaucugcagcugcggccuguacaagcagcccggcgugcccgugagauggaagagaugaggacuagucccuguucccagagcccacuuuuuuuucuuuuuuugaaauaaaauagccugucuuucagaucucaaaggcucuuuucagagccaccaaaaaaaaaaaaaaaaaaaaaaaaaaaaaaaaaaaaaaaaaaaaaaaaaaaaaaaaaaaaaaaaagaauu

SEQ ID NO: 28652 - RNA, 1733 nt, Artificial Sequence; identical to SEQ ID NO: 28646
  mRNA product Design a-2 (hSL-A64-N5) comprising derived and/or modified sequence from LASV(Pinneo-NIG-1969;Clade I)__AIT17836__GPCmut5 (opt4)

SEQ ID NO: 28653 - RNA, 1733 nt, Artificial Sequence
  mRNA product Design a-2 (hSL-A64-N5) comprising derived and/or modified sequence from LASV(ISTH0009-NIG-2011;Clade II)__AIT17404__GPCmut5 (opt4)
aggagaguccgcucagccagguugcagaagcggcuuagcguguguccuaaucuucucucugcguguagguaggccugugccgcaaacaagcuuaccaugggccagaucaucaccuucuuccaggaggugccccacgugaucgaggaggugaugaacaucgugcugaucgcccugagccugcuggccauccugaagggcaucuacaacguggccaccugcggccuguucggccuggugagcuuccugcugcugugcggcagaagcugcagcaccaccuacaagggcguguacgagcugcagacccuggagcuggacauggccagccugaacaugaccaugccccugagcugcaccaagaacaacagccaccacuacaucauggugggcaacgagaccggccuggagcugacccugaccaacaccagcaucaucaaccacaaguucugcaaccugagcgacgcccacaagaagaaccuguacgaccacgcccugaugagcaucaucagcaccuuccaccugagcauccccaacuucaaccaguacgaggccaugagcugcgacuucaacggcggcaagaucagcgugcaguacaaccugagccacgccuacgccguggacgccgccaaccacugcggcaccaucgccaacggcgugcugcagaccuucaugagaauggccuggggcggcagcuacaucgcccuggacagcggcugcggcagcugggacugcaucaugaccagcuaccaguaccugaucauccagaacaccaccugggaggaccacugccaguucagcagacccagccccaucggcuaccugggccugcugagccagagaaccagagacaucuacaucagcagaagacugcugggcaccuucaccuggacccugagcgacagcgagggcaacgagacccccggcggcuacugccugaccagauggaugcugaucgaggccgagcugaagugcuucggcaacaccgccguggccaagugcaacgagaagcacgacgaggaguucugcgacaugcugagacuguucgacuucaacaagcaggccaucagaagacugaagacccccgcccagaugagcauccagcugaucaacaaggccgugaacgcccugaucaacgaccagcugaucaugaagaaccaccugagagacaucaugugcauccccuacugcaacuacagcaaguacugguaccugaaccacaccgugaccggcaagaccagccugcccagaugcuggcuggugagcaacggcagcuaccugaacgagacccacuucagcgacgacaucgagcagcaggccgacaacaugaucaccgagcugcugcagaaggaguacauggacagacagggcaagaccccccugggccugguggaccuguucguguucagcaccagcuucuaccugaucagcaucuuccugcaccugaucaagauccccacccacagacacaucaccggcaagcccugccccaagccccacagacugaaccacaugggcaucugcagcugcggccuguacaagcaccccggcgugcccgugaaguggaagagaugaggacuagucccuguucccagagcccacuuuuuuuucuuuuuuugaaauaaaauagccugucuuucagaucucaaaggcucuuuucagagccaccaaaaaaaaaaaaaaaaaaaaaaaaaaaaaaaaaaaaaaaaaaaaaaaaaaaaaaaaaaaaaaaaagaauu

SEQ ID NO: 28654 - RNA, 1733 nt, Artificial Sequence
  mRNA product Design a-2 (hSL-A64-N5) comprising derived and/or modified sequence from LASV(ISTH2010-NIG-2012;Clade II)__AIT17482__GPCmut5 (opt4)
aggagaguccgcucagccagguugcagaagcggcuuagcguguguccuaaucuucucucugcguguagguaggccugugccgcaaacaagcuuaccaugggccagaucaucaccuucuuccaggaggugccccacgugaucgaggaggugaugaacaucgugcugaucgcccugagccugcuggccauccugaagggcaucuacaacguggccaccugcggccuguucggccuggugagcuuccugcugcugugcggcagaagcugcagcaccaccuacaagggcguguacgagcugcagacccuggagcuggacauggccagccugaacaugaccaugccccugagcugcaccaagaacaacagccaccacuacaucauggugggcaacgagaccggccuggagcugacccugaccaacaccagcaucaucaaccacaaguucugcaaccugagcgacgcccacaagaagaaccuguacgaccacgcccugaugagcaucaucagcaccuuccaccugagcauccccaacuucaaccaguacgaggccaugagcugcgacuucaacggcggcaagaucagcgugcaguacaaccugagccacgccuacgccguggacgccgccaaccacugcggcaccaucgccaacggcgugcugcagaccuucaugagaauggccuggggcggcagcuacaucgcccuggacagcggcugcggcagcugggacugcaucaugaccagcuaccaguaccugaucauccagaacaucaccugggaggaccacugccaguucagcagacccagccccaucggcuaccugggccugcugagccagagaaccagagacaucuacaucagcagaagacugcugggcaccuucaccuggacccugagcgacagcgagggcaacgagacccccggcggcuacugccugaccagauggaugcugaucgaggccgagcugaagugcuucggcaacaccgccguggccaagugcaacgagaagcacgacgaggaguucugcgacaugcugagacuguucgacuucaacaagcaggccaucagaagacugaagacccccgcccagaugagcauccagcugaucaacaaggccgugaacgcccugaucaacgaccagcugaucaugaagaaccaccugagagacaucaugugcauccccuacugcaacuacagcaaguacugguaccugaaccacaccgugaccggcaagaccagccugcccagaugcuggcuggugagcaacggcagcuaccugaacgagacccacuucagcgacgacaucgagcagcaggccgacaacaugaucaccgagcugcugcagaaggaguacaucgacagacagggcaagaccccccugggccugguggaccuguucguguucagcaccagcuucuaccugaucagcaucuuccugcaccuggugaagauccccacccacagacacguggugggcaagcccugccccaagccccacagacugaaccacaugggcaucugcagcugcggccuguacaagcaccccggcgugcccgugaaguggaagagaugaggacuagucccuguucccagagcccacuuuuuuuucuuuuuuugaaauaaaauagccugucuuucagaucucaaaggcucuuuucagagccaccaaaaaaaaaaaaaaaaaaaaaaaaaaaaaaaaaaaaaaaaaaaaaaaaaaaaaaaaaaaaaaaaagaauu

SEQ ID NO: 28655 - RNA, 1733 nt, Artificial Sequence
  mRNA product Design a-2 (hSL-A64-N5) comprising derived and/or modified sequence from LASV(Lassa virus/H.sapiens-wt/NGA/2015/ISTH_0543;Clade II)__AVO03639__GPCmut5 (opt4)
aggagaguccgcucagccagguugcagaagcggcuuagcguguguccuaaucuucucucugcguguagguaggccugugccgcaaacaagcuuaccaugggccagaucaucaccuucuuccaggaggugccccacgugaucgaggaggugaugaacaucgugcugaucgcccugagccugcuggccauccugaagggcaucuacaacguggccaccugcggccuguucggccuggugagcuuccugcugcugugcggcagaagcugcagcaccaccuacaagggcguguacgagcugcagacccuggagcuggacauggccaaccugaacaugaccaugccccugagcugcaccaagaacaacagccaccacuacaucauggugggcaacgagaccggccuggagcugacccugaccaacaccagcaucaucaaccacaaguucugcaaccugagcgacgcccacaagaagaaccuguacgaccacgcccugaugagcaucaucagcaccuuccaccugagcauccccaacuucaaccaguacgaggccaugagcugcgacuucaacggcggcaagaucagcgugcaguacaaccugagccacaccuacgccguggacgccgccaaccacugcggcaccaucgccaacggcgugcugcagaccuucaugagaauggccuggggcggcagcuacaucgcccuggacagcggcugcggcagcugggacugcaucaugaccagcuaccaguaccuggugauccagaacaccaccugggaggaccacugccaguucagcagacccagccccaucggcuaccugggccugcugagccagagaaccagagacaucuacaucagcagaagacugcugggcaccuucaccuggacccugagcgacagcgagggcaacgagacccccggcggcuacugccugaccagauggaugcugaucgaggccgagcugaagugcuucggcaacaccgccguggccaagugcaacgagaagcacgacgaggaguucugcgacaugcugagacuguucgacuucaacaagcaggccaucagaagacugaagacccccgcccagaugagcauccagcugaucaacaaggccgugaacgcccugaucaacgaccagcugaucaugaagaaccaccugagagacaucaugugcauccccuacugcaacuacagcaaguacugguaccugaaccacaccgugaccggcaagaccagccugcccagaugcuggcuggugagcaacggcagcuaccugaacgagacccacuucagcgacgacaucgagcagcaggccgacaacaugaucaccgagcugcugcagaaggaguacaucgacagacagggcaagaccccccugggccugguggaccuguucguguucagcaccagcuucuaccugaucagcaucuuccugcaccuggugaagauccccacccacagacacaucaccggcaagcccugccccaagccccacagacugaaccacaugggcaucugcagcugcggccuguacaagcaccccggcgugcccgugaaguggaagagaugaggacuagucccuguucccagagcccacuuuuuuuucuuuuuuugaaauaaaauagccugucuuucagaucucaaaggcucuuuucagagccaccaaaaaaaaaaaaaaaaaaaaaaaaaaaaaaaaaaaaaaaaaaaaaaaaaaaaaaaaaaaaaaaaagaauu

SEQ ID NO: 28656 - RNA, 1733 nt, Artificial Sequence
  mRNA product Design a-2 (hSL-A64-N5) comprising derived and/or modified sequence from LASV(Lassa virus/H.sapiens-wt/NGA/2016/ISTH_0009;Clade II)__AVO03571__GPCmut5 (opt4)
aggagaguccgcucagccagguugcagaagcggcuuagcguguguccuaaucuucucucugcguguagguaggccugugccgcaaacaagcuuaccaugggccagaucaucaccuucuuccaggaggugccccacgugaucgaggaggugaugaacaucgugcugaucgcccugagccugcuggccauccugaagggcaucuacaacguggccaccugcggccugcugggccuggugagcuuccugcugcugugcggcagaagcugcagcaccaccuacaagggcguguacgagcugcagacccuggagcuggacauggccagccugaacaugaccaugccccugagcugcaccaagaacaacagccaccacuacaucauggugggcaacgagaccggccuggagcugacccugaccaacaccagcaucaucaaccacaaguucugcaaccugagcgacgcccacaagaagaaccuguacgaccacgcccugaugagcaucaucagcaccuuccaccugagcauccccaacuucaaccaguacgaggccaugagcugcgacuucaacggcggcagaaucagcgugcaguacaaccugagccacagcuacgccguggacgccgccaaccacugcggcaccaucgccaacggcgugcugcagaccuucaugagaauggccuggggcggcagcuacaucgcccuggacagcggcugcggcagcugggacugcaucaugaccagcuaccaguaccugaucauccagaacaccaccugggaggaccacugccaguucagcagacccagccccaucggcuaccugggccugcugagccagagaaccagagacaucuacaucagcagaagacugcugggcaccuucaccuggacccugagcgacagcgagggcaacgagacccccggcggcuacugccugaccagauggaugcugaucgaggccgagcugaagugcuucggcaacaccgccguggccaagugcaacgagaagcacgacgaggaguucugcgacaugcugagacuguucgacuucaacaagcaggccaucagaagacugaagacccccgcccagaugagcauccagcugaucaacaaggccgugaacgcccugaucaacgaccagcugaucaugaagaaccaccugagagacaucaugugcauccccuacugcaacuacagcaaguacugguaccugaaccacaccgugaccggcaagaccagccugcccagaugcuggcuggugagcaacggcagcuaccugaacgagacccacuucagcgacgacaucgagcagcaggccgacaacaugaucaccgagcugcugcagaaggaguacaucgacagacagggcaagaccccccugggccugguggaccuguucguguucagcaccagcuucuaccugaucagcaucuuccugcaccuggugaagauccccacccacagacacaucaccggcaagcccugccccaagccccacagacugaaccacaugggcaucugcagcugcggccuguacaaccaccccggcgugcccgugaaguggaagagaugaggacuagucccuguucccagagcccacuuuuuuuucuuuuuuugaaauaaaauagccugucuuucagaucucaaaggcucuuuucagagccaccaaaaaaaaaaaaaaaaaaaaaaaaaaaaaaaaaaaaaaaaaaaaaaaaaaaaaaaaaaaaaaaaagaauu

SEQ ID NO: 28657 - RNA, 1733 nt, Artificial Sequence
  mRNA product Design a-2 (hSL-A64-N5) comprising derived and/or modified sequence from LASV(Lassa virus/H.sapiens-wt/NGA/2016/ISTH_0017;Clade II)__AVO03567__GPCmut5 (opt4)
aggagaguccgcucagccagguugcagaagcggcuuagcguguguccuaaucuucucucugcguguagguaggccugugccgcaaacaagcuuaccaugggccagaucaucaccuucuuccaggaggugccccacgugaucgaggaggugaugaacaucgugcugaucgcccugagccugcuggccauccugaagggcaucuacaacguggccaccugcggccuguucggccuggugagcuuccugcugcugugcggcagaagcugcagcaccaccuacaagggcguguacgagcugcagacccuggagcuggacauggccagccugaacaugaccaugccccugagcugcaccaagaacaacagccaccacuacaucauggugggcaacgagaccggccuggagcugacccugaccaacaccagcaucaucaaccacaaguucugcaaccugagcgacgcccacaagaagaaccuguacgaccacgcccugaugagcaucaucagcaccuuccaccugagcauccccaacuucaaccaguacgaggccaugagcugcgacuucaacggcggcaagaucagcgugcaguacaaccugagccacaccuacgccaucgacgccgccaaccacugcggcaccaucgccaacggcgugcugcagaccuucaugagaauggccuggggcggcagcuacaucgcccuggacagcggcugcggcagcugggacugcaucaugaccagcuaccaguaccugaucauccagaacaccaccugggaggaccacugccaguucagcagacccagccccaucggcuaccugggccugcugagccagagaaccagagacaucuacaucagcagaagacugcugggcaccuucaccuggacccugagcgacagcgagggcaacgagacccccggcggcuacugccugaccagauggaugcugaucgaggccgagcugaagugcuucggcaacaccgccguggccaagugcaacgagaagcacgacgaggaguucugcgacaugcugagacuguucgacuucaacaagcaggccaucagaagacugaagacccccgcccagaugagcauccagcugaucaacaaggccgugaacgcccugaucaacgaccagcugaucaugaagaaccaccugagagacaucaugugcauccccuacugcaacuacagcaaguacugguaccugaaccacaccgugaccggcaagaccagccugcccagaugcuggcuggugagcaacggcagcuaccugaacgagacccacuucagcgacgacaucgagcagcaggccgacaacaugaucaccgagcugcugcagaaggaguacauggacagacagggcaagaccccccugggccugguggaccuguucguguucagcaccagcuucuaccugaucagcaucuuccugcaccuggugagaauccccacccacagacacgugaucggcaagcccugccccaagccccacagacugaaccacaugggcaucugcagcugcggccuguacaagcaccccggcgugcccgugaaguggaagagaugaggacuagucccuguucccagagcccacuuuuuuuucuuuuuuugaaauaaaauagccugucuuucagaucucaaaggcucuuuucagagccaccaaaaaaaaaaaaaaaaaaaaaaaaaaaaaaaaaaaaaaaaaaaaaaaaaaaaaaaaaaaaaaaaagaauu

SEQ ID NO: 28658 - RNA, 1733 nt, Artificial Sequence
  mRNA product Design a-2 (hSL-A64-N5) comprising derived and/or modified sequence from LASV(Lassa virus/H.sapiens-wt/NGA/2018/ISTH_0959;Clade II)__AVV65099__GPCmut5 (opt4)
aggagaguccgcucagccagguugcagaagcggcuuagcguguguccuaaucuucucucugcguguagguaggccugugccgcaaacaagcuuaccaugggccagaucaucaccuucuuccaggaggugccccacgugaucgaggaggugaugaacaucgugcugaucgcccugagccugcuggccauccugaagggcaucuacaacguggugaccugcggccuguucggccuggugagcuuccugcugcugugcggcagaagcugcagcaccaccuacaagggcguguacgagcugcagacccuggagcuggacauggccagccugaacaugaccaugccccugagcugcaccaagaacaacagccaccacuacaucauggugggcaacgagaccggccuggagcugacccugaccaacaccagcaucaucaaccacaaguucugcaaccugagcgacgcccacaagaagaaccuguacgaccacgcccugaugagcaucaucagcaccuuccaccugagcauccccaacuucaaccaguacgaggccaugagcugcgacuucaacggcggcaagaucagcgugcaguacaaccugagccacgccuacgccaucgacgccgccaaccacugcggcaccaucgccaacggcgugcugcagaccuucaugagaauggccuggggcggcagcuacaucgcccuggacagcggcugcggcagcugggacugcaucaugaccagcuaccaguaccugaucauccagaacaccaccugggaggaccacugccaguucagcagacccagccccaucggcuaccugggccugcugagccagagaaccagagacaucuacaucagcagaagacugcugggcaccuucaccuggacccugagcgacagcgagggcaacgagacccccggcggcuacugccugaccagauggaugcugaucgaggccgagcugaagugcuucggcaacaccgccguggccaagugcaacgagaagcacgacgaggaguucugcgacaugcugagacuguucgacuucaacaagcaggccaucagaagacugaagacccccgcccagaugagcauccagcugaucaacaaggccgugaacgcccugaucaacgaccagcugaucaugaagaaccaccugagagacaucaugugcauccccuacugcaacuacagcaaguacugguaccugaaccacaccgugaccggcaagaccagccugcccagaugcuggcuggugagcaacggcagcuaccugaacgagacccacuucagcgacgacaucgagcagcaggccgacaacaugaucaccgagcugcugcagaaggaguacaucgacagacagggcaagaccccccugggccugguggaccuguucguguucagcaccagcuucuaccugaucagcaucuuccugcaccuggugaagauccccacccacagacacgugaucggcaagcccugccccaagccccacagacugaaccacaugggcaucugcagcugcggccuguacaagcaccccggcgugcccgugaaguggaagagaugaggacuagucccuguucccagagcccacuuuuuuuucuuuuuuugaaauaaaauagccugucuuucagaucucaaaggcucuuuucagagccaccaaaaaaaaaaaaaaaaaaaaaaaaaaaaaaaaaaaaaaaaaaaaaaaaaaaaaaaaaaaaaaaaagaauu

SEQ ID NO: 28659 - RNA, 1733 nt, Artificial Sequence
  mRNA product Design a-2 (hSL-A64-N5) comprising derived and/or modified sequence from LASV(LASV003-NIG-2008;Clade II)__AIT17580__GPCmut5 (opt4)
aggagaguccgcucagccagguugcagaagcggcuuagcguguguccuaaucuucucucugcguguagguaggccugugccgcaaacaagcuuaccaugggccagaucaucaccuucuuccaggaggugccccacgugaucgaggaggugaugaacaucgugcugaucgcccugagccugcuggccauccugaagggcaucuacaacguggccaccugcggccuguucggccuggugagcuuccugcugcugugcggcagaagcugcagcaccaccuacaagggcguguacgagcugcagacccuggagcuggacauggccagccugaacaugaccaugccccugagcugcaccaagaacaacagccaccacuacaucauggugggcaacgagaccggccuggagcugacccugaccaacaccagcaucaucaaccacaaguucugcaaccugagcgacgcccacaagaagaaccuguacgaccacgcccugaugagcaucaucagcaccuuccaccugagcauccccaacuucaaccaguacgaggccaugagcugcgacuucaacggcggcaagaucagcgugcaguacaaccugagccacaccuacgccguggacgccgccaaccacugcggcaccaucgccaacggcgugcugcagaccuucaugagaauggccuggggcggcagcuacaucgcccuggacagcggcugcggcagcugggacugcaucaugaccagcuaccaguaccugaucauccagaacaccaccugggaggaccacugccaguucagcagacccagccccaucggcuaccugggccugcugagccagagaaccagagacaucuacaucagcagaagacugcugggcaccuucaccuggacccugagcgacagcgagagcaacgagacccccggcggcuacugccugaccagauggaugcugaucgaggccgagcugaagugcuucggcaacaccgccguggccaagugcaacgagaagcacgacgaggaguucugcgacaugcugagacuguucgacuucaacaagcaggccaucagaagacugaaggcccccgcccagaugagcauccagcugaucaacaaggccgugaacgcccugaucaacgaccagcugaucaugaagaaccaccugagagacaucaugugcauccccuacugcaacuacagcaaguacugguaccugaaccacaccgugaccggcagaaccagccugcccagaugcuggcuggugagcaacggcagcuaccugaacgagacccacuucagcgacgacaucgagcagcaggccgacaacaugaucaccgagcugcugcagaaggaguacauggacagacagggcaagaccccccugggccugguggaccuguucguguucagcaccagcuucuaccugaucagcaucuuccugcaccuggugaagauccccacccacagacacgugaucggcaagcccugccccaagccccacagacugaaccacaugggcaucugcagcugcggccuguacaagcaccccggcgugcccgugaaguggaagagaugaggacuagucccuguucccagagcccacuuuuuuuucuuuuuuugaaauaaaauagccugucuuucagaucucaaaggcucuuuucagagccaccaaaaaaaaaaaaaaaaaaaaaaaaaaaaaaaaaaaaaaaaaaaaaaaaaaaaaaaaaaaaaaaaagaauu

SEQ ID NO: 28660 - RNA, 1733 nt, Artificial Sequence
  mRNA product Design a-2 (hSL-A64-N5) comprising derived and/or modified sequence from LASV(LASV035-NIG-2009;Clade II)__AIT17588__GPCmut5 (opt4)
aggagaguccgcucagccagguugcagaagcggcuuagcguguguccuaaucuucucucugcguguagguaggccugugccgcaaacaagcuuaccaugggccagaucaucaccuucuuccaggaggugccccacgugaucgaggaggugaugaacaucgugcugaucgcccugagccugcuggccauccugaagggcaucuacaacguggccaccugcggccuguucggccuggugagcuuccugcugcugugcggcagaagcugcagcaccaccuacaagggcguguacgagcugcagacccuggagcuggacauggccagccugaacaugaccaugccccugagcugcaccaagaacaacagccaccacuacaucauggugggcaacgagaccggccuggagcugacccugaccaacaccagcaucaucaaccacaaguucugcaaccugagcgacgcccacaagaagaaccuguacgaccacgcccugaugagcaucaucagcaccuuccaccugagcauccccaacuucaaccaguacgaggccaugagcugcgacuucaacggcggcaagaucagcgugcaguacaaccugagccacgccuacgccguggacgccgccaaccacugcggcaccaucgccaacggcgugcugcagaccuucaugagaauggccuggggcggcagcuacaucgcccuggacagcggcugcggcagcugggacugcaucaugaccagcuaccaguaccugaucauccagaacaccaccugggaggaccacugccaguucagcagacccagccccaucggcuaccugggccugcugagccagagaaccagagacaucuacaucagcagaagacugcugggcaccuucaccuggacccugagcgacagcgagggcaacgagacccccggcggcuacugccugaccagauggaugcugaucgaggccgagcugaagugcuucggcaacaccgccguggccaagugcaacgagaagcacgacgaggaguucugcgacaugcugagacuguucgacuucaacaagcaggccaucagaagacugaaggcccccgcccagaugagcauccagcugaucaacaaggccgugaacgcccugaucaacgaccagcugaucaugaagaaccaccugagagacaucaugugcauccccuacugcaacuacagcaaguacugguaccugaaccacaccgugaccggcaagaccagccugcccagaugcuggcuggugagcaacggcagcuaccugaacgagacccacuucagcgacgacaucgagcagcaggccgacaacaugaucaccgagcugcugcagaaggaguacaucgacagacagggcaagaccccccugggccugguggaccuguucguguucagcaccagcuucuaccugaucagcaucuuccugcaccuggugaagauccccacccacagacacgugaucggcaagcccugccccaagccccacagacugaaccacaugggcaucugcagcugcggccuguacaagcaccccggcgugcccgugaaguggaagagaugaggacuagucccuguucccagagcccacuuuuuuuucuuuuuuugaaauaaaauagccugucuuucagaucucaaaggcucuuuucagagccaccaaaaaaaaaaaaaaaaaaaaaaaaaaaaaaaaaaaaaaaaaaaaaaaaaaaaaaaaaaaaaaaaagaauu

SEQ ID NO: 28661 - RNA, 1733 nt, Artificial Sequence
  mRNA product Design a-2 (hSL-A64-N5) comprising derived and/or modified sequence from LASV(LASV1000-NIG-2009;Clade II)__AIT17782__GPCmut5 (opt4)
aggagaguccgcucagccagguugcagaagcggcuuagcguguguccuaaucuucucucugcguguagguaggccugugccgcaaacaagcuuaccaugggccagaucaucaccuucuuccaggaggugccccacgugaucgaggaggugaugaacaucgugcugaucgcccugagccugcuggccauccugaagggcaucuacaacguggccaccugcggccuguucggccuggugagcuuccugcugcugugcggcagaagcugcagcaccaccuacaagggcguguacgagcugcagacccuggagcuggacauggccagccugaacaugaccaugccccugagcugcaccaagaacaacagccaccacuacaucauggugggcaacgagaccggccuggagcugacccugaccaacaccagcaucaucaaccacaaguucugcaaccugagcgacgcccacaagaagaaccuguacgaccacgcccugaugagcaucaucagcaccuuccaccugagcauccccaacuucaaccaguacgaggccaugagcugcgacuucaacggcggcaagaucagcgugcaguacaaccugagccacaccuacgccguggacgccgccaaccacugcggcaccaucgccaacggcgugcugcagaccuucaugagaauggccuggggcggcagcuacaucgcccuggacagcggcugcggcagcugggacugcaucaugaccagcuaccaguaccugaucauccagaacaccaccugggaggaccacugccaguucagcagacccagccccaucggcuaccugggccugcugagccagagaaccagagacaucuacaucagcagaagacugcugggcaccuucaccuggacccugagcgacagcgagggcaacgagacccccggcggcuacugccugaccagauggaugcugaucgaggccgagcugaagugcuucggcaacaccgccguggccaagugcaacgagaagcacgacgaggaguucugcgacaugcugagacuguucgacuucaacaagcaggccaucaagagacugaagacccccgcccagaugagcauccagcugaucaacaaggccgugaacgcccugaucaacgaccagcugaucaugaagaaccaccugagagacaucaugugcauccccuacugcaacuacagcaaguacugguaccugaaccacaccgugaccggcaagaccagccugcccagaugcuggcuggugagcaacggcagcuaccugaacgagacccacuucagcgacgacaucgagcagcaggccgacaacaugaucaccgagcugcugcagaaggaguacaucgacagacagggcaagaccccccugggccugguggaccuguucguguucagcaccagcuucuaccugaucagcaucuuccugcaccuggugaagauccccacccacagacacguggugggcaagcccugccccaagccccacagacugaaccacaugggcaucugcagcugcggccuguacaagcaccccggcgugcccgugaaguggaagagaugaggacuagucccuguucccagagcccacuuuuuuuucuuuuuuugaaauaaaauagccugucuuucagaucucaaaggcucuuuucagagccaccaaaaaaaaaaaaaaaaaaaaaaaaaaaaaaaaaaaaaaaaaaaaaaaaaaaaaaaaaaaaaaaaagaauu

SEQ ID NO: 28662 - RNA, 1733 nt, Artificial Sequence
  mRNA product Design a-2 (hSL-A64-N5) comprising derived and/or modified sequence from LASV(LASV221-NIG-2010;Clade II)__AIT17624__GPCmut5 (opt4)
aggagaguccgcucagccagguugcagaagcggcuuagcguguguccuaaucuucucucugcguguagguaggccugugccgcaaacaagcuuaccaugggccagaucaucaccuucuuccaggaggugccccacgugaucgaggaggugaugaacaucgugcugaucgcccugagccugcuggccauccugaagggcaucuacaacguggccaccugcggccuguucggccuggugagcuuccugcugcugugcggcagaagcugcagcaccaccuacaagggcguguacgagcugcagacccuggagcuggacauggccagccugaacaugaccaugccccugagcugcaccaagaacaacagccaccacuacaucauggugggcaacgagaccggccuggagcugacccugaccaacaccagcaucaucaaccacaaguucugcaaccugagcgacgcccacaagaagaaccuguacgaccacgcccugaugagcaucaucagcaccuuccaccugagcauccccaacuucaaccaguacgaggccaugagcugcgacuucaacggcggcaagaucagcgugcaguacaaccugagccacaccuacgccaucgacgccgccaaccacugcggcaccaucgccaacggcgugcugcagaccuucaugagaauggccuggggcggcagcuacaucgcccuggacagcggcugcggcagcugggacugcaucaugaccagcuaccaguaccugaucauccagaacaccaccugggaggaccacugccaguucagcagacccagccccaucggcuaccugggccugcugagccagagaaccagagacaucuacaucagcagaagacugcugggcaccuucaccuggacccugagcgacagcgagggcaacgagacccccggcggcuacugccugaccagauggaugcugaucgaggccgagcugaagugcuucggcaacaccgccguggccaagugcaacgagaagcacgacgaggaguucugcgacaugcugagacuguucgacuucaacaagcaggccaucagaagacugaagacccccgcccagaugagcauccagcugaucaacaaggccgugaacgcccugaucaacgaccagcugaucaugaagaaccaccugagagacaucaugugcauccccuacugcaacuacagcaaguacugguaccugaaccacaccgugaccggcaagaccagccugcccagaugcuggcuggugagcaacggcagcuaccugaacgagacccacuucagcgacgacaucgagcagcaggccgacaacaugaucaccgagaugcugcagaaggaguacauggacagacagggcaagaccccccugggccugguggaccuguucguguucagcaccagcuucuaccugaucagcaucuuccugcaccuggugaagauccccacccacagacacgugaucggcaagcccugccccaagccccacagacugaaccacaugggcaucugcagcugcggccuguacaagcaccccggcgugcccgugaaguggaagagaugaggacuagucccuguucccagagcccacuuuuuuuucuuuuuuugaaauaaaauagccugucuuucagaucucaaaggcucuuuucagagccaccaaaaaaaaaaaaaaaaaaaaaaaaaaaaaaaaaaaaaaaaaaaaaaaaaaaaaaaaaaaaaaaaagaauu

SEQ ID NO: 28663 - RNA, 1733 nt, Artificial Sequence
  mRNA product Design a-2 (hSL-A64-N5) comprising derived and/or modified sequence from LASV(LASV237-NIG-2010;Clade II)__AIT17638__GPCmut5 (opt4)
aggagaguccgcucagccagguugcagaagcggcuuagcguguguccuaaucuucucucugcguguagguaggccugugccgcaaacaagcuuaccaugggccagaucaucaccuucuuccaggaggugccccacgugaucgaggaggugaugaacaucgugcugaucgcccugagccugcuggccauccugaagggcaucuacaacguggccaccugcggccuguucggccuggugagcuuccugcugcugugcggcagaagcugcagcaccaccuacaagggcguguacgagcugcagacccuggagcuggacauggccagccugaacaugaccaugccccugagcugcaccaagaacaacagccaccacuacaucauggugggcaacgagaccggccuggagcugacccugaccaacaccagcaucaucaaccacaaguucugcaaccugagcgacgcccacaagaaggaccuguacgaccacgcccugaugagcaucaucagcaccuuccaccugagcauccccaacuucaaccaguacgaggccaugagcugcgacuucaacggcggcaagaucagcgugcaguacaaccugagccacaccuacgccguggacgccgccaaccacugcggcaccaucgccaacggcgugcugcagaccuucaugagaauggccuggggcggcagcuacaucgcccuggacagcggcugcggcagcugggacugcaucaugaccagcuaccaguaccugaucauccagaacaccaccugggaggaccacugccaguucagcagacccagccccaucggcuaccugggccugcugagccagagaaccagagacaucuacaucagcagaagacugcugggcaccuucaccuggacccugagcgacagcgagggcaacgagacccccggcggcuacugccugaccagauggaugcugaucgaggccgagcugaagugcuucggcaacaccgccguggccaagugcaacgagaagcacgacgaggaguucugcgacaugcugagacuguucgacuucaacaagcaggccaucagaagacugaagacccccgcccagaugagcauccagcugaucaacaaggccgugaacgcccugaucaacgaccagcugaucaugaagaaccaccugagagacaucaugugcauccccuacugcaacuacagcaaguacugguaccugaaccacaccgugaccggcaagaccagccugcccagaugcuggcuggugagcaacggcagcuaccugaacgagacccacuucagcgacgacaucgagcagcaggccgacaacaugaucaccgagcugcugcagaaggaguacauggacagacagggcaagaccccccugggccugguggaccuguucguguucagcaccagcuucuaccugaucagcaucuuccugcaccugaucaagauccccacccacagacacaucaccggcaagcccugccccaagccccacagacugaaccacaugggcaucugcagcugcggccuguacaagcaccccggcgugcccgugaaguggaagagaugaggacuagucccuguucccagagcccacuuuuuuuucuuuuuuugaaauaaaauagccugucuuucagaucucaaaggcucuuuucagagccaccaaaaaaaaaaaaaaaaaaaaaaaaaaaaaaaaaaaaaaaaaaaaaaaaaaaaaaaaaaaaaaaaagaauu

SEQ ID NO: 28664 - RNA, 1733 nt, Artificial Sequence
  mRNA product Design a-2 (hSL-A64-N5) comprising derived and/or modified sequence from LASV(LASV253-NIG-2011;Clade II)__AIT17670__GPCmut5 (opt4)
aggagaguccgcucagccagguugcagaagcggcuuagcguguguccuaaucuucucucugcguguagguaggccugugccgcaaacaagcuuaccaugggccagaucaucaccuucuuccaggaggugccccacgugaucgaggaggugaugaacaucgugcugaucgcccugagccugcuggccauccugaagggcaucuacaacguggccaccugcggccuguucggccuggugagcuuccugcugcugugcggcagaagcugcagcaccaccuacaagggcguguacgagcugcagacccuggagcuggacauggccagccugaacaugaccaugccccugagcugcaccaagaacaacagccaccacuacaucauggugggcaacgagaccggccuggagcugacccugaccaacaccagcaucaucaaccacaaguucugcaaccugagcgacgcccacaagaagaaccuguacgaccacgcccugaugagcaucaucagcaccuuccaccugagcauccccaacuucaaccaguacgaggccaugagcugcgacuucaacggcggcaagaucagcgugcaguacaaccugagccacaccuacgccguggacgccgccaaccacugcggcaccaucgccaacggcgugcugcagaccuucaugagaauggccuggggcggcagcuacaucgcccuggacagcggcugcggcagcugggacugcaucaugaccagcuaccaguaccugaucauccagaacaccaccugggaggaccacugccaguucagcagacccagccccaucggcuaccugggccugcugagccagagaaccagagacaucuacaucagcagaagacugcugggcaccuucaccuggacccugagcgacagcgagggcaacgagacccccggcggcuacugccugaccagauggaugcugaucgaggccgagcugaagugcuucggcaacaccgccguggccaagugcaacgagaagcacgacgaggaguucugcgacaugcugagacuguucgacuucaacaagcaggccaucagaagacugaaggcccccgcccagaugagcauccagcugaucaacaaggccgugaacgcccugaucaacgaccagcugaucaugaagaaccaccugagagacaucaugugcauccccuacugcaacuacagcaaguacugguaccugaaccacaccgugaccggcagaaccagccugcccagaugcuggcuggugagcaacggcagcuaccugaacgagacccacuucagcgacgacaucgagcagcaggccgacaacaugaucaccgagcugcugcagaaggaguacaucgacagacagggcaagaccccccugggccugguggaccuguucguguucagcaccagcuucuaccugaucagcaucuuccugcaccuggugaagauccccacccacagacacaucaucggcaagcccugccccaagccccacagacugaaccacaugggcaucugcagcugcggccuguacaagcaccccggcgugcccgugaaguggaagagaugaggacuagucccuguucccagagcccacuuuuuuuucuuuuuuugaaauaaaauagccugucuuucagaucucaaaggcucuuuucagagccaccaaaaaaaaaaaaaaaaaaaaaaaaaaaaaaaaaaaaaaaaaaaaaaaaaaaaaaaaaaaaaaaaagaauu

SEQ ID NO: 28665 - RNA, 1733 nt, Artificial Sequence
  mRNA product Design a-2 (hSL-A64-N5) comprising derived and/or modified sequence from LASV(LASV254-NIG-2011;Clade II)__AIT17674__GPCmut5 (opt4)
aggagaguccgcucagccagguugcagaagcggcuuagcguguguccuaaucuucucucugcguguagguaggccugugccgcaaacaagcuuaccaugggccagaucaucaccuucuuccaggaggugccccacgugaucgaggaggugaugaacaucgugcugaucgcccugagccugcuggccauccugaagggcaucuacaacguggccaccugcggccuguucggccuggugagcuuccugcugcugugcggcagaagcugcagcaccaccuacaagggcguguacgagcugcagacccuggagcuggacaugaccaaccugaacaugaccaugccccugagcugcaccaagaacaacagccaccacuacaucauggugggcaacgagaccggccuggagcugacccugaccaacaccagcaucaucaaccacaaguucugcaaccugagcgacgcccacaagaagaaccuguacaaccacgcccugaugagcaucaucagcaccuuccaccugagcauccccaacuucaaccaguacgaggccaugagcugcgacuucaacggcggcaagaucagcgugcaguacaaccugagccacagcuacgccguggacgccgccaaccacugcggcaccaucgccaacggcgugcugcagaccuucaugagaauggccuggggcggcagcuacaucgcccuggacagcggcugcggcaacugggacugcaucaugaccagcuaccaguaccugaucauccagaacaccaccugggaggaccacugccaguucagcagacccagccccaucggcuaccugggccugcugagccagagaaccagagacaucuacaucagcagaagacugcugggcaccuucaccuggacccugagcgacagcgagggcaacgagacccccggcggcuacugccugaccagauggaugcugaucgaggccgagcugaagugcuucggcaacaccgccguggccaagugcaacgagaagcacgacgaggaguucugcgacaugcugagacuguucgacuucaacaagcaggccaucagaagacugaagacccccgcccaggccaacauccagcugaucaacaaggccgugaacgcccugaucaacgaccagcugaucaugaagaaccaccugagagacaucaugugcauccccuacugcaacuacagcaaguacugguaccugaaccacaccgugaccggcaagaccagccugcccagaugcuggcuggugagcaacggcagcuaccugaacgagacccacuucagcgacgacaucgagcagcaggccgacaacaugaucaccgagcugcugcagaaggaguacauggacagacagggcaagaccccccugggccugguggaccuguucguguucagcaccagcuucuaccugaucagcaucuuccugcaccuggugaagauccccacccacagacacgugaucggcaagcccugccccaagccccacagacugaaccacaugggcaucugcagcugcggccuguacaagcaccccggcgugcccgugaaguggaagagaugaggacuagucccuguucccagagcccacuuuuuuuucuuuuuuugaaauaaaauagccugucuuucagaucucaaaggcucuuuucagagccaccaaaaaaaaaaaaaaaaaaaaaaaaaaaaaaaaaaaaaaaaaaaaaaaaaaaaaaaaaaaaaaaaagaauu

SEQ ID NO: 28666 - RNA, 1733 nt, Artificial Sequence
  mRNA product Design a-2 (hSL-A64-N5) comprising derived and/or modified sequence from LASV(Nig08-A19;Clade III)__ADU56618__GPCmut5 (opt4)
aggagaguccgcucagccagguugcagaagcggcuuagcguguguccuaaucuucucucugcguguagguaggccugugccgcaaacaagcuuaccaugggccagaucgugaccuucuuccaggaggugccccacgugaucgaggaggugaugaacaucgugcugaucgcccugagcauccuggccauccugaagggccuguacaacaucgccaccugcggccugaucggccuggugaccuuccugcugcugagcggcagaagcugcagcaugaccuacaagggcguguacgagcugcagacccuggagcugaacaugaacacccugaacaugaccaugccccugagcugcaccaagaacaacagccaccacuacaucauggugggcaacgagaccggccuggagcugacccugaccaacaccagccugcugcaccacaaguucugcaaccugagcgacgcccacaagaagaaccuguacgaccacacccugaugagcaucaucagcaccuuccaccugagcauccccaacuucaaccaguacgaggccaugagcugcgacuucaacggcggcaagaucaccgugcaguacaaccugagccacagcuacgccaucgacgccgccaaccacugcggcaccguggccaacggcgugcugcagaccuucaugagaauggccuggggcggcagcuacaucgcccuggacagcggcugcggcaagugggacugcaucaugaccagcuaccaguaccugaucauccagaacaccaccugggaggaccacugccaguucagcagacccagccccaucggcuaccugggccugcugagccagagaaccagagacaucuacaucagcagaagacugcugggcaccuucaccuggacccugagcgacagcgagggcaacgagacccccggcggcuacugccugaccagauggaugcugaucgaggccgagcugaagugcuucggcaacaccgccguggccaagugcaacgagaagcacgacgaggaguucugcgacaugcugagacuguucgacuucaacaagcaggccaucagaagacugaaggcccccgcccagaugagcauccagcugaucaacaaggccgugaacgcccugaucaacgaccagcugaucaugaagaaccaccugagagacaucaugugcauccccuacugcaacuacagcaaguacugguaccugaaccacaccagcaccggcagaaccagccugcccagaugcuggcuggugagcaacggcagcuaccugaacgagacccacuucagcgacgacaucgagcagcaggccgacaacaugaucaccgagaugcugcagaaggaguaccuggacagacagggcaagaccccccugggccugguggaccuguucguguucagcaccagcuucuaccugaucagcaucuuccugcaccuggugaagauccccacccacagacacaucgugggcaagcccugccccaagccccacagacugaaccacaugggcaucugcagcugcggccuguacaagcagcccggcgugcccgugagauggaagagaugaggacuagucccuguucccagagcccacuuuuuuuucuuuuuuugaaauaaaauagccugucuuucagaucucaaaggcucuuuucagagccaccaaaaaaaaaaaaaaaaaaaaaaaaaaaaaaaaaaaaaaaaaaaaaaaaaaaaaaaaaaaaaaaaagaauu

SEQ ID NO: 28667 - RNA, 1736 nt, Artificial Sequence
  mRNA product Design a-2 (hSL-A64-N5) comprising derived and/or modified sequence from LASV(G1180-SLE-2010;Clade IV)__AIT17168__GPCmut5 (opt4)
aggagaguccgcucagccagguugcagaagcggcuuagcguguguccuaaucuucucucugcguguagguaggccugugccgcaaacaagcuuaccaugggccagaucgugaccuucuuccaggaggugccccacgugaucgaggaggugaugaacaucgugcugaucgcccugagcauccuggccgugcugaagggccuguacaacuucgccaccugcggccuggugggccugcugaccuuccugcugcugugcggcagaagcugcaccgccagcagauacaagggcguguacgagcugcagacccuggagcugaacauggagacccugaacaugaccaugccccugagcugcaccaagaacaacagccaccacuacaucauggugggcaacgagaccggccuggagcugacccugaccaacaccagcaucaucaaccacaaguucugcaaccugagcgacgcccacaagaagaaccuguacgaccacgcccugaugagcaucaucagcaccuuccaccugagcauccccaacuucaaccaguacgaggccaugagcugcgacuucaacggcggcaagaucagcgugcaguacaaccugagccacagcuacgccggcgacgccgccaaccacugcggcaccguggccaacggcgugcugcagaccuucaugagaauggccuggggcggcagcuacaucgcccuggacagcggcugcggcagcugggacugcaucaugaccagcuaccaguaccugaucauccagaacaccaccugggaggaccacugccaguucagcagacccagccccaucggcuaccugggccugcugagccagagaaccagagacaucuacaucagcagaagacugcugggcaccuucaccuggacccugagcgacagcgagggcaaggacacccccggcggcuacugccugaccagauggaugcugaucgaggccgagcugaagugcuucggcaacaccgccguggccaagugcaacgagaagcacgacgaggaguucugcgacaugcugagacuguucgacuucaacaagcaggccauccagagacugaaggcccccgcccagaugagcauccagcugaucaacaaggccgugaacgcccugaucaacgaccagcugaucaugaagaaccaccugagagacaucaugugcauccccuacugcaacuacagcaaguacugguaccugaaccacaccaccaccggcaagaccagccugcccaagugcuggcuggugagcaacggcagcuaccugaacgagacccacuucagcgacgacaucgagcagcaggccgacaacaugaucaccgagaugcugcagaaggaguacauggagagacagggcaagaccccccugggccugguggaccuguucguguucagcaccagcuucuaccugaucagcaucuuccugcaccuggugaagauccccacccacagacacaucgugggcaagagcugccccaagccccacagacugaaccacaugggcaucugcagcugcggccuguacaagcagcccggcgugcccgugaaguggaagagaugaggacuagucccuguucccagagcccacuuuuuuuucuuuuuuugaaauaaaauagccugucuuucagaucucaaaggcucuuuucagagccaccaaaaaaaaaaaaaaaaaaaaaaaaaaaaaaaaaaaaaaaaaaaaaaaaaaaaaaaaaaaaaaaaagaauu

SEQ ID NO: 28668 - RNA, 1736 nt, Artificial Sequence
  mRNA product Design a-2 (hSL-A64-N5) comprising derived and/or modified sequence from LASV(G1442-SLE-2011;Clade IV)__AIT17180__GPCmut5 (opt4)
aggagaguccgcucagccagguugcagaagcggcuuagcguguguccuaaucuucucucugcguguagguaggccugugccgcaaacaagcuuaccaugggccagaucgugaccuucuuccaggaggugccccacgugaucgaggaggugaugaacaucgugcugaucgcccugagcauccuggccgugcugaagggccuguacaacguggccaccugcggccugaucggccuggugaccuuccugcugcugugcggcagaagcugcaccaccacccuguacaagggcguguacgagcugcagacccuggagcugaacauggagacccugaacaugaccaugccccugagcugcaccaagaacaacagccaccacuacaucagagugggcaacgagaccggccuggagcugacccugaccaacaccagcaucaucaaccacaaguucugcaaccugagcgacgcccacaagaagaaccuguacgaccacgcccugaugagcaucaucagcaccuuccaccugagcauccccaacuucaaccaguacgaggccaugagcugcgacuucaacggcggcaagaucagcgugcaguacaaccugagccacagcuacgccggcgacgccgccaaccacugcggcaccguggccaacggcgugcugcagaccuucaugagaauggccuggggcggcagcuacaucgcccuggacagcggcugcggcaacugggacugcaucaugaccagcuaccaguaccugaucauccagaacaccaccugggacgaccacugccaguucagcagacccagccccaucggcuaccugggccugcugagccagagaaccagagacguguacaucagcagaagacugcugggcaccuucaccuggacccugagcgacagcgagggcaaggacacccccggcggcuacugccugaccagauggaugcugaucgaggccgagcugaagugcuucggcaacaccgccguggccaagugcaacgagaagcacgacgaggaguucugcgacaugcugagacuguucgacuucaacaagcaggccauccagagacugaaggcccccgcccagaugagcauccagcugaucaacaaggccgugaacgcccugaucaacgaccagcugaucaugaagaaccaccugagagacaucaugugcauccccuacugcaacuacagcaaguacugguaccugaacaacaccgccaccggcaagaccagccugcccaagugcuggcugaucagcaacggcagcuaccugaacgagacccacuucagcgacgacaucgagcaggaggccgacaacaugaucaccgagaugcugcagaaggaguacauggagagacagggcaagaccccccugggccugguggaccuguucguguucagcaccagcuucuaccugaucagcaucuuccugcaccuggugaagauccccacccacagacacaucgugggcaagagcugccccaagccccacagacugaaccacaugggcaucugcagcugcggccuguacaagcagcccggcgugcccgugagauggaagagaugaggacuagucccuguucccagagcccacuuuuuuuucuuuuuuugaaauaaaauagccugucuuucagaucucaaaggcucuuuucagagccaccaaaaaaaaaaaaaaaaaaaaaaaaaaaaaaaaaaaaaaaaaaaaaaaaaaaaaaaaaaaaaaaaagaauu

SEQ ID NO: 28669 - RNA, 1736 nt, Artificial Sequence
  mRNA product Design a-2 (hSL-A64-N5) comprising derived and/or modified sequence from LASV(G3010-SLE-2013;Clade IV)__AIT17344__GPCmut5 (opt4)
aggagaguccgcucagccagguugcagaagcggcuuagcguguguccuaaucuucucucugcguguagguaggccugugccgcaaacaagcuuaccaugggccagaucgugaccuucuuccaggaggugccccacgugaucgaggaggugaugaacaucgugcugaucgcccugagcauccuggccgugcugaagggccuguacaacuucgccaccugcggccuggugggccuggugaccuuccugcugcugugcggcagaagcugcaccaccagccuguacaagggcguguacgagcugcagacccuggagcugaacauggagacccugaacaugaccaugccccugagcugcaccaagaacaacagccaccacuacaucauggugggcaacgagaccggccuggagcugacccugaccaacaccagcaucaucaaccacaaguucugcaaccugagcgacgcccacaagaagaaccuguacaaccacgcccugaugagcaucaucagcaccuuccaccugagcauccccaacuucaaccaguacgaggccaugagcugcgacuucaacggcggcaagaucagcgugcaguacaaccugagccacagcuacgccggcgacgccgccagccacugcggcaccguggccaacggcgugcugcagaccuucaugagaauggccuggggcggcagcuacaucgcccuggacagcggcugcggcaagugggacugcaucaugaccagcuaccaguaccugaucauccagaacaccaccugggaggaccacugccaguucagcagacccagccccaucggcuaccugggccugcugagccagagaaccagagacaucuacaucagcagaagacugcugggcaccuucaccuggacccugagcgacagcgagggcaaggacacccccggcggcuacugccugaccagauggaugcugaucgaggccgagcugaagugcuucggcaacaccgccguggccaagugcaacgagaagcacgacgaggaguucugcgacaugcugagacuguucgacuucaacaagcaggccauccagagacugaagacccccgcccagaugagcauccagcugaucaacaaggccgugaacgcccugaucaacgaccagcugaucaugaagaaccaccugagagacaucaugugcauccccuacugcaacuacagcaaguacugguaccugaaccacaccaccaccggcaagaccagccugcccaagugcuggcuggugagcaacggcagcuaccugaacgagacccacuucagcgacgacaucgagcagcaggccgacaacaugaucaccgagaugcugcagaaggaguacauggagagacagggcaagaccccccugggccugguggaccuguucguguucagcaccagcuucuaccugaucagcaucuuccugcaccuggugaagauccccacccacagacacaucgugggcaagagcugccccaagccccacagacugaaccacaugggcaucugcagcugcggccuguacaagcagcccggcgugcccgugagauggaagagaugaggacuagucccuguucccagagcccacuuuuuuuucuuuuuuugaaauaaaauagccugucuuucagaucucaaaggcucuuuucagagccaccaaaaaaaaaaaaaaaaaaaaaaaaaaaaaaaaaaaaaaaaaaaaaaaaaaaaaaaaaaaaaaaaagaauu

SEQ ID NO: 28670 - RNA, 1736 nt, Artificial Sequence
  mRNA product Design a-2 (hSL-A64-N5) comprising derived and/or modified sequence from LASV(G502-SLE-2009;Clade IV)__AIT17126__GPCmut5 (opt4)
aggagaguccgcucagccagguugcagaagcggcuuagcguguguccuaaucuucucucugcguguagguaggccugugccgcaaacaagcuuaccaugggccagaucgugaccuucuuccaggaggugccccacgugaucgaggaggugaugaacaucgugcugaucgcccugagcauccuggccgugcugaagggccuguacaacuucgccaccugcggccuggugggccugcugaccuuccugcugcugugcggcagaagcugcaccaccggccuguacaagggcguguacgagcugcagacccuggagcugaacauggagacccugaacaugaccaugccccugagcugcaccaagaacaacagccaccacuacaucauggugggcaacgagaccggccuggagcugacccugaccaacaccagcaucaucaaccacaaguucugcaaccugagcgacgcccacaagaagaaccuguacgaccacgcccugaugagcaucaucagcaccuuccaccugagcauccccaacuucaaccaguacgaggccaugagcugcgacuucaacggcggcaagaucagcgugcaguacaaccugagccacagcuacgccggcgacgccgccgaccacugcggcaccguggccaacggcgugcugcagaccuucaugagaauggccuggggcggcagcuacaucgcccuggacagcggcugcggcagaugggacugcaucaugaccagcuaccaguaccugaucauccagaacaccaccugggaggaccacugccaguucagcagacccagccccaucggcuaccugggccugcugagccagagaaccagagacaucuacaucagcagaagacugcugggcaccuucaccuggacccugagcgacagcgagggcaaggacacccccggcggcuacugccugaccagauggaugcugaucgaggccgagcugaagugcuucggcaacaccgccguggccaagugcaacgagaagcacgacgaggaguucugcgacaugcugagacuguucgacuucaacaagcaggccauccagagacugaaggcccccgcccagaugagcauccagcugaucaacaaggccgugaacgcccugaucaacgaccagcuggugaugaagaaccaccugagagacaucaugugcauccccuacugcaacuacagcagauacugguaccugaaccacaccaccaccggcagaaccagccugcccaagugcuggcuggugagcaacggcagcuaccugaacgagacccacuucagcgacgacaucgagcagcaggccgacaacaugaucaccgagaugcugcagaaggaguacauggagagacagggcaagaccccccugggccugguggaccuguucguguucagcaccagcuucuaccugaucagcaucuuccugcaccuggugaagauccccacccacagacacaucgugggcaagagcugccccaagccccacagacugaaccacaugggcaucugcagcugcggccuguacaagcagcccggcgugcccgugaaguggaagagaugaggacuagucccuguucccagagcccacuuuuuuuucuuuuuuugaaauaaaauagccugucuuucagaucucaaaggcucuuuucagagccaccaaaaaaaaaaaaaaaaaaaaaaaaaaaaaaaaaaaaaaaaaaaaaaaaaaaaaaaaaaaaaaaaagaauu

SEQ ID NO: 28671 - RNA, 1736 nt, Artificial Sequence
  mRNA product Design a-2 (hSL-A64-N5) comprising derived and/or modified sequence from LASV(G733-SLE-2010;Clade IV)__AIT17154__GPCmut5 (opt4)
aggagaguccgcucagccagguugcagaagcggcuuagcguguguccuaaucuucucucugcguguagguaggccugugccgcaaacaagcuuaccaugggccagaucgugaccuucuuccaggaggugccccacgugaucgaggaggugaugaacaucgugcugaucgcccugagcauccuggccgugcugaagggccuguacaacuucgccaccugcggcaucgugggccuggugagcuuccugcugcugugcggcagaagcugcaccaccagccuguacaagggcguguacgagcugcagacccuggagcugaacauggagacccugaacaugaccaugccccugagcugcaccaagaacaacagccaccacuacaucauggugggcaacgagaccggccuggagcugacccugaccaacaccagcaucaucaaccacaaguucugcaaccugagcgacgcccacaagaagaaccuguacgaccacgcccugaugagcaucaucagcaccuuccaccugagcauccccaacuucaaccaguacgaggccaugagcugcgacuucaacggcggcaagaucagcgugcaguacaaccugagccacagcuacgccggcgacgccgccaaccacugcggcaccaucgccaacggcgugcugcagaccuucaugagaauggccuggggcggcagcuacaucgcccuggacagcggcugcgacagaugggacugcaucaugaccagcuaccaguaccugaucauccagaacaccaccugggaggaccacugccaguucagcagacccagccccaucggcuaccugggccugcugagccagagaaccagagacaucuacaucagcagaagacugcugggcaccuucaccuggacccugagcgacagcgagggcaaggacacccccggcggcuacugccugaccagauggaugcugaucgaggccgagcugaagugcuucggcaacaccgccguggccaagugcaacgagaagcacgacgaggaguucugcgacaugcugagacuguucgacuucaacaagcaggccauccagagacugaaggcccccgcccagaugagcauccagcugaucaacaaggccgugaacgcccugaucaacgaccagcugaucaugaagaaccaccugagagacaucaugugcauccccuacugcaacuacagcaaguacugguaccugaaccacaccaccaccggcaagaccagccugcccaagugcuggcuggugagcaacggcagcuaccugaacgagacccacuucagcgacgacaucgagcagcaggccgacaacaugaucaccgagaugcugcagaaggaguacauggagagacagggcaagaccccccugggccugguggaccuguucguguucagcaccagcuucuaccugaucagcaucuuccugcaccuggugaagauccccacccacagacacguggugggcaagagcugccccaagccccacagacugaaccacaugggcaucugcagcugcggccuguacggccagcccggcgugcccgugaaguggaagagaugaggacuagucccuguucccagagcccacuuuuuuuucuuuuuuugaaauaaaauagccugucuuucagaucucaaaggcucuuuucagagccaccaaaaaaaaaaaaaaaaaaaaaaaaaaaaaaaaaaaaaaaaaaaaaaaaaaaaaaaaaaaaaaaaagaauu

SEQ ID NO: 28672 - RNA, 1736 nt, Artificial Sequence
  mRNA product Design a-2 (hSL-A64-N5) comprising derived and/or modified sequence from MOPV/LASV reassortant(IGS-1;Clade IV)__AFY05576__GPCmut5 (opt4)
aggagaguccgcucagccagguugcagaagcggcuuagcguguguccuaaucuucucucugcguguagguaggccugugccgcaaacaagcuuaccaugggccagaucgugaccuucuuccaggaggugccccacgugaucgaggaggugaugaacaucgugcugaucgcccugagcgugcuggccgugcugaagggccuguacaacuucgccaccugcggccuggugggccuggugaccuuccugcugcugugcggcagaagcugcaccaccagccuguacaagggcguguacgagcugcagacccuggagcugaacauggagacccugaacaugaccaugccccugagcugcaccaagaacaacagccaccacuacaucauggugggcaacgagaccggccuggagcugacccugaccaacaccagcaucaucaaccacaaguucugcaaccugagcgacgcccacaagaagaaccuguacgaccacgcccugaugagcaucaucagcaccuuccaccugagcauccccaacuucaaccaguacgaggccaugagcugcgacuucaacggcggcaagaucagcgugcaguacaaccugagccacagcuacgccggcgacgccgccaaccacugcggcaccguggccaacggcgugcugcagaccuucaugagaauggccuggggcggcagcuacaucgcccuggacagcggcugcggcaacugggacugcaucaugaccagcuaccaguaccugaucauccagaacaccaccugggaggaccacugccaguucagcagacccagccccaucggcuaccugggccugcugagccagagaaccagagacaucuacaucagcagaagacugcugggcaccuucaccuggacccugagcgacagcgagggcgaggacacccccggcggcuacugccugaccagauggaugcugaucgaggccgagcugaagugcuucggcaacaccgccguggccaagugcaacgagaagcacgacgaggaguucugcgacaugcugagacuguucgacuucaacaagcaggccauccagagacugaaggcccccgcccagaugagcauccagcugaucaacaaggccgugaacgcccugaucaacgaccagcugaucaugaagaaccaccugagagacaucaugugcauccccuacugcaacuacagcaaguacugguaccugaaccacaccaccaccggcagaaccagccugcccaagugcuggcuggugagcaacggcagcuaccugaacgagacccacuucagcgacgacaucgagcagcaggccgacaacaugaucaccgagaugcugcagaaggaguacauggagagacagggcaagaccccccugggccugguggaccuguucguguucagcaccagcuucuaccugaucagcaucuuccugcaccuggugaagauccccacccacagacacaucgugggcaagagcugccccaagccccacagacugaaccacaugggcaucugcagcugcggccuguacaagcagcccggcgugcccgugaaguggaagagaugaggacuagucccuguucccagagcccacuuuuuuuucuuuuuuugaaauaaaauagccugucuuucagaucucaaaggcucuuuucagagccaccaaaaaaaaaaaaaaaaaaaaaaaaaaaaaaaaaaaaaaaaaaaaaaaaaaaaaaaaaaaaaaaaagaauu

SEQ ID NO: 28673 - RNA, 1736 nt, Artificial Sequence
  mRNA product Design a-2 (hSL-A64-N5) comprising derived and/or modified sequence from LASV(LM765-SLE-2012;Clade IV)__AIT17814__GPCmut5 (opt4)
aggagaguccgcucagccagguugcagaagcggcuuagcguguguccuaaucuucucucugcguguagguaggccugugccgcaaacaagcuuaccaugggccagaucgugaccuucuuccaggaggugccccacgugaucgaggaggugaugaacaucgugcugaucgcccugagcauccuggccgugcugaagggccuguacaacuucgccaccugcggccuggugggccuggugaccuuccugcugcugugcggcagaagcugcaccaccagccuguacaagggcguguacgagcugcagacccuggagcugaacauggagacccugaacaugaccaugccccugagcugcaccaagaacaacagccaccacuacaucauggugggcaacgagaccggccuggagcugacccugaccaacaccagcaucaucgaccacaaguucugcaaccugagcgacgcccacagaaagaaccuguacgaccacgcccugaugagcaucaucagcaccuuccaccugagcauccccaacuucaaccaguacgaggccaugagcugcgacuucaacggcggcaagaucagcgugcaguacaaccugagccacagcuacgccaaggacgccgccgaccacugcggcaccguggccaacggcgugcugcagaccuucaugagaauggccuggggcggcagcuacaucgcccuggacagcggcugcggcagaugggacugcaucaugaccagcuaccaguaccugaucauccagaacaccaccugggaggaccacugccaguucagcagacccagccccaucggcuaccugggccugcugagccagagaaccagagacaucuacaucagcagaagacugcugggcaccuucaccuggacccugagcgacagcgagggcaaggacacccccggcggcuacugccugaccagauggaugcugaucgaggccgagcugaagugcuucggcaacaccgccguggccaagugcaacgagaagcacgacgaggaguucugcgacaugcugagacuguucgacuucaacaagcaggccauccagagacugaaggcccccgcccagaugagcauccagcugaucaacaaggccgugaacgcccugaucaacgaccagcugaucaugaagaaccaccugagagacaucaugugcauccccuacugcaacuacagcaaguacugguaccugaaccacaccaccaccggcaagaccagccugcccaagugcuggcuggugagcaacggcagcuaccugaacgagacccacuucagcgacgacaucgagcagcaggccgacaacaugaucaccgagaugcugcagaaggaguacauggagagacagggcaagaccccccugggccugguggaccuguucguguucagcaccagcuucuaccugaucagcaucuuccugcaccuggugaagauccccacccacagacacaucgugggcaagcccugccccaagccccacagacugaaccacaugggcaucugcagcugcggccuguacaagcagcccggcgugcccgugaaguggaagagaugaggacuagucccuguucccagagcccacuuuuuuuucuuuuuuugaaauaaaauagccugucuuucagaucucaaaggcucuuuucagagccaccaaaaaaaaaaaaaaaaaaaaaaaaaaaaaaaaaaaaaaaaaaaaaaaaaaaaaaaaaaaaaaaaagaauu

SEQ ID NO: 28674 - RNA, 1736 nt, Artificial Sequence
  mRNA product Design a-2 (hSL-A64-N5) comprising derived and/or modified sequence from LASV(LM776-SLE-2012;Clade IV)__AIT17824__GPCmut5 (opt4)
aggagaguccgcucagccagguugcagaagcggcuuagcguguguccuaaucuucucucugcguguagguaggccugugccgcaaacaagcuuaccaugggccagaucgugaccuucuuccaggaggugccccacgugaucgaggaggugaugaacaucgugcugaucgcccugagcauccuggccgugcugaagggccuguacaacuucgccaccugcggccuggugggccuggugaccuuccugcugcugugcggcagaagcugcaccaccagcguguacaagggcguguacgagcugcagacccuggagcugaacauggagacccugaacaugaccaugccccugagcugcaccaagaacaacagccaccacuacaucauggugggcaacgagaccggccuggagcugacccugaccaacaccagcaucaucaaccacaaguucugcaaccugagcgacgcccacaagaagaaccuguacgaccacgcccugaugagcaucaucagcaccuuccaccugagcauccccaacuucaaccaguacgaggccaugagcugcgacuucaacggcggcaagaucagcgugcaguacaaccugagccacagcuacgccggcgacgccgccaaccacugcggcaccguggccaacggcgugcugcagaccuucaugagaauggccuggggcggcagcuacaucgcccuggacagcggcugcggcaagugggacugcaucaugaccagcuaccaguaccugaucauccagaacaccaccugggaggaccacugccaguucagcagacccagccccaucggcuaccugggccugcugagccagagaaccagagacaucuacaucagcagaagacugcugggcaccuucaccuggacccugagcgacagcgagggcaaggacacccccggcggcuacugccugaccagauggaugcugaucgaggccgagcugaagugcuucggcaacaccgccguggccaagugcaacgagaagcacgacgaggaguucugcgacaugcugagacuguucgacuucaacaagcaggccauccagagacugaaggcccccgcccagaugagcauccagcugaucaacaaggccgugaacgcccugaucaacgaccagcugaucaugaagaaccaccugagagacaucaugugcauccccuacugcaacuacagcaaguacugguaccugaaccacaccaccaccggcaagaccagccugcccaagugcuggcuggugagcaacggcagcuaccugaacgagacccacuucagcgacgacaucgagcagcaggccgacaacaugaucaccgagaugcugcagaaggaguacauggagagacagggcaagaccccccugggccugguggaccuguucguguucagcaccagcuucuaccugaucagcaucuuccugcaccuggugaagauccccacccacagacacaucgugggcaagagcugccccaagccccacagacugaaccacaugggcaucugcagcugcggccuguacaagcagcccggcgugcccgugagauggaagagaugaggacuagucccuguucccagagcccacuuuuuuuucuuuuuuugaaauaaaauagccugucuuucagaucucaaaggcucuuuucagagccaccaaaaaaaaaaaaaaaaaaaaaaaaaaaaaaaaaaaaaaaaaaaaaaaaaaaaaaaaaaaaaaaaagaauu

SEQ ID NO: 28675 - RNA, 1736 nt, Artificial Sequence
  mRNA product Design a-2 (hSL-A64-N5) comprising derived and/or modified sequence from LASV(Mad39;Clade IV)__ANH09722__GPCmut5 (opt4)
aggagaguccgcucagccagguugcagaagcggcuuagcguguguccuaaucuucucucugcguguagguaggccugugccgcaaacaagcuuaccaugggccagaucgugaccuucuuccaggaggugccccacgugaucgaggaggugaugaacaucgugcugaucgcccugagcauccuggccgugcugaagggccuguacaacguggccaccugcggccugaucggccuggugaccuuccugcugcugugcggcagaagcugcaccaccacccuguacaagggcguguacgagcugcaggcccuggagcugaacauggagacccugaacaugaccaugccccugagcugcaccaagaacaacagccaccacuacaucagagugggcaacgagaccggccuggagcugacccugaccaacaccagccugaucaaccacaaguucugcaaccugagcgacgcccacaagaagaaccuguacgaccacgcccugaugagcaucaucagcaccuuccaccugagcauccccaacuucaaccaguacgaggccaugagcugcgacuucaacgacggcaagaucagcgugcaguacaaccugagccacaccuacgccggcgacaccgccaaccacugcggcaccguggccaacggcgugcugcagaccuucaugagaauggccuggggcggcagcuacaucgcccuggacagcggcugcggcggcugggacugcaucaugaccagcuaccaguaccugaucauccagaacaccaccugggaggaccacugccaguucagcagacccagccccaucggcuaccugggccugcugagccagagaaccagagacaucuacaucagcagaagacugcugggcaccuucaccuggacccugagcgacagcgagggcaaggacacccccggcggcuacugccugaccagauggaugcugaucgaggccgagcugaagugcuucggcaacaccgccguggccaagugcaacgagaagcacgacgaggaguucugcgacaugcugagacuguucgacuucaacaagcaggccauccagagacugaaggcccccgcccagaugagcauccagcugaucaacaaggccgugaacgcccugaucaacgaccagcugaucaugaagaaccaccugagagacaucaugugcauccccuacugcaacuacagcaaguacugguaccugaaccacaccgugaccggcaagaccagccugcccaagugcuggcuggugagcaacggcagcuaccugaacgagacccacuucagcgacgacaucgagcagcaggccgacaacaugaucaccgagaugcugcagaaggaguacauggagagacagggcaagaccccccugggccugguggaccuguucguguucagcaccagcuucuaccugaucagcaucuuccugcaccuggugaagauccccacccacagacacguggugggcaagcccugccccaagccccacagacugaaccacaugggcaucugcagcugcggcuucuacaagcagcccggcgugcccgugagauggaagagaugaggacuagucccuguucccagagcccacuuuuuuuucuuuuuuugaaauaaaauagccugucuuucagaucucaaaggcucuuuucagagccaccaaaaaaaaaaaaaaaaaaaaaaaaaaaaaaaaaaaaaaaaaaaaaaaaaaaaaaaaaaaaaaaaagaauu

SEQ ID NO: 28676 - RNA, 1736 nt, Artificial Sequence
  mRNA product Design a-2 (hSL-A64-N5) comprising derived and/or modified sequence from LASV(Z0947-SLE-2011;Clade IV)__AIT17840__GPCmut5 (opt4)
aggagaguccgcucagccagguugcagaagcggcuuagcguguguccuaaucuucucucugcguguagguaggccugugccgcaaacaagcuuaccaugggccagaucgugaccuucuuccaggaggugccccacgugaucgaggaggugaugaacaucgugcugaucgcccugagcauccuggccgugcugaagggccuguacaacuucgccaccugcggccuggugggccuggugaccuuccugcugcugugcggcagaagcugcaccaucagccuguacaagggcguguacgagcugcagacccuggagcugaacauggagacccugaacaugaccaugccccugagcugcaccaagaacaacagccaccacuacaucauggugggcaacgagaccggccuggagcugacccugaccaacaccagcaucaucaaccacaaguucugcaaccugagcgacgcccacaagaagaaccuguacgaccacgcccugaugagcaucaucagcaccuuccaccugagcauccccaacuucaaccaguacgaggccaugagcugcgacuucaacggcggcaagaucagcgugcaguacaaccugagccacagcuacgccggcgacgccgccaaccacugcggcaccguggccaacggcgugcugcagaccuucaugagaauggccuggggcggcagcuacaucgcccuggacagcggcugcgacagaugggacugcaucaugaccagcuaccaguaccugaucauccagaacaccaccugggaggaccacugccaguucagcagacccagccccaucggcuaccugggccugcugagccagagaaccagagacaucuacaucagcagaagacugcugggcaccuucaccuggacccugagcgacagcgagggcaaggacacccccggcggcuacugccugaccagauggaugcugaucgaggccgagcugaagugcuucggcaacaccgccguggccaagugcaacgagaagcacgacgaggaguucugcgacaugcugagacuguucgacuucaacaagcaggccauccagagacugaaggcccccgcccagaugagcauccagcugaucaacaaggccgugaacgcccugaucaacgaccagcugaucaugaagaaccaccugagagacaucaugugcauccccuacugcaacuacagcaaguacugguaccugaaccacaccaccaccggcaagaccagccugcccaagugcuggcuggugagcaacggcagcuaccugaacgagacccacuucagcgacgacaucgagcagcaggccgacaacaugaucaccgagaugcugcagaaggaguacauggagagacagggcaagaccccccugggccugguggaccuguucguguucagcaccagcuucuaccugaucagcaucuuccugcaccuggugaagauccccacccacagacacaucgugggcaagcccugccccaagccccacagacugaaccacaugggcaucugcagcugcggccuguacaagcagcccggcgugcccgugaaguggaagagaugaggacuagucccuguucccagagcccacuuuuuuuucuuuuuuugaaauaaaauagccugucuuucagaucucaaaggcucuuuucagagccaccaaaaaaaaaaaaaaaaaaaaaaaaaaaaaaaaaaaaaaaaaaaaaaaaaaaaaaaaaaaaaaaaagaauu

SEQ ID NO: 28677 - RNA, 1736 nt, Artificial Sequence
  mRNA product Design a-2 (hSL-A64-N5) comprising derived and/or modified sequence from LASV(Josiah;Clade IV)__NP_694870__GPCmut5 (opt5)
aggagaguccgcucagccagguugcagaagcggcuuagcguguguccuaaucuucucucugcguguagguaggccugugccgcaaacaagcuuaccaugggccagaucgugaccuucuuucaagaggucccccacguuauugaagaggugaugaacaucgugcugauugcccucagcguccuggcugugcuuaaggggcuguacaauuucgccacaugcggacucguuggccuggugacguuucuucugcucugugggagauccugcaccacaucucuguauaaaggagucuacgaacugcagacccucgagcugaacauggaaacacuuaauaugaccaugccucugagcuguacaaagaacaauucccaucacuauaucauggugggcaacgagaccgggcucgagcugacgcuuaccaauacaucuauuaucaaccauaaauucugcaaucugagcgacgcgcacaagaaaaaccucuacgaucaugcucugauguccaucauuucuaccuuucaccugagcaucccgaauuucaaccaguaugaagccauguccugugacuuuaauggaggcaagauuagcguucaguacaaccucucucacuccuaugccggcgaugcugccaaucauugcgggacaguggcuaacggaguccugcaaaccuucaugcggauggccuggggcgggagcuacaucgcgcuugacucuggauguggcaacugggauugcauuaugacguccuaccaguaucugaucauucagaauacaaccugggaggaccacugucaguuuagccgccccucuccuaucggguaccucggacugcuuucccaaagaacacgggauaucuauauuagccgcagacugcucggcaccuucaccuggacacuguccgacucugaaggcaaggauacgcccgggggauacugccugacccgguggaugcucaucgaggccgagcugaaauguuuuggcaacacagcuguggccaagugcaaugaaaaacaugacgaggaguucugcgauaugcuucgccuguuugacuucaacaagcaggcuauucagagacucaaagccccugcgcagaugagcauccaacugauuaauaaggccgugaacgcucuuaucaaugaucagcugaucaugaagaaccaccuccgggacauuauguguauccccuauugcaauuacuccaaauauugguaccugaaccacaccacaaccgggcgcacgagccugccuaaguguuggcucgucucuaauggauccuaccugaacgaaacacauuucagcgacgauauugaacagcaagccgacaauaugaucaccgagaugcuucagaaagaguauauggaaagacagggcaagaccccgcuggggcucguugaucuguuuguguucucuaccagcuuuuaccugauuuccaucuuccuucaccucgugaaaauccccacacaucggcacauugucggaaagucuugcccuaaaccccaucgccugaaccacaugggcaucuguagcugcggccuguauaagcagccuggggugcccguuaaguggaaaagaugaggacuagucccuguucccagagcccacuuuuuuuucuuuuuuugaaauaaaauagccugucuuucagaucucaaaggcucuuuucagagccaccaaaaaaaaaaaaaaaaaaaaaaaaaaaaaaaaaaaaaaaaaaaaaaaaaaaaaaaaaaaaaaaaagaauu

SEQ ID NO: 28678 - RNA, 1733 nt, Artificial Sequence
  mRNA product Design a-2 (hSL-A64-N5) comprising derived and/or modified sequence from LASV(LP;Clade I)__AAF86701__GPCmut5 (opt5)
aggagaguccgcucagccagguugcagaagcggcuuagcguguguccuaaucuucucucugcguguagguaggccugugccgcaaacaagcuuaccaugggccagaucauuaccuucuuucaagaggugccccacgucaucgaagagguuaugaacauugugcugaucgcccucagccugcuugcuauucugaaggggcucuacaauaucgccacaugcggaaucauuggccugguggcguuccuuuuucugugugggaaauccugcucucucacgcugaagggaggcuaugaacugcagacccucgagcugaacauggaaacacuuaauaugaccaugccucugagcuguaccaaaaacuccucucaucacuacaucagagucgggaaugagacaggacucgagcugacacuuaccaacacgagcauuaucaaucauaaguucugcaaccuguccgacgcucacaaaaagaaucucuaugaucaugcccugaugucuauuaucagcaccuuucaccuguccauuccgaacuucaaucaguacgaagccaugagcugugacuuuaacggcggcaagaucucugugcaguauaaucucucccacagcuacgcuggggaugccgcugagcauugcggaacaguugccaacggcgugcugcaaaccuucaugcggauggcguggggagggcgcuauaucgcccuugacucuggcugugggaauugggauugcauuaugacauccuaccaguaccugaucauucagaacaccacgugggaagaccacugucaguuuagcagacccucuccuaucggauaucucggccugcuuucccaacggacacgcgauauuuacaucagcagacggcugcucggcaccuucacauggacccuguccgacucugaggggaacgagacccccggaggcuauugccugacacgcuggaugcucaucgaagcugagcugaaauguuuugggaauacggccgucgcuaagugcaacgaaaaacaugaugaggaguucugcgacaugcuuagacuguuugauuucaauaagcaggccauucggcgccucaaagcgccugcccagaugagcauccagcugauuaacaaggcugugaaugcccuuaucaacgaccaacugauuaugaagaaucaccucagagauaucauguguauccccuacugcaacuauuccaaauacugguaucugaaucacaccagcucuggacggacaucccugccuaaguguuggcucauuagcaacggcucuuaccugaaugaaacccaguucagcgacgacaucgagcagcaagcugauaacaugauuacagaaaugcuucagaaagaguacaucgaacgccaggggaagaccccgcugggacucguugacauuuuuaucuucuccacgucuuuuuaucugauuagcaucuuccugcaucuuaucaaaauucccacacacagacauaucgugggcaagccuugccccaaaccucaccggcucaaucauaugggcgucuguuccugcgggcuguacaagcaccccggagugccgaccaaguggaaacgcugaggacuagucccuguucccagagcccacuuuuuuuucuuuuuuugaaauaaaauagccugucuuucagaucucaaaggcucuuuucagagccaccaaaaaaaaaaaaaaaaaaaaaaaaaaaaaaaaaaaaaaaaaaaaaaaaaaaaaaaaaaaaaaaaagaauu

SEQ ID NO: 28679 - RNA, 1733 nt, Artificial Sequence
  mRNA product Design a-2 (hSL-A64-N5) comprising derived and/or modified sequence from LASV(803213;Clade II)__AAF86703__GPCmut5 (opt5)
aggagaguccgcucagccagguugcagaagcggcuuagcguguguccuaaucuucucucugcguguagguaggccugugccgcaaacaagcuuaccaugggccagaucauuaccuucuuucaagaggugccccacgucaucgaagagguuaugaacauugugcugaucgcccucagccugcuugcuauucugaaggggaucuacaauguggccacaugcggacucuucggccugaucuccuuucuucugcucugugggagaucuugcagcgucacguauaaaggaguguacgaacugcagacccuggagcucaacauggcgaaucugaacaugacaaugccucuuuccuguaccaagaauaacucucaucacuauauuaugguuggcaaugaaacagggcuggagcucacccugacaaacaccagcaucauuaaucauaaauucugcaaccuuuccgacgcucacaagaaaaaucuguacgaucaugcccucaugucuaucauuagcacguuucaccuguccaucccgaacuucaaucaguaugaggccaugagcugugacuuuaacggaggcaagauuucugugcaguacaaucugucccacagcuucgcugucgaugccgcuaaccauugcggcaccaucgccaacggggugcuccaaacauuuaugcggauggcguggggaggcucuuauaucgcccuggacuccggguguggaaauugggauugcauuaugaccagcuaccaguaccuuaucauucagaacacaaccugggaagaccacugucaguucucucgccccuccccuaucggcuaucuggggcuccugagccaaagaacgcgggauauuuacaucucccgcagacuucugggaacauuuaccuggacacucucugacagcgagggcaaugaagcucccggcggguauugccugacccgguggaugcugaucgaggccgagcucaaguguuucggaaacaccgcuguugccaaaugcaaugaaaagcaugaugaggaauuuugcgacaugcugcgccuuuucgauuucaacaaacaggcgauuaagagacugaaaacgccugcccagauguccauccagcucauuaauaaggcugugaacgcccugaucaaugaccaacuuauuaugaagaaccaucugcgggauaucauguguauccccuacugcaauuauagccgcuacugguaucucaaccacacagucaccggcaaaacaucucugccuagauguuggcugguguccaaugggagcuaccucaacgagacccacuuuucugacgacauugaacagcaggcugauaauaugaucacagagaugcugcaaaaggaguacauggaccggcagggaaaaaccccgcuuggccugguggaucucuucgucuuuagcacguccuucuaucugauuucuaucuuucugcaccuuguuaagauucccacacaucgccacaucguggggaaaccuugccccaagccucauagacucaaccacaugggaauuuguagcugcggccuguacaaacaccccggcgugccggucaaguggaagcggugaggacuagucccuguucccagagcccacuuuuuuuucuuuuuuugaaauaaaauagccugucuuucagaucucaaaggcucuuuucagagccaccaaaaaaaaaaaaaaaaaaaaaaaaaaaaaaaaaaaaaaaaaaaaaaaaaaaaaaaaaaaaaaaaagaauu

SEQ ID NO: 28680 - RNA, 1733 nt, Artificial Sequence
  mRNA product Design a-2 (hSL-A64-N5) comprising derived and/or modified sequence from LASV(GA391;Clade III)__CAA36645__GPCmut5 (opt5)
aggagaguccgcucagccagguugcagaagcggcuuagcguguguccuaaucuucucucugcguguagguaggccugugccgcaaacaagcuuaccaugggccagaucgugaccuucuuucaagaggucccccacguuauugaagaggugaugaacaucgugcugauugcccucagcauccuggcuauucuuaaggggcuguacaaugucgccacaugcggacucaucggccuggugacguuccuucugcucuccgggagaucuuguagccugaucuauaaaggaaccuacgaacugcagacacucgagcugaacauggaaacccuuaauaugacaaugccucuguccugcaccaagaacaauucucaucacuauauucggguuggcaacgagacagggcucgagcugacccuuacgaauaccagcauccugaaccauaaauuuuguaaucucuccgacgcgcacaagcgcaaccuguacgaucauucucugaugagcauuaucuccacauuccaccucagcauuccgaauuuuaaccaguaugaagcuaugucuugcgacuucaauggaggcaaaaucaccgugcaguacaaccugucccacagcuuugccgucgaugccgcuggccauugugggacacuugccaauggagugcugcaaaccuucaugagaauggcuuggggcgggucuuauauugcccucgacuccggaugcggcaacugggauuguaucaugacgagcuaccaguaccugaucauucagaacacaaccugggacgaucacugccaguuuucucggcccuccccuaucggguaucuuggacugcucagccaacgcacaagagacauuuacaucucccggcgccugcugggcaccuucaccuggacacucucugauagcgagggcaaugaaacgcccgggggauauugucugaccagauggaugcuuauugaggcggagcugaagugcuuuggcaacacagccguugcuaaguguaaugaaaaacaugacgaggaguucugcgauaugcuccggcuguuugacuucaacaagcaggccauccgcagacuuaaaaccccugcucagauguccauccagcugauuaauaaggccgugaacgcgcucaucaaugaucaacugauuaugaaaaaccaucugcgggacaucaugugcauucccuacuguaauuauagccgcuacugguaucucaaccacacaucuaccgggaagacgucccugccuagaugcuggcuuaucagcaauggaucuuaccugaacgaaacaaaguucagcgacgauaucgaacagcaggccgacaauaugauuaccgagaugcuccaaaaagaguacaucgaucggcagggcaagaccccgcuggggcuggucgaccuuuuuguguucuccacaucuuuuuaucucauuagcaucuuccugcaccuggugaaaauucccacccaccgccauaucgucggaaagccuugucccaaaccucacagacucaaccauaugggcauuugcuccuguggccuguacaagcagcccgggguuccggugcgguggaaaagaugaggacuagucccuguucccagagcccacuuuuuuuucuuuuuuugaaauaaaauagccugucuuucagaucucaaaggcucuuuucagagccaccaaaaaaaaaaaaaaaaaaaaaaaaaaaaaaaaaaaaaaaaaaaaaaaaaaaaaaaaaaaaaaaaagaauu

SEQ ID NO: 28681 - RNA, 1736 nt, Artificial Sequence
  mRNA product Design a-2 (hSL-A64-N5) comprising derived and/or modified sequence from LASV(AV;Clade V)__CCA30314__GPCmut5 (opt5)
aggagaguccgcucagccagguugcagaagcggcuuagcguguguccuaaucuucucucugcguguagguaggccugugccgcaaacaagcuuaccaugggccagaucgugaccuucuuucaagaggucccccacguuauugaagaggugaugaacaucgugcugauugcccucagcauccuggcuguccuuaaggggcuguacaauauugccacaugcggacucaucggccugaucacguuccuucugcucugugggagauccugcucuagcaaccuguauaaaggaguguacgaacugcagucccucgaccugaauauggagacccuuaacaugacaaugccucugucuuguaccaagaauaacagccaucacuauauucggguuggcaaugauacagggcucgaacugacccuuacaaacaccuccauccugaaucauaaauuuugcaaccucucugacgcgcacaagaaagaucuguacgaccaugcucugaugagcauuaucuccacguuccaccucagcauuccgaauuuuaaccaguaugaggccaugucuugugauuucaauggaggcaagaucuccgugcaguacaaccugagccacucuuaugccauugacgcugccaaucauugcggcaccgucgcuaacgggauccuucaaacauuuaugcgcauggccuggggaggcuccuacaucgcgcuggauagcggguguggaaacugggacugcauuaugaccucuuaccaguaucucaucauucagaauacaaccugggagaaccacugucaguucuccagacccagcccuaucggcuaccuggggcuucugucccaacggacgcgcgauauuuauaucucuagacggcuccugggaacauuuaccuggacacugagcgacuccgaaggcaaugccacccccggcggguacugccucacccgcuggaugcugaucgaggcugaacuuaaguguuucggaaacacagccguggcuaaaugcaaugagaagcaugaugaggaauuuugcgacaugcugagacucuucgauuuuaacaaacaggccauuagccggcugaagucuccugcgcagauguccauccagcuuauuaauaaagccguuaacgcucugaucaaugaccaacucauuaugaagaaccaucugcgcgacaucauguguauccccuauugcaauuacagcaaguauugguaccugaaccacacgauuaccggcaaaacaucucucccuaaguguuggcuggugagcaauggguccuaccuuaacgagacccacuucucugaugacaucgaacagcaggccgauaauaugauuacagagaugcugcaaaaagaauauauggagagacagggaaagaccccgcucggccuggucgaccuguucguguuuagcacguccuucuaccuuaucagcauuuuucuccggcuggugaaaauccccacacaccgccauauugucgggaagccuugccccaaaccucacagacugaaccauaugggaaucuguucuugcggccucuauaagcagcccggcguuccggugcgguggaagcgcugaggacuagucccuguucccagagcccacuuuuuuuucuuuuuuugaaauaaaauagccugucuuucagaucucaaaggcucuuuucagagccaccaaaaaaaaaaaaaaaaaaaaaaaaaaaaaaaaaaaaaaaaaaaaaaaaaaaaaaaaaaaaaaaaagaauu

SEQ ID NO: 28682 - RNA, 1733 nt, Artificial Sequence
  mRNA product Design a-2 (hSL-A64-N5) comprising derived and/or modified sequence from LASV(Togo/2016/7082;Clade VI)__AMR44577__GPCmut5 (opt5)
aggagaguccgcucagccagguugcagaagcggcuuagcguguguccuaaucuucucucugcguguagguaggccugugccgcaaacaagcuuaccaugggccagaucauuaccuucuuucaagaggugccccacgucaucgaagagguuaugaacauugugcugaucgcccucagccugcuugcuauucugaaggggguguacaaugucgccacaugcggaaucaucggccucgugacguuccuguuucuuugugggagauccugcucucugauuuauaaaggaagcuacgaacuccagacccuggagcugaacauggaaacacucaauaugaccaugccucuguccuguacaaagaacucuagccaucacuauauccggguuggcaaugagaccgggcuugagcugacacucaccaacacguccauuaucaaucauaaauucugcaaccugucugacgcgcacaagcgcaaucuuuacgaucaugcucugaugagcauucucuccaccuuucaccugagcaucccgaacuucaaucaguaugaagccaugucuugugacuuuaacggaggcaaaauuuccgugcaguacaaucugagccacgccuaugcugucgaugccgcugagcauugcggcacaguggccaacgggguucuccaaaccuucaugagaauggcguggggaggcucuuacaucgcccuggacuccggguguggaaauugggauugcaucaugacaagcuaccaguaucuuauuauccagaacaccacgugggaagaccacugucaguuuucucggcccuccccuauuggcuaccuggggcuccugagccaacgcacaagagauaucuauauuucccggcgccuucugggaaccuucacauggacccucucugacagcgagggcaacgagacccccggcggguacugccugacaagauggaugcugaucgaagcugagcucaaguguuuuggaaauacggccguggcuaagugcaacgaaaaacaugaugaggaguucugcgacaugcugcggcuuuuugauuucaauaagcaggccauccagcgccugaaauccccugcgcagaugagcauucaacucaucaacaaggccgucaaugcucugauuaacgaccagcuuaucaugaaaaaucaccugagagauaugauguguauucccuauugcaacuacucuaaguauugguaccucaaucacaccuccagcggccggacaucucugccuaaguguuggcuggugagcaacggguccuaccucaaugaaacccauuucucugacgacaucgagcagcaagccgauaacaugaucacagaaaugcugcagaaagaguauauugaccgccagggaaagaccccgcuuggccugguggaucucuuugucuucagcacguccuuuuaccugaucagcauuuuccugcaccuuaucaaaauucccacacauagacacaucguugggaagccuugccccaaaccucaucggcucaaucacaugggaauuuguucuugcggccuguauaagcagcccggcgugccgacccgcuggaaaagaugaggacuagucccuguucccagagcccacuuuuuuuucuuuuuuugaaauaaaauagccugucuuucagaucucaaaggcucuuuucagagccaccaaaaaaaaaaaaaaaaaaaaaaaaaaaaaaaaaaaaaaaaaaaaaaaaaaaaaaaaaaaaaaaaagaauu

SEQ ID NO: 28683 - RNA, 1733 nt, Artificial Sequence
  mRNA product Design a-2 (hSL-A64-N5) comprising derived and/or modified sequence from LASV(KAK-428;Clade n.d. (VII))__ANH09740__GPCmut5 (opt5)
aggagaguccgcucagccagguugcagaagcggcuuagcguguguccuaaucuucucucugcguguagguaggccugugccgcaaacaagcuuaccaugggccagaucgugaccuucuuucaagaggucccccacguuauugaagaggugaugaacaucgugcugauugcccucagccugcuugcuauccugaaggggcucuacaauuucgccacaugcggagucauuggccugaucacguuucuucugcucugugggagauccugcucugcgaccuauaaaggacaguacgaacugcagacacuggagcucaacauggaaagccugaauaugaccaugccucuuuccuguacaaagaacaauucucaucacuauauccgggcuggcaacaauaccgggcuggagcucacacugaccaacacgagcauuaucucccauaaauucugcaaucuuucugacgcccacaagaaaaaccuguacgaucauacccucaugagcauuaucacaaccuuucaccuguccauuccgaauuucaaccaguaugaggccaugagcugugacuuuaauggaggcaagaucucuauucaauacaaccugucccacagcuaugcuggcgaugccgcucagcauugcgggacaguggccaauggaguucuccagaccuucaugcgcauggcguggggcgggucuuaccuggcccuugacuccggauguagaggcugggauugcaucaucagcucuuaccaguaucugauuauccaaaacacgacaugggacgaucacugucaguuuucccggcccagcccuauuggguaccucggauucgugucccagaagacccgcgacaucuauauuucuagacggcugcuuggcacauuuaccuggacccugagcgauuccgaaggccaugacaugcccgggggauacugccucacacgcuggaugcugaucgaggcugaucugaaauguuucggcaacacggccgucgcuaagugcaaugaaaaacacgacgaggaguuuugcgauauguggagacucuucgacuucaacaagcaggccauccaacggcugaaagcgccugcccagaugaauauucagcuuaucaacaaggcugugaaugcccugauuaacgaccaacucaugaugaagaaucaucugcgcgauaucauguguauucccuauugcaacuacagcaaauuuugguaucuuaauaacaccacaaccgggagaacaucucugccucgguguuggcucaucuccaauggaagcuaccugaacgaaacccacuucucugacgauaucgagcagcaggcugacaauaugauuacggaaaugcugcagaaggaguacauggaucgccaaggcaaaacaccgcucgggcugguugaccuuuuuguguucagcaccuccuuuuaucugaucaccauuuuccuccaccuggucaagauccccacacauagacacauugugggaaaaccuugccccaagccucaucggcugaaccacaugggcaucuguucuugcggccuuuacaaacagcccggggugccgguccgcuggaagagaugaggacuagucccuguucccagagcccacuuuuuuuucuuuuuuugaaauaaaauagccugucuuucagaucucaaaggcucuuuucagagccaccaaaaaaaaaaaaaaaaaaaaaaaaaaaaaaaaaaaaaaaaaaaaaaaaaaaaaaaaaaaaaaaaagaauu

SEQ ID NO: 28684 - RNA, 1733 nt, Artificial Sequence; identical to SEQ ID NO: 28678
  mRNA product Design a-2 (hSL-A64-N5) comprising derived and/or modified sequence from LASV(Pinneo-NIG-1969;Clade I)__AIT17836__GPCmut5 (opt5)

SEQ ID NO: 28685 - RNA, 1733 nt, Artificial Sequence
  mRNA product Design a-2 (hSL-A64-N5) comprising derived and/or modified sequence from LASV(ISTH0009-NIG-2011;Clade II)__AIT17404__GPCmut5 (opt5)
aggagaguccgcucagccagguugcagaagcggcuuagcguguguccuaaucuucucucugcguguagguaggccugugccgcaaacaagcuuaccaugggccagaucauuaccuucuuucaagaggugccccacgucaucgaagagguuaugaacauugugcugaucgcccucagccugcuugcuauucugaaggggaucuacaauguggccacaugcggacucuucggccuggucuccuuucuucugcucugugggagaucuugcagcacgaccuauaaaggaguguacgaacugcagacacuggagcucgacauggcgucccugaacaugaccaugccucuuucuuguacaaagaauaacagccaucacuauaucaugguuggcaaugaaaccgggcuggagcucacacugaccaacacguccauuaucaaucauaaauucugcaaccuuucugaugcucacaagaaaaaucuguacgaccaugcccucaugagcauuaucuccaccuuucaccugagcauuccgaacuucaaucaguaugaggccaugucuugugauuuuaacggaggcaagaucuccgugcaguacaaucugagccacgcuuaugccgucgacgcugccaaccauugcggcacaauugcgaauggggugcuccaaaccuucaugcggauggccuggggaggcucuuacaucgcucuggauuccggguguggaagcugggacugcaucaugacaucuuaccaguaucuuauuauccagaacaccacgugggaagaucacugucaguuuucccgccccagcccuauuggcuaccuggggcuccugucccaaagaacacgggacaucuauauuucucgcagacuucugggaaccuucacauggacccucagcgauuccgagggcaacgaaacccccggcggguacugccugacacgguggaugcugaucgaggccgagcucaaguguuuuggaaauacggcuguugccaaaugcaacgaaaagcaugacgaggaguucugcgauaugcugcgccuuuuugacuucaauaaacaggcgaucagacggcugaagaccccugcccagaugagcauucagcucaucaacaaagcugugaaugcccugauuaacgaucaacuuaucaugaagaaucaucugcgcgacauuauguguauccccuauugcaacuacucuaaguauugguaccucaaucacacagucaccggcaaaacaucccugccuagauguuggcuggugagcaacgggucuuaccucaaugaaacccacuucagcgacgauaucgaacagcaggcugacaacaugauuacggagcugcuucaaaaggaguauauggaucggcagggaaaaacaccgcugggccucguggaccuguuugucuucuccaccucuuuuuaccugaucagcauuuuccuucaccucaucaagauucccacccaucgccacaucacagggaaaccuugccccaagccucauagacugaaucacaugggaauuuguuccugcggccuguauaaacaccccggcguuccggugaaguggaagcggugaggacuagucccuguucccagagcccacuuuuuuuucuuuuuuugaaauaaaauagccugucuuucagaucucaaaggcucuuuucagagccaccaaaaaaaaaaaaaaaaaaaaaaaaaaaaaaaaaaaaaaaaaaaaaaaaaaaaaaaaaaaaaaaaagaauu

SEQ ID NO: 28686 - RNA, 1733 nt, Artificial Sequence
  mRNA product Design a-2 (hSL-A64-N5) comprising derived and/or modified sequence from LASV(ISTH2010-NIG-2012;Clade II)__AIT17482__GPCmut5 (opt5)
aggagaguccgcucagccagguugcagaagcggcuuagcguguguccuaaucuucucucugcguguagguaggccugugccgcaaacaagcuuaccaugggccagaucauuaccuucuuucaagaggugccccacgucaucgaagagguuaugaacauugugcugaucgcccucagccugcuugcuauucugaaggggaucuacaauguggccacaugcggacucuucggccuggucuccuuucuucugcucugugggagaucuugcagcacgaccuauaaaggaguguacgaacugcagacacuggagcucgacauggcgucccugaacaugaccaugccucuuucuuguacaaagaauaacagccaucacuauaucaugguuggcaaugaaaccgggcuggagcucacacugaccaacacguccauuaucaaucauaaauucugcaaccuuucugaugcucacaagaaaaaucuguacgaccaugcccucaugagcauuaucuccaccuuucaccugagcauuccgaacuucaaucaguaugaggccaugucuugugauuuuaacggaggcaagaucuccgugcaguacaaucugagccacgcuuaugccgucgacgcugccaaccauugcggcacaauugcgaauggggugcuccaaaccuucaugcggauggccuggggaggcucuuacaucgcucuggauuccggguguggaagcugggacugcaucaugacaucuuaccaguaucuuauuauccagaacauuaccugggaagaucacugucaguuuucccgccccagcccuaucggcuaccuggggcuccugucccaaagaacgcgggacauuuauaucucucgcagacuucugggaacauucaccuggacacucagcgauuccgagggcaacgaaacccccggcggguacugccugacccgguggaugcugaucgaggccgagcucaaguguuuuggaaauacagcuguugccaaaugcaacgaaaagcaugacgaggaguucugcgauaugcugcgccuuuuugacuucaauaaacaggcgauuagacggcugaagacgccugcccagaugagcauccagcucauuaacaaagcugugaaugcccugaucaacgaucaacuuauuaugaagaaucaucugcgcgacaucauguguauccccuauugcaacuacucuaaguauugguaccucaaucacaccgucacaggcaaaaccucccugccuagauguuggcuggugagcaacgggucuuaccucaaugaaacacacuucagcgacgauauugaacagcaggcugacaacaugaucaccgagcugcuucaaaaggaguauauugaucggcagggaaaaacgccgcugggccucguggaccuguuugucuucuccacaucuuuuuaccugaucagcauuuuccuucaccucguuaagauccccacccaucgccacgugguggggaaaccuugccccaagccucauagacugaaucacaugggaauuuguuccugcggccuguauaaacaccccggcgucccggugaaguggaagcggugaggacuagucccuguucccagagcccacuuuuuuuucuuuuuuugaaauaaaauagccugucuuucagaucucaaaggcucuuuucagagccaccaaaaaaaaaaaaaaaaaaaaaaaaaaaaaaaaaaaaaaaaaaaaaaaaaaaaaaaaaaaaaaaaagaauu

SEQ ID NO: 28687 - RNA, 1733 nt, Artificial Sequence
  mRNA product Design a-2 (hSL-A64-N5) comprising derived and/or modified sequence from LASV(Lassa virus/H.sapiens-wt/NGA/2015/ISTH_0543;Clade II)__AVO03639__GPCmut5 (opt5)
aggagaguccgcucagccagguugcagaagcggcuuagcguguguccuaaucuucucucugcguguagguaggccugugccgcaaacaagcuuaccaugggccagaucauuaccuucuuucaagaggugccccacgucaucgaagagguuaugaacauugugcugaucgcccucagccugcuugcuauucugaaggggaucuacaauguggccacaugcggacucuucggccuggucuccuuucuucugcucugugggagaucuugcagcacgaccuauaaaggaguguacgaacugcagacacuggagcucgacauggcgaaccugaauaugaccaugccucuuuccuguacaaagaacaauucucaucacuauaucaugguuggcaacgaaaccgggcuggagcucacacugaccaauacgagcauuaucaaccauaaauucugcaaucuuuccgaugcucacaagaaaaaccuguacgaccaugcccucaugucuauuaucagcaccuuucaccuguccauuccgaauuucaaccaguaugaggccaugagcugugauuuuaauggaggcaagaucucugugcaguacaaccugucccacacauaugcugucgacgccgcuaaucauugcggcaccauugccaacggggugcuccaaacauucaugcggauggcguggggaggcagcuacaucgcccuggauucuggguguggauccugggacugcaucaugaccagcuaccaguaucuuguuauucagaacacgacaugggaagaucacugucaguuuucucgccccuccccuaucggcuaccuggggcuccugagccaaagaacccgggacauuuauaucucccgcagacuucugggaacauucaccuggacccucucugauagcgagggcaaugaaacacccggcggguacugccugacgcgguggaugcugauugaggcugagcucaaguguuuuggaaacaccgccguggcuaaaugcaaugaaaagcaugacgaggaguucugcgauaugcugcgccuuuuugacuucaacaaacaggccaucagacggcugaagaccccugcgcagauguccauccagcucauuaauaaagccgucaacgcucugaucaaugaucaacuuauuaugaagaaccaucugcgcgacaucauguguauucccuauugcaauuacagcaaguauugguaccucaaccacacagugacaggcaaaaccucucugccuagauguuggcugguguccaaugggagcuaccucaacgaaacgcacuucucugacgauaucgaacagcaggccgacaauaugaucacagagcugcuucaaaaggaguauauugaucggcagggaaaaaccccgcugggccucgucgaccuguuuguuuucagcaccuccuuuuaccugaucucuauuuuccuucaccucgugaagauccccacacaucgccacauuaccgggaaaccuugccccaagccucauagacugaaccacaugggaaucuguagcugcggccuguauaaacaccccggcgugccggucaaguggaagcggugaggacuagucccuguucccagagcccacuuuuuuuucuuuuuuugaaauaaaauagccugucuuucagaucucaaaggcucuuuucagagccaccaaaaaaaaaaaaaaaaaaaaaaaaaaaaaaaaaaaaaaaaaaaaaaaaaaaaaaaaaaaaaaaaagaauu

SEQ ID NO: 28688 - RNA, 1733 nt, Artificial Sequence
  mRNA product Design a-2 (hSL-A64-N5) comprising derived and/or modified sequence from LASV(Lassa virus/H.sapiens-wt/NGA/2016/ISTH_0009;Clade II)__AVO03571__GPCmut5 (opt5)
aggagaguccgcucagccagguugcagaagcggcuuagcguguguccuaaucuucucucugcguguagguaggccugugccgcaaacaagcuuaccaugggccagaucauuaccuucuuucaagaggugccccacgucaucgaagagguuaugaacauugugcugaucgcccucagccugcuugcuauucugaaggggaucuacaauguggccacaugcggacuccugggccuugucuccuuccugcuccugugugggagaucuugcagcacgaccuauaaaggaguguacgaacugcagacacucgagcuggacauggcgucccuuaacaugaccaugccucugucuuguacaaagaauaacagccaucacuauaucaugguuggcaaugaaaccgggcucgagcugacacuuaccaacacguccauuaucaaucauaaauuuugcaaccugucugaugcucacaagaaaaaucucuacgaccaugcccugaugagcauuaucuccaccuuccaccugagcauuccgaacuuuaaucaguaugaggccaugucuugugauuucaacggaggccggaucuccgugcaguacaaucucagccacucuuaugcugucgacgccgcuaaccauugcggcacaauugccaauggggugcugcaaaccuuuaugcgcauggcguggggaggcuccuacaucgcccuugauagcggguguggaucuugggacugcaucaugacauccuaccaguaucugauuauccagaacaccacgugggaagaucacugucaguucagcagacccuccccuauuggcuaccucgggcugcuuucucaacggacacgcgacaucuauauuagcagacggcugcucggaaccuuuacauggacccuguccgauagcgagggcaacgaaacccccggcggguacugccugacacgcuggaugcucaucgaggcugagcugaaguguuucggaaauacggccguugcuaagugcaacgaaaaacaugacgaggaauuuugcgauaugcuuagacuguucgacuuuaauaagcaggccauccggcgccucaaaaccccugcgcagaugucuauucagcugaucaacaaggccgugaaugcucuuauuaacgaucaacugaucaugaaaaaucaccucagagacauuauguguauccccuauugcaacuacuccaaguauugguaccugaaucacacagucaccggcaagacaagccugccucgguguuggcucgugucuaacgggagcuaccugaaugagacccauuucuccgacgauaucgaacagcaggccgacaacaugauuacggagcuucugcaaaaagaguauaucgaucgccagggaaagacaccgcucggccugguggaccuguucgucuuuucuaccagcuucuaccuuauuuccaucuuucuccaccugguuaaaauucccacccauagacacaucacagggaagccuugccccaaaccucaucggcugaaucacaugggaauuuguagcugcggccucuauaaccaccccggcgugccggugaaguggaaacgcugaggacuagucccuguucccagagcccacuuuuuuuucuuuuuuugaaauaaaauagccugucuuucagaucucaaaggcucuuuucagagccaccaaaaaaaaaaaaaaaaaaaaaaaaaaaaaaaaaaaaaaaaaaaaaaaaaaaaaaaaaaaaaaaaagaauu

SEQ ID NO: 28689 - RNA, 1733 nt, Artificial Sequence
  mRNA product Design a-2 (hSL-A64-N5) comprising derived and/or modified sequence from LASV(Lassa virus/H.sapiens-wt/NGA/2016/ISTH_0017;Clade II)__AVO03567__GPCmut5 (opt5)
aggagaguccgcucagccagguugcagaagcggcuuagcguguguccuaaucuucucucugcguguagguaggccugugccgcaaacaagcuuaccaugggccagaucauuaccuucuuucaagaggugccccacgucaucgaagagguuaugaacauugugcugaucgcccucagccugcuugcuauucugaaggggaucuacaauguggccacaugcggacucuucggccuggucuccuuucuucugcucugugggagaucuugcagcacgaccuauaaaggaguguacgaacugcagacacuggagcucgacauggcgucccugaacaugaccaugccucuuucuuguacaaagaauaacagccaucacuauaucaugguuggcaaugaaaccgggcuggagcucacacugaccaacacguccauuaucaaucauaaauucugcaaccuuucugaugcucacaagaaaaaucuguacgaccaugcccucaugagcauuaucuccaccuuucaccugagcauuccgaacuucaaucaguaugaggccaugucuugugauuuuaacggaggcaagaucuccgugcaguacaaucugagccacacauaugcuauugacgccgcuaaccauugcggcaccaucgccaaugggguccuccaaacauucaugcggauggcguggggaggcucuuacaucgcccuggauuccggguguggaagcugggacugcauuaugaccucuuaccaguaucuuaucauucagaacacgacaugggaagaucacugucaguuuucccgccccagcccuaucggcuaccuggggcuccugucccaaagaacccgggacauuuauaucucucgcagacuucugggaacauucaccuggacccucagcgauuccgagggcaacgaaacacccggcggguacugccugacgcgguggaugcugaucgaggcugagcucaaguguuuuggaaauaccgccguggcuaaaugcaacgaaaagcaugacgaggaguucugcgauaugcugcgccuuuuugacuucaauaaacaggccauuagacggcugaagaccccugcgcagaugagcauccagcucauuaacaaagccguuaaugcucugaucaacgaucaacuuauuaugaagaaucaucugcgcgacaucauguguauccccuauugcaacuacucuaaguauugguaccucaaucacacagugacaggcaaaaccucccugccuagauguuggcuggucagcaacgggucuuaccucaaugaaacgcacuucagcgacgauauugaacagcaggccgacaacaugaucacagagcugcuucaaaaggaguauauggaucggcagggaaaaaccccgcugggccucguggaccuguuuguguucuccaccucuuuuuaccugauuagcaucuuccuucaccucguccgcauucccacacauagacacguuaucgggaagccuugccccaaaccucaucggcugaaucacaugggaauuuguuccugcggccuguauaagcaccccggcgugccggugaaauggaagcgcugaggacuagucccuguucccagagcccacuuuuuuuucuuuuuuugaaauaaaauagccugucuuucagaucucaaaggcucuuuucagagccaccaaaaaaaaaaaaaaaaaaaaaaaaaaaaaaaaaaaaaaaaaaaaaaaaaaaaaaaaaaaaaaaaagaauu

SEQ ID NO: 28690 - RNA, 1733 nt, Artificial Sequence
  mRNA product Design a-2 (hSL-A64-N5) comprising derived and/or modified sequence from LASV(Lassa virus/H.sapiens-wt/NGA/2018/ISTH_0959;Clade II)__AVV65099__GPCmut5 (opt5)
aggagaguccgcucagccagguugcagaagcggcuuagcguguguccuaaucuucucucugcguguagguaggccugugccgcaaacaagcuuaccaugggccagaucauuaccuucuuucaagaggugccccacgucaucgaagagguuaugaacauugugcugaucgcccucagccugcuugcuauucugaaggggaucuacaauguggucacaugcggacucuucggccugguguccuuucuucugcucugugggagaucuugcagcacgaccuauaaaggaguuuacgaacugcagacacuggagcucgacauggccucccugaacaugaccaugccucuuucuuguacaaagaauaacagccaucacuauaucauggugggcaaugaaaccgggcuggagcucacacugaccaacacguccauuaucaaucauaaauucugcaaccuuucugaugcgcacaagaaaaaucuguacgaccaugcucucaugagcauuaucuccaccuuucaccugagcauuccgaacuucaaucaguaugaggccaugucuugugauuuuaacggaggcaagaucuccguccaguacaaucugagccacgccuaugcuauugacgccgcuaaccauugcggcacaaucgccaauggggugcuccaaaccuucaugcggauggcguggggaggcucuuacaucgcccuggauuccggguguggaagcugggacugcauuaugacaucuuaccaguaucuuaucauucagaacaccacgugggaagaucacugucaguuuucccgccccagcccuaucggcuaccuggggcuccugucccaaagaacacgggacauuuauaucucucgcagacuucugggaaccuucacauggacccucagcgauuccgagggcaacgaaacccccggcggguacugccugacacgguggaugcugaucgaggcugagcucaaguguuuuggaaauacggccguugcuaaaugcaacgaaaagcaugacgaggaguucugcgauaugcugcgccuuuuugacuucaauaaacaggccauuagacggcugaagaccccugcgcagaugagcauccagcucauuaacaaagccgugaaugcucugaucaacgaucaacuuauuaugaagaaucaucugcgcgacaucauguguauccccuauugcaacuacucuaaguauugguaccucaaucacacagucaccggcaaaacaucccugccuagauguuggcuggugagcaacgggucuuaccucaaugaaacccacuucagcgacgauauugaacagcaggccgacaacaugaucacggagcugcuucaaaaggaguauauugaucggcagggaaaaacaccgcugggccucguggaccuguuugucuucuccaccucuuuuuaccugaucagcauuuuccuucaccucguuaagauccccacccaucgccacgugauugggaaaccuugccccaagccucauagacugaaucacaugggaaucuguuccugcggccuguauaaacaccccggcgugccggucaaguggaagcggugaggacuagucccuguucccagagcccacuuuuuuuucuuuuuuugaaauaaaauagccugucuuucagaucucaaaggcucuuuucagagccaccaaaaaaaaaaaaaaaaaaaaaaaaaaaaaaaaaaaaaaaaaaaaaaaaaaaaaaaaaaaaaaaaagaauu

SEQ ID NO: 28691 - RNA, 1733 nt, Artificial Sequence
  mRNA product Design a-2 (hSL-A64-N5) comprising derived and/or modified sequence from LASV(LASV003-NIG-2008;Clade II)__AIT17580__GPCmut5 (opt5)
aggagaguccgcucagccagguugcagaagcggcuuagcguguguccuaaucuucucucugcguguagguaggccugugccgcaaacaagcuuaccaugggccagaucauuaccuucuuucaagaggugccccacgucaucgaagagguuaugaacauugugcugaucgcccucagccugcuugcuauucugaaggggaucuacaauguggccacaugcggacucuucggccuggucuccuuucuucugcucugugggagaucuugcagcacgaccuauaaaggaguguacgaacugcagacacuggagcucgacauggcgucccugaacaugaccaugccucuuucuuguacaaagaauaacagccaucacuauaucaugguuggcaaugaaaccgggcuggagcucacacugaccaacacguccauuaucaaucauaaauucugcaaccuuucugaugcucacaagaaaaaucuguacgaccaugcccucaugagcauuaucuccaccuuucaccugagcauuccgaacuucaaucaguaugaggccaugucuugugauuuuaacggaggcaagaucuccgugcaguacaaucugagccacacauaugcugucgacgccgcuaaccauugcggcaccauugccaauggggugcuccaaacauucaugcggauggcguggggaggcucuuacaucgcccuggauuccggguguggaagcugggacugcaucaugaccucuuaccaguaucuuauuauccagaacacgacaugggaagaucacugucaguuuucccgccccagcccuauuggcuaccuggggcuccugucccaaagaacccgggacaucuauauuucucgcagacuucugggaacauucaccuggacccucagcgauuccgagagcaacgaaacacccggcggcuacugccugacgcgguggaugcugaucgaggcugagcucaaguguuuugggaauaccgccguugcuaaaugcaacgaaaagcaugacgaggaguucugcgauaugcugcgccuuuuugacuucaauaaacaggccaucagacggcugaaggcgccugcccagaugucuauucagcucaucaacaaagcugugaaugcccugauuaacgaucaacuuaucaugaagaaucaucugcgcgacauuauguguauccccuauugcaacuacuccaaguauugguaccucaaucacacagucaccggaagaacaagccugccucgguguuggcuggugucuaacggcagcuaccucaaugaaacccacuucuccgacgauaucgaacagcaggcugacaacaugauuacggagcugcuucaaaaagaguauauggaucgccaggggaagacaccgcugggacucguggaccuguuugucuucucuaccagcuuuuaccugaucuccauuuuccuucaccucguuaaaauccccacccauagacacgugauuggcaagccuugccccaaaccucaucggcugaaucacauggggaucuguagcugcggacuguauaagcaccccggcgugccggucaaauggaagcgcugaggacuagucccuguucccagagcccacuuuuuuuucuuuuuuugaaauaaaauagccugucuuucagaucucaaaggcucuuuucagagccaccaaaaaaaaaaaaaaaaaaaaaaaaaaaaaaaaaaaaaaaaaaaaaaaaaaaaaaaaaaaaaaaaagaauu

SEQ ID NO: 28692 - RNA, 1733 nt, Artificial Sequence
  mRNA product Design a-2 (hSL-A64-N5) comprising derived and/or modified sequence from LASV(LASV035-NIG-2009;Clade II)__AIT17588__GPCmut5 (opt5)
aggagaguccgcucagccagguugcagaagcggcuuagcguguguccuaaucuucucucugcguguagguaggccugugccgcaaacaagcuuaccaugggccagaucauuaccuucuuucaagaggugccccacgucaucgaagagguuaugaacauugugcugaucgcccucagccugcuugcuauucugaaggggaucuacaauguggccacaugcggacucuucggccuggucuccuuucuucugcucugugggagaucuugcagcacgaccuauaaaggaguguacgaacugcagacacuggagcucgacauggcgucccugaacaugaccaugccucuuucuuguacaaagaauaacagccaucacuauaucaugguuggcaaugaaaccgggcuggagcucacacugaccaacacguccauuaucaaucauaaauucugcaaccuuucugaugcucacaagaaaaaucuguacgaccaugcccucaugagcauuaucuccaccuuucaccugagcauuccgaacuucaaucaguaugaggccaugucuugugauuuuaacggaggcaagaucuccgugcaguacaaucugagccacgcuuaugccgucgacgcugccaaccauugcggcacaauugcgaauggggugcuccaaaccuucaugcggauggccuggggaggcucuuacaucgcucuggauuccggguguggaagcugggacugcaucaugacaucuuaccaguaucuuauuauccagaacaccacgugggaagaucacugucaguuuucccgccccagcccuauuggcuaccuggggcuccugucccaaagaacacgggacaucuauauuucucgcagacuucugggaaccuucacauggacccucagcgauuccgagggcaacgaaacccccggcggguacugccugacacgguggaugcugaucgaggccgagcucaaguguuuuggaaauacggcuguugccaaaugcaacgaaaagcaugacgaggaguucugcgauaugcugcgccuuuuugacuucaauaaacaggcgaucagacggcugaaggccccugcucagaugagcauucagcucaucaacaaagccgugaaugcucugauuaacgaucaacuuaucaugaagaaucaucugcgcgacauuauguguauccccuauugcaacuacucuaaguauugguaccucaaucacaccgucacaggcaaaaccucccugccuagauguuggcuggugagcaacgggucuuaccucaaugaaacacacuucagcgacgauaucgaacagcaggccgacaacaugauuaccgagcugcuucaaaaggaguauaucgaucggcagggaaaaacgccgcugggccucguggaccuguuugucuucuccacaucuuuuuaccugauuagcaucuuccuucaccucguuaagauucccacccaucgccacgugaucgggaaaccuugccccaagccucauagacugaaucacaugggaauuuguuccugcggccuguauaaacaccccggcgugccggucaaguggaagcggugaggacuagucccuguucccagagcccacuuuuuuuucuuuuuuugaaauaaaauagccugucuuucagaucucaaaggcucuuuucagagccaccaaaaaaaaaaaaaaaaaaaaaaaaaaaaaaaaaaaaaaaaaaaaaaaaaaaaaaaaaaaaaaaaagaauu

SEQ ID NO: 28693 - RNA, 1733 nt, Artificial Sequence
  mRNA product Design a-2 (hSL-A64-N5) comprising derived and/or modified sequence from LASV(LASV1000-NIG-2009;Clade II)__AIT17782__GPCmut5 (opt5)
aggagaguccgcucagccagguugcagaagcggcuuagcguguguccuaaucuucucucugcguguagguaggccugugccgcaaacaagcuuaccaugggccagaucauuaccuucuuucaagaggugccccacgucaucgaagagguuaugaacauugugcugaucgcccucagccugcuugcuauucugaaggggaucuacaauguggccacaugcggacucuucggccuggucuccuuucuucugcucugugggagaucuugcagcacgaccuauaaaggaguguacgaacugcagacacuggagcucgacauggcgucccugaacaugaccaugccucuuucuuguacaaagaauaacagccaucacuauaucaugguuggcaaugaaaccgggcuggagcucacacugaccaacacguccauuaucaaucauaaauucugcaaccuuucugaugcucacaagaaaaaucuguacgaccaugcccucaugagcauuaucuccaccuuucaccugagcauuccgaacuucaaucaguaugaggccaugucuugugauuuuaacggaggcaagaucuccgugcaguacaaucugagccacacauaugcugucgacgccgcuaaccauugcggcaccauugccaauggggugcuccaaacauucaugcggauggcguggggaggcucuuacaucgcccuggauuccggguguggaagcugggacugcaucaugaccucuuaccaguaucuuauuauccagaacacgacaugggaagaucacugucaguuuucccgccccagcccuauuggcuaccuggggcuccugucccaaagaacccgggacaucuauauuucucgcagacuucugggaacauucaccuggacccucagcgauuccgagggcaacgaaacacccggcggguacugccugacgcgguggaugcugaucgaggcugagcucaaguguuuuggaaauaccgccguugcuaaaugcaacgaaaagcaugacgaggaguucugcgauaugcugcgccuuuuugacuucaauaaacaggccaucaagagacugaaaaccccugcgcagaugagcauucagcucaucaacaaggccgugaaugcucugauuaacgaucaacuuaucaugaagaaucaucugcgggacauuauguguauccccuauugcaacuacucuaaauauugguaccucaaucacacagucacaggcaagaccucccugccucgcuguuggcuggugagcaacgggucuuaccucaaugaaacgcacuucagcgacgauaucgaacagcaggccgacaacaugauuacagagcugcuucaaaaagaguauaucgauagacagggaaagaccccgcugggccucguggaccuguuugucuucuccaccucuuuuuaccugauuagcaucuuccuucaccucguuaaaauucccacacaucggcacgugguggggaagccuugccccaaaccucaucgccugaaucacaugggaaucuguuccugcggccuguauaagcaccccggcgucccggugaaguggaaaagaugaggacuagucccuguucccagagcccacuuuuuuuucuuuuuuugaaauaaaauagccugucuuucagaucucaaaggcucuuuucagagccaccaaaaaaaaaaaaaaaaaaaaaaaaaaaaaaaaaaaaaaaaaaaaaaaaaaaaaaaaaaaaaaaaagaauu

SEQ ID NO: 28694 - RNA, 1733 nt, Artificial Sequence
  mRNA product Design a-2 (hSL-A64-N5) comprising derived and/or modified sequence from LASV(LASV221-NIG-2010;Clade II)__AIT17624__GPCmut5 (opt5)
aggagaguccgcucagccagguugcagaagcggcuuagcguguguccuaaucuucucucugcguguagguaggccugugccgcaaacaagcuuaccaugggccagaucauuaccuucuuucaagaggugccccacgucaucgaagagguuaugaacauugugcugaucgcccucagccugcuugcuauucugaaggggaucuacaauguggccacaugcggacucuucggccuggucuccuuucuucugcucugugggagaucuugcagcacgaccuauaaaggaguguacgaacugcagacacuggagcucgacauggcgucccugaacaugaccaugccucuuucuuguacaaagaauaacagccaucacuauaucaugguuggcaaugaaaccgggcuggagcucacacugaccaacacguccauuaucaaucauaaauucugcaaccuuucugaugcucacaagaaaaaucuguacgaccaugcccucaugagcauuaucuccaccuuucaccugagcauuccgaacuucaaucaguaugaggccaugucuugugauuuuaacggaggcaagaucuccgugcaguacaaucugagccacacauaugcuauugacgccgcuaaccauugcggcaccaucgccaaugggguccuccaaacauucaugcggauggcguggggaggcucuuacaucgcccuggauuccggguguggaagcugggacugcauuaugaccucuuaccaguaucuuaucauucagaacacgacaugggaagaucacugucaguuuucccgccccagcccuaucggcuaccuggggcuccugucccaaagaacccgggacauuuauaucucucgcagacuucugggaacauucaccuggacccucagcgauuccgagggcaacgaaacacccggcggguacugccugacgcgguggaugcugaucgaggcugagcucaaguguuuuggaaauaccgccguggcuaaaugcaacgaaaagcaugacgaggaguucugcgauaugcugcgccuuuuugacuucaauaaacaggccauuagacggcugaagaccccugcgcagaugagcauccagcucauuaacaaagccguuaaugcucugaucaacgaucaacuuauuaugaagaaucaucugcgcgacaucauguguauccccuauugcaacuacucuaaguauugguaccucaaucacacagugacaggcaaaaccucccugccuagauguuggcuggucagcaacgggucuuaccucaaugaaacgcacuucagcgacgauauugaacagcaggccgacaacaugaucacagagaugcugcaaaaggaguauauggaucggcagggaaaaaccccgcuuggccugguggaccucuuuguguucuccaccucuuuuuaccugauuagcaucuuccugcaccuugucaagauucccacacaucgccacguuaucgggaaaccuugccccaagccucauagacucaaucacaugggaauuuguuccugcggccuguauaaacaccccggcgugccggugaaguggaagcggugaggacuagucccuguucccagagcccacuuuuuuuucuuuuuuugaaauaaaauagccugucuuucagaucucaaaggcucuuuucagagccaccaaaaaaaaaaaaaaaaaaaaaaaaaaaaaaaaaaaaaaaaaaaaaaaaaaaaaaaaaaaaaaaaagaauu

SEQ ID NO: 28695 - RNA, 1733 nt, Artificial Sequence
  mRNA product Design a-2 (hSL-A64-N5) comprising derived and/or modified sequence from LASV(LASV237-NIG-2010;Clade II)__AIT17638__GPCmut5 (opt5)
aggagaguccgcucagccagguugcagaagcggcuuagcguguguccuaaucuucucucugcguguagguaggccugugccgcaaacaagcuuaccaugggccagaucauuaccuucuuucaagaggugccccacgucaucgaagagguuaugaacauugugcugaucgcccucagccugcuugcuauucugaaggggaucuacaauguggccacaugcggacucuucggccuggucuccuuucuucugcucugugggagaucuugcagcacgaccuauaaaggaguguacgaacugcagacacuggagcucgacauggcgucccugaacaugaccaugccucuuucuuguacaaagaauaacagccaucacuauaucaugguuggcaaugaaaccgggcuggagcucacacugaccaacacguccauuaucaaucauaaauucugcaaccuuucugaugcucacaagaaagaccuguacgaucaugcccucaugagcauuaucuccaccuuucaccugagcauuccgaauuucaaccaguaugaggccaugucuugugacuuuaauggaggcaagaucuccgugcaguacaaccugagccacacauaugcugucgaugccgcuaaucauugcggcaccauugccaacggggugcuccaaacauucaugcggauggcguggggaggcucuuacaucgcccuggacuccggguguggaagcugggauugcaucaugaccucuuaccaguaucuuauuauccagaauacgacaugggaagaccacugucaguuuucccgccccagcccuauuggcuaccuggggcuccugucccaaagaacccgggauaucuauauuucucgcagacuucugggaacauucaccuggacccucagcgacuccgagggcaacgaaacacccggcggguacugccugacgcgguggaugcugaucgaggcugagcucaaguguuuuggaaacaccgccguugcuaaaugcaaugaaaagcaugaugaggaguucugcgacaugcugcgccuuuuugauuucaacaaacaggccaucagacggcugaagaccccugcgcagaugagcauucagcucaucaauaaagccgugaacgcucugauuaaugaccaacuuaucaugaagaaccaucugcgcgacauuauguguauccccuauugcaauuacucuaaguauugguaccucaaccacacagucacaggcaaaaccucccugccuagauguuggcuggugagcaaugggucuuaccucaacgaaacgcacuucagcgaugacaucgaacagcaggccgauaauaugauuacagagcugcuucaaaaggaguauauggaccggcagggaaaaaccccgcugggccucguggaucuguuugucuucuccaccucuuuuuaccugaucagcauuuuccuucaccucaucaagauucccacacaucgccacaucaccgggaaaccuugccccaagccucauagacugaaccacaugggaauuuguuccugcggccuguauaaacaccccggcguuccggugaaguggaagcggugaggacuagucccuguucccagagcccacuuuuuuuucuuuuuuugaaauaaaauagccugucuuucagaucucaaaggcucuuuucagagccaccaaaaaaaaaaaaaaaaaaaaaaaaaaaaaaaaaaaaaaaaaaaaaaaaaaaaaaaaaaaaaaaaagaauu

SEQ ID NO: 28696 - RNA, 1733 nt, Artificial Sequence
  mRNA product Design a-2 (hSL-A64-N5) comprising derived and/or modified sequence from LASV(LASV253-NIG-2011;Clade II)__AIT17670__GPCmut5 (opt5)
aggagaguccgcucagccagguugcagaagcggcuuagcguguguccuaaucuucucucugcguguagguaggccugugccgcaaacaagcuuaccaugggccagaucauuaccuucuuucaagaggugccccacgucaucgaagagguuaugaacauugugcugaucgcccucagccugcuugcuauucugaaggggaucuacaauguggccacaugcggacucuucggccuggucuccuuucuucugcucugugggagaucuugcagcacgaccuauaaaggaguguacgaacugcagacacuggagcucgacauggcgucccugaacaugaccaugccucuuucuuguacaaagaauaacagccaucacuauaucaugguuggcaaugaaaccgggcuggagcucacacugaccaacacguccauuaucaaucauaaauucugcaaccuuucugaugcucacaagaaaaaucuguacgaccaugcccucaugagcauuaucuccaccuuucaccugagcauuccgaacuucaaucaguaugaggccaugucuugugauuuuaacggaggcaagaucuccgugcaguacaaucugagccacacauaugcugucgacgccgcuaaccauugcggcaccauugccaauggggugcuccaaacauucaugcggauggcguggggaggcucuuacaucgcccuggauuccggguguggaagcugggacugcaucaugaccucuuaccaguaucuuauuauccagaacacgacaugggaagaucacugucaguuuucccgccccagcccuauuggcuaccuggggcuccugucccaaagaacccgggacaucuauauuucucgcagacuucugggaacauucaccuggacccucagcgauuccgagggcaacgaaacacccggcggguacugccugacgcgguggaugcugaucgaggcugagcucaaguguuuuggaaauaccgccguugcuaaaugcaacgaaaagcaugacgaggaguucugcgauaugcugcgccuuuuugacuucaauaaacaggccaucagacggcugaaggcgccugcccagaugagcauucagcucaucaacaaagcugugaaugcccugauuaacgaucaacuuaucaugaagaaucaucugcgcgacauuauguguauccccuauugcaacuacucuaaguauugguaccucaaucacacagucaccggcagaacaucccugccucgguguuggcuggugagcaacgggucuuaccucaaugaaacccacuucagcgacgauaucgaacagcaggcugacaacaugauuacggagcugcuucaaaaagaguauaucgaucgccagggaaagacaccgcugggccucguggaccuguuugucuucuccaccucuuuuuaccugauuagcaucuuccuucaccucguuaaaauucccacccauagacacaucauugggaagccuugccccaaaccucaucggcugaaucacaugggaaucuguuccugcggccuguauaagcaccccggcgugccggugaaauggaagcgcugaggacuagucccuguucccagagcccacuuuuuuuucuuuuuuugaaauaaaauagccugucuuucagaucucaaaggcucuuuucagagccaccaaaaaaaaaaaaaaaaaaaaaaaaaaaaaaaaaaaaaaaaaaaaaaaaaaaaaaaaaaaaaaaaagaauu

SEQ ID NO: 28697 - RNA, 1733 nt, Artificial Sequence
  mRNA product Design a-2 (hSL-A64-N5) comprising derived and/or modified sequence from LASV(LASV254-NIG-2011;Clade II)__AIT17674__GPCmut5 (opt5)
aggagaguccgcucagccagguugcagaagcggcuuagcguguguccuaaucuucucucugcguguagguaggccugugccgcaaacaagcuuaccaugggccagaucauuaccuucuuucaagaggugccccacgucaucgaagagguuaugaacauugugcugaucgcccucagccugcuugcuauucugaaggggaucuacaauguggccacaugcggacucuucggccuggucuccuuucuucugcucugugggagaucuugcagcacgaccuauaaaggaguguacgaacugcagacacuggagcucgacaugaccaaccugaauaugacaaugccucuuuccuguaccaagaacaauucucaucacuauaucaugguuggcaacgaaacagggcuggagcucacccugacgaauaccagcauuaucaaccauaaauucugcaaucuuuccgaugcgcacaagaaaaaccuguacaaucaugcucucaugucuauuaucagcacauuucaccuguccauuccgaacuucaaucaguaugaggccaugagcugugacuuuaacggaggcaagaucucugugcaguacaaucugucccacagcuaugccgucgaugcugccaaccauugcggcaccauugcuaacggggugcuccaaacauucaugcggauggccuggggaggcucuuacaucgcgcuggacuccggguguggaaauugggauugcaucaugaccagcuaccaguaucuuauuauccagaacacgacaugggaagaccacugucaguuuucucgccccuccccuauuggcuaccuggggcuccugagccaaagaacccgggauaucuauauuucccgcagacuucugggaacauucaccuggacccucucugacagcgagggcaaugaaacacccggcggguacugccugacgcgguggaugcugaucgaggccgagcucaaguguuuuggaaacaccgcuguugccaaaugcaaugaaaagcaugaugaggaguucugcgacaugcugcgccuuuuugauuucaacaaacaggcuaucagacggcugaagaccccugcccaggcgaauauucagcucaucaacaaagccgugaaugcucugauuaacgaccaacuuaucaugaagaaucaucugcgcgauauuauguguauccccuauugcaacuacuccaaguauugguaccucaaucacacagucacaggcaaaaccagccugccuagauguuggcuggugucuaacggguccuaccucaaugaaacgcacuucagcgacgacaucgaacagcaggccgauaacaugauuacagagcugcuucaaaaggaguauauggaccggcagggaaaaaccccgcugggccucguggaucuguuugucuucucuaccagcuuuuaccugaucuccauuuuccuucaccucguuaagauccccacacaucgccacgugauugggaaaccuugccccaagccucauagacugaaccacaugggaaucuguucuugcggccuguauaaacaccccggcgugccggucaaguggaagcggugaggacuagucccuguucccagagcccacuuuuuuuucuuuuuuugaaauaaaauagccugucuuucagaucucaaaggcucuuuucagagccaccaaaaaaaaaaaaaaaaaaaaaaaaaaaaaaaaaaaaaaaaaaaaaaaaaaaaaaaaaaaaaaaaagaauu

SEQ ID NO: 28698 - RNA, 1733 nt, Artificial Sequence
  mRNA product Design a-2 (hSL-A64-N5) comprising derived and/or modified sequence from LASV(Nig08-A19;Clade III)__ADU56618__GPCmut5 (opt5)
aggagaguccgcucagccagguugcagaagcggcuuagcguguguccuaaucuucucucugcguguagguaggccugugccgcaaacaagcuuaccaugggccagaucgugaccuucuuucaagaggucccccacguuauugaagaggugaugaacaucgugcugauugcccucagcauccuggcuauucuuaaggggcuguacaauaucgccacaugcggacucaucggccuggucacguuccuucugcucuccgggagaucuuguagcaugaccuauaaaggaguguacgaacugcagacacuggagcucaacaugaauacccugaacaugacaaugccucuuuccugcaccaagaauaacucucaucacuauauuaugguuggcaaugaaacagggcuggagcucacccugacgaacaccagccuucugcaucacaaauuuuguaaucucuccgacgcgcauaagaaaaaccuguacgaucacacacugaugucuaucauuagcaccuuccaccucuccaucccgaauuuuaaccaguaugaggcuaugagcugcgacuucaauggaggcaagauuacagugcaguacaaccugucucauuccuaugccaucgaugccgcuaaucacuguggcaccgucgccaacggggugcuucaaacguuuaugcggauggcuuggggaggcagcuacauugcccuggacucugggugcggaaagugggauuguaucaugacauccuaccaguaucucaucauucagaacaccacaugggaagaccauugccaguucagccgccccucuccuaucggcuaccuggggcuucugucccaaagaacccgggauauuuauaucagccgcagacuccugggaaccuuuacauggacgcuguccgacucugagggcaaugaaacccccggcggguacugucucacacgguggaugcugauugaggcggagcuuaaaugcuucggaaacaccgccguugcuaaguguaaugaaaaacacgaugaggaauuuugcgacaugcugcgccucuucgauuuuaacaagcaggccaucagacggcugaaagcuccugcccagaugagcauccagcuuauuaauaaggcggugaacgcccugaucaaugaccaacucauuaugaagaaccaucugcgcgauaucaugugcauucccuauuguaauuacuccaaauauugguaccugaaccacacaagcaccggcagaacgucucucccucggugcuggcuggucuccaaugggagcuaccuuaacgagacacacuucucugacgacaucgaacagcaggcugauaauaugaucaccgagaugcugcaaaaggaguaucucgaccgccagggaaaaaccccgcugggccugguggaucuuuucguguuuagcacauccuucuaccucauuucuaucuuucugcaucuggucaagauucccacccacagacauaucguugggaaaccuugucccaagccucaccggcucaaccacaugggaauuugcagcuguggccuguauaaacagcccggcgugccggugcgcuggaagagaugaggacuagucccuguucccagagcccacuuuuuuuucuuuuuuugaaauaaaauagccugucuuucagaucucaaaggcucuuuucagagccaccaaaaaaaaaaaaaaaaaaaaaaaaaaaaaaaaaaaaaaaaaaaaaaaaaaaaaaaaaaaaaaaaagaauu

SEQ ID NO: 28699 - RNA, 1736 nt, Artificial Sequence
  mRNA product Design a-2 (hSL-A64-N5) comprising derived and/or modified sequence from LASV(G1180-SLE-2010;Clade IV)__AIT17168__GPCmut5 (opt5)
aggagaguccgcucagccagguugcagaagcggcuuagcguguguccuaaucuucucucugcguguagguaggccugugccgcaaacaagcuuaccaugggccagaucgugaccuucuuucaagaggucccccacguuauugaagaggugaugaacaucgugcugauugcccucagcauccuggcuguccuuaaggggcuguacaauuucgccacaugcggacucgugggccugcuuacguuucugcuccugugugggagauccugcaccgcgucucgguauaaaggaguuuacgaacugcagacacucgagcugaacauggaaacccuuaauaugacaaugccucugagcuguaccaagaacaauucccaucacuauauuauggugggcaacgagacagggcucgagcugacccuuacgaauaccucuaucaucaaccauaaauucugcaaucugagcgacgcucacaagaaaaaccucuacgaucaugcccugauguccauuaucucuacauuucaccugagcauuccgaauuucaaccaguaugaagccauguccugugacuuuaauggaggcaagaucagcguccaguacaaccucucucacuccuaugcuggcgaugccgcuaaucauugcgggaccguggccaacggaguucugcaaacauucaugcgcauggcguggggcgggagcuacauugcccuugacucuggauguggcuccugggauugcaucaugaccagcuaccaguaucugauuauccagaacacgacaugggaggaccacugucaguuuucuagacccuccccuaucggguaccucggacugcuuagccaacggacccgcgauauuuauaucuccagacggcugcucggcacauucaccuggacccugucugacagcgaaggcaaggauacacccgggggauacugccugacgcgcuggaugcucauugaggcugagcugaaauguuuuggcaauaccgccguggcuaagugcaacgaaaaacaugacgaggaguucugcgauaugcuuagacuguuugacuucaauaagcaggccauccagcggcucaaagcgccugcccagauguccauucaacugaucaacaaggcugucaaugcccuuaucaacgaucagcugauuaugaagaaucaccuccgcgacaucauguguauucccuauugcaacuacagcaaauauugguaccugaaucacacaaccacagggaagaccucucugccuaaauguuggcucguguccaacggaagcuaccugaaugaaacgcauuucucugacgauaucgaacagcaagcugacaacaugauuacagagaugcuucagaaggaguauauggaaagacagggcaaaaccccgcuggggcucguggaucuguuugucuucagcaccuccuuuuaccugaucucuaucuuccuucaccucguuaagauucccacacaucggcacaucgugggaaaaagcugcccuaagccccaucgccugaaucacaugggcauuuguuccugcggccuguauaagcagccuggggugcccgucaaauggaagagaugaggacuagucccuguucccagagcccacuuuuuuuucuuuuuuugaaauaaaauagccugucuuucagaucucaaaggcucuuuucagagccaccaaaaaaaaaaaaaaaaaaaaaaaaaaaaaaaaaaaaaaaaaaaaaaaaaaaaaaaaaaaaaaaaagaauu

SEQ ID NO: 28700 - RNA, 1736 nt, Artificial Sequence
  mRNA product Design a-2 (hSL-A64-N5) comprising derived and/or modified sequence from LASV(G1442-SLE-2011;Clade IV)__AIT17180__GPCmut5 (opt5)
aggagaguccgcucagccagguugcagaagcggcuuagcguguguccuaaucuucucucugcguguagguaggccugugccgcaaacaagcuuaccaugggccagaucgugaccuucuuucaagaggucccccacguuauugaagaggugaugaacaucgugcugauugcccucagcauccuggcuguccuuaaggggcuguacaauguggccacaugcggacucauuggccugguuacguuccuucugcucugugggagauccugcaccacaacccuguauaaaggaguguacgaacugcagacacucgagcugaacauggaaacccuuaauaugacaaugccucugucuuguaccaagaacaauagccaucacuauauccgggucggcaacgagacggggcucgagcugacccuuacaaauaccuccaucauuaaccauaaauuuugcaaucugucugacgcgcacaagaaaaaccucuacgaucaugcucugaugagcaucauuuccacauuccaccugucuaucccgaauuuuaaccaguaugaagccaugagcugugacuucaauggaggcaagauuuccgugcaguacaaccucagccacucuuaugccggcgaugcugccaaucauugcgggaccguugcuaacggagugcugcaaacguuuaugcgcauggccuggggcggguccuacaucgcgcuugacagcggauguggcaacugggauugcauuaugacaucuuaccaguaucugaucauccagaauaccacaugggacgaucacugucaguucuccagacccagcccuauuggguaccucggacugcuuucucaacggacccgcgacgucuauaucuccagacggcugcucggcaccuuuacauggacgcugagcgauuccgagggcaaggacacccccgggggauacugccugacacgcuggaugcucauugaagccgagcugaaauguuucggcaacaccgcuguggccaagugcaaugagaaacaugaugaagaguuuugcgacaugcuuagacuguucgauuuuaacaagcaggcuauccagcggcucaaagccccugcgcagaugucuauucaacugaucaauaaggccgugaacgcucuuaucaaugaccagcugauuaugaagaaccaccuccgcgacaucauguguauucccuauugcaauuacagcaaauauugguaccugaacaauacagccaccgggaagacgucccugccuaaauguuggcucaucagcaacggaucuuaccugaaugaaacacacuucuccgaugacauugagcaggaagcugauaacaugaucaccgagaugcuucaaaaggaguauauggaaagacagggcaaaaccccgcuggggcucgucgaccuguucguuuuuagcacaucuuucuaccugaucagcauuuuucuucaucucgugaagauccccacccaccggcauauugugggaaaauccugcccuaagccccaccgccugaaucauaugggcaucuguucuugcggccuguauaagcagccugggguccccgugagauggaaacggugaggacuagucccuguucccagagcccacuuuuuuuucuuuuuuugaaauaaaauagccugucuuucagaucucaaaggcucuuuucagagccaccaaaaaaaaaaaaaaaaaaaaaaaaaaaaaaaaaaaaaaaaaaaaaaaaaaaaaaaaaaaaaaaaagaauu

SEQ ID NO: 28701 - RNA, 1736 nt, Artificial Sequence
  mRNA product Design a-2 (hSL-A64-N5) comprising derived and/or modified sequence from LASV(G3010-SLE-2013;Clade IV)__AIT17344__GPCmut5 (opt5)
aggagaguccgcucagccagguugcagaagcggcuuagcguguguccuaaucuucucucugcguguagguaggccugugccgcaaacaagcuuaccaugggccagaucgugaccuucuuucaagaggucccccacguuauugaagaggugaugaacaucgugcugauugcccucagcauccuggcuguccuuaaggggcuguacaauuucgccacaugcggacucgugggccugguuacguuucuucugcucugugggagauccugcaccacaucucuguauaaaggaguguacgaacugcagacccucgagcugaacauggaaacacuuaauaugaccaugccucugagcuguacaaagaacaauucccaucacuauauuauggucggcaacgagaccgggcucgagcugacgcuuaccaauacaucuaucaucaaccauaaauucugcaaucugagcgacgcgcacaagaaaaaccucuacaaucaugcucugauguccauuaucucuaccuuucaccugagcauuccgaacuucaaucaguaugaagccauguccugugauuuuaacggaggcaagaucagcgugcaguacaaucucucucacuccuaugccggcgacgcugccagccauugcgggacaguugcuaacggagugcugcaaaccuucaugcggauggccuggggcgggucuuacauugcgcuugauuccggauguggcaagugggacugcaucaugacgagcuaccaguaucugauuauccagaacacaaccugggaggaucacugucaguuuucucgccccuccccuaucggguaccucggacugcuuagccaaagaacacgggacauuuauaucucccgcagacugcucggcaccuucaccuggacacugucugauagcgaaggcaaagacacgcccgggggauacugccugacccgguggaugcucauugaggccgagcugaaguguuuuggcaauacagcugucgccaaaugcaacgaaaagcaugaugaggaguucugcgacaugcuucgccuguuugauuucaauaaacaggcuauccagagacucaagaccccugcccagauguccauucaacugaucaacaaggcggugaaugcccuuaucaacgaccagcugauuaugaaaaaucaccuccgggauaucauguguauucccuauugcaacuacagcaaguauugguaccugaaucacacaaccacggggaaaacaucucugccuaaguguuggcucguguccaacggaagcuaccugaaugaaacccauuucucugacgacaucgaacagcaagcugauaacaugauuaccgagaugcuucagaaagaguauauggaacgccagggcaagacaccgcuggggcucgucgaccuguuuguuuucagcaccuccuuuuaccugaucucuaucuuccuucaccucgugaaaauucccacacauagacacaucgugggaaagagcugcccuaagccccaucggcugaaucacaugggcauuuguuccugcggccuguauaaacagccugggguccccgugcgcuggaagagaugaggacuagucccuguucccagagcccacuuuuuuuucuuuuuuugaaauaaaauagccugucuuucagaucucaaaggcucuuuucagagccaccaaaaaaaaaaaaaaaaaaaaaaaaaaaaaaaaaaaaaaaaaaaaaaaaaaaaaaaaaaaaaaaaagaauu

SEQ ID NO: 28702 - RNA, 1736 nt, Artificial Sequence
  mRNA product Design a-2 (hSL-A64-N5) comprising derived and/or modified sequence from LASV(G502-SLE-2009;Clade IV)__AIT17126__GPCmut5 (opt5)
aggagaguccgcucagccagguugcagaagcggcuuagcguguguccuaaucuucucucugcguguagguaggccugugccgcaaacaagcuuaccaugggccagaucgugaccuucuuucaagaggucccccacguuauugaagaggugaugaacaucgugcugauugcccucagcauccuggcuguccuuaaggggcuguacaauuucgccacaugcggacucgugggccugcuuacguuucugcuccugugugggagauccugcaccacaggacuguauaaaggcguuuacgaacuccagacccuggagcuuaacauggaaacacugaauaugaccaugccucucucuuguacaaagaacaauagccaucacuauauuaugguggggaacgagaccggacuggagcuuacgcugaccaauacauccaucaucaaccauaaauucugcaaucucucugacgcgcacaagaaaaaccuguacgaucaugcucugaugagcauuaucuccaccuuucaccucucuauuccgaauuucaaccaguaugaagccaugagcugugacuuuaauggcggcaagaucuccguccaguacaaccugagccacucuuaugccggggaugcugccgaccauugcggaacaguggcuaauggcguucuucaaaccuucaugcggauggccuggggaggguccuacauugcgcuggauagcggcugugggcgcugggacugcaucaugacgucuuaccaguaucucauuauccagaacacaaccugggaggaucacugucaguuuuccagacccagcccuaucggauaccugggccuucugucucaacggacacgcgacauuuauaucuccagacggcuccugggcaccuucaccuggacacugagcgauuccgaagggaaggacacgcccggaggcuacugccucacccgcuggaugcugauugaggccgagcuuaaauguuuugggaacacagcuguggccaagugcaaugaaaaacaugaugaggaguucugcgacaugcugagacucuuugauuucaacaagcaggcuauccagcggcugaaagccccugcgcagaugucuauucaacuuaucaauaaggccgucaacgcucugaucaaugaccagcucgugaugaagaaccaucugcgcgacauuauguguauccccuauugcaauuacagcagauauugguaccugaaccacaccacaaccggacggacgucccucccuaaauguuggcuggugagcaauggcucuuaccuuaacgaaacacacuucuccgaugacauugaacagcaagccgauaauaugaucaccgagaugcugcagaaggaguauauggaacgccaggggaaaaccccgcucggacuggucgaccuguuuguuuucagcacaucuuuuuaccuuauuagcaucuuccuccaccuggugaagauccccacccauagacacauugugggcaaauccugcccuaagccccaucggcugaaccacaugggcaucuguucuugcgggcucuauaaacagccuggaguccccgugaaguggaagcgcugaggacuagucccuguucccagagcccacuuuuuuuucuuuuuuugaaauaaaauagccugucuuucagaucucaaaggcucuuuucagagccaccaaaaaaaaaaaaaaaaaaaaaaaaaaaaaaaaaaaaaaaaaaaaaaaaaaaaaaaaaaaaaaaaagaauu

SEQ ID NO: 28703 - RNA, 1736 nt, Artificial Sequence
  mRNA product Design a-2 (hSL-A64-N5) comprising derived and/or modified sequence from LASV(G733-SLE-2010;Clade IV)__AIT17154__GPCmut5 (opt5)
aggagaguccgcucagccagguugcagaagcggcuuagcguguguccuaaucuucucucugcguguagguaggccugugccgcaaacaagcuuaccaugggccagaucgugaccuucuuucaagaggucccccacguuauugaagaggugaugaacaucgugcugauugcccucagcauccuggcuguccuuaaggggcuguacaauuucgccacaugcggaauugugggccucguuuccuuucugcuucugugugggagaucuugcacgaccagccucuauaaaggaguguacgaacugcagacacuggagcucaacauggaaacccugaauaugacaaugccucuuuccuguaccaagaacaauucucaucacuauaucauggucggcaacgagacagggcuggagcucacccugacgaauaccagcaucauuaaccauaaauucugcaaucuuuccgacgcgcacaagaaaaaccuguacgaucaugcucucaugucuaucauuagcacauuucaccuguccaucccgaauuucaaccaguaugaagccaugagcugugacuuuaauggaggcaagauuucugugcaguacaaccugucccacagcuaugccggcgaugcugccaaucauugcgggaccaucgcuaacggaguucuccaaacauucaugcggauggccuggggcgggucuuacauugcgcuggacuccggaugugaucgcugggacugcaucaugaccagcuaccaguaucuuaucauucagaacacgacaugggaggaucacugucaguuuucuagacccuccccuaucggcuaccuggggcuccugagccaacggacccgcgacauuuauaucuccagacggcuucugggaacauucaccuggacccucucugauagcgaaggcaaggacacacccggcggguacugccugacgcgcuggaugcugauugaggccgagcucaaauguuuuggaaauaccgcuguggccaagugcaacgaaaaacaugaugaggaguucugcgacaugcugagacuuuuugauuucaauaagcaggcuauccagcggcugaaagccccugcgcagauguccauccaacucauuaacaaggccgucaaugcucugaucaacgaccagcuuauuaugaagaaucaucugcgcgacaucauguguauucccuauugcaacuacagcaaauauugguaccucaaucacacaaccacaggcaagaccucucugccuaaauguuggcugguguccaacgggagcuaccucaaugaaacgcacuucucugaugacaucgaacagcaagccgauaacaugaucacagagaugcugcagaaggaguauauggaaagacagggaaaaaccccgcuuggccugguggaccucuuugucuucagcaccuccuuuuaccugauuucuaucuuccugcaccuuguuaagauucccacacaucggcacgugguggggaaaagcugcccuaagccccaucgccucaaucacaugggaaucuguuccugcggccuguauggccagccugggguccccgugaaguggaaaagaugaggacuagucccuguucccagagcccacuuuuuuuucuuuuuuugaaauaaaauagccugucuuucagaucucaaaggcucuuuucagagccaccaaaaaaaaaaaaaaaaaaaaaaaaaaaaaaaaaaaaaaaaaaaaaaaaaaaaaaaaaaaaaaaaagaauu

SEQ ID NO: 28704 - RNA, 1736 nt, Artificial Sequence
  mRNA product Design a-2 (hSL-A64-N5) comprising derived and/or modified sequence from MOPV/LASV reassortant(IGS-1;Clade IV)__AFY05576__GPCmut5 (opt5)
aggagaguccgcucagccagguugcagaagcggcuuagcguguguccuaaucuucucucugcguguagguaggccugugccgcaaacaagcuuaccaugggccagaucgugaccuucuuucaagaggucccccacguuauugaagaggugaugaacaucgugcugauugcccucagcguccuggcugugcuuaaggggcuguacaauuucgccacaugcggacucguuggccuggugacguuucuucugcucugugggagauccugcaccacaucucuguauaaaggagucuacgaacugcagacccucgagcugaacauggaaacacuuaauaugaccaugccucugagcuguacaaagaacaauucccaucacuauaucauggugggcaacgagaccgggcucgagcugacgcuuaccaauacaucuauuaucaaccauaaauucugcaaucugagcgacgcgcacaagaaaaaccucuacgaucaugcucugauguccaucauuucuaccuuucaccugagcaucccgaauuucaaccaguaugaagccauguccugugacuuuaauggaggcaagauuagcguucaguacaaccucucucacuccuaugccggcgaugcugccaaucauugcgggacaguggcuaacggaguccugcaaaccuucaugcggauggccuggggcgggagcuacaucgcgcuugacucuggauguggcaacugggauugcauuaugacguccuaccaguaucugaucauucagaauacaaccugggaggaccacugucaguuuagccgccccucuccuaucggguaccucggacugcuuucccaaagaacacgggauaucuauauuagccgcagacugcucggcaccuucaccuggacacuguccgacucugaaggcgaggauacgcccgggggauacugccugacccgguggaugcucaucgaggccgaacugaaguguuuuggcaacacagcuguggccaaaugcaaugagaagcaugacgaagaguucugcgauaugcuucgccuguuugacuucaacaaacaggcuauucagagacucaaggccccugcgcagaugagcauccaacugauuaauaaagccgugaacgcucuuaucaaugaucagcugaucaugaagaaccaccuccgggacauuauguguauccccuauugcaauuacuccaaguauugguaccugaaccacaccacaaccgggcgcacgagccugccuaaauguuggcucgucucuaauggauccuaccugaacgaaacacauuucagcgacgauauugagcagcaagccgacaauaugaucaccgagaugcuucagaaggaauauauggagagacagggcaaaaccccgcuggggcucguugaucuguuuguguucucuaccagcuuuuaccugauuuccaucuuccuucaccucgugaagauccccacacaucggcacauugucggaaaaucuugcccuaagccccaucgccugaaccacaugggcaucuguagcugcggccuguauaaacagccuggggugcccguuaaguggaagagaugaggacuagucccuguucccagagcccacuuuuuuuucuuuuuuugaaauaaaauagccugucuuucagaucucaaaggcucuuuucagagccaccaaaaaaaaaaaaaaaaaaaaaaaaaaaaaaaaaaaaaaaaaaaaaaaaaaaaaaaaaaaaaaaaagaauu

SEQ ID NO: 28705 - RNA, 1736 nt, Artificial Sequence
  mRNA product Design a-2 (hSL-A64-N5) comprising derived and/or modified sequence from LASV(LM765-SLE-2012;Clade IV)__AIT17814__GPCmut5 (opt5)
aggagaguccgcucagccagguugcagaagcggcuuagcguguguccuaaucuucucucugcguguagguaggccugugccgcaaacaagcuuaccaugggccagaucgugaccuucuuucaagaggucccccacguuauugaagaggugaugaacaucgugcugauugcccucagcauccuggcuguccuuaaggggcuguacaauuucgccacaugcggacucgugggccugguuacguuucuucugcucugugggagauccugcaccacaucucuguauaaaggaguguacgaacugcagacccucgagcugaacauggaaacacuuaauaugaccaugccucugagcuguacaaagaacaauucccaucacuauauuauggucggcaacgagaccgggcucgagcugacgcuuaccaauacaucuaucaucgaccauaaauucugcaaccugagcgaugcgcaccggaagaaucucuacgaccaugcucugauguccauuaucucuaccuuucaccugagcauuccgaacuucaaucaguaugaagccauguccugugauuuuaacggaggcaaaaucagcgugcaguacaaucucucucacuccuaugccaaggacgcugccgaucauugcggcacaguugcuaacggggugcugcaaaccuucaugcgcauggccuggggaggcagcuacauugcgcuugacucuggguguggaagaugggauugcaucaugacguccuaccaguaucugauuauccagaauacaaccugggaggaccacugucaguuuagccggcccucuccuaucggcuaccucgggcugcuuucccaacgcacaagagauauuuauaucagccggcgccugcucggaaccuucaccuggacacuguccgacucugaaggcaaggauacgcccggcggguacugccugaccagauggaugcucauugaggccgagcugaaauguuuuggaaacacagcugucgccaagugcaacgaaaaacaugacgaggaguucugcgauaugcuucggcuguuugacuucaauaagcaggcuauccagcgccucaaagccccugcgcagaugagcauucaacugaucaacaaggccgugaaugcucuuaucaacgaccagcugauuaugaagaaucaccucagagauaucauguguauucccuauugcaacuacuccaaauauugguaccugaaucacaccacaaccggcaagacgagccugccuaaauguuggcucgugucuaacggguccuaccugaaugaaacacauuucagcgacgauaucgaacagcaagccgacaacaugauuaccgagaugcuucagaaggaguauauggaacggcagggaaaaaccccgcugggccucgucgaucuguuuguuuucucuaccagcuuuuaccugaucuccaucuuccuucaccucgugaagauucccacacaucgccacaucguggggaaaccuugccccaagccucauagacugaaucacaugggaauuuguucuugcggccuguauaagcagcccggcgucccggugaaauggaagcggugaggacuagucccuguucccagagcccacuuuuuuuucuuuuuuugaaauaaaauagccugucuuucagaucucaaaggcucuuuucagagccaccaaaaaaaaaaaaaaaaaaaaaaaaaaaaaaaaaaaaaaaaaaaaaaaaaaaaaaaaaaaaaaaaagaauu

SEQ ID NO: 28706 - RNA, 1736 nt, Artificial Sequence
  mRNA product Design a-2 (hSL-A64-N5) comprising derived and/or modified sequence from LASV(LM776-SLE-2012;Clade IV)__AIT17824__GPCmut5 (opt5)
aggagaguccgcucagccagguugcagaagcggcuuagcguguguccuaaucuucucucugcguguagguaggccugugccgcaaacaagcuuaccaugggccagaucgugaccuucuuucaagaggucccccacguuauugaagaggugaugaacaucgugcugauugcccucagcauccuggcuguccuuaaggggcuguacaauuucgccacaugcggacucgugggccugguuacguuucuucugcucugugggagauccugcaccacaucuguguauaaaggagucuacgaacugcagacccuggagcucaacauggaaacacugaauaugaccaugccucuuagcuguacaaagaacaauucccaucacuauauuauggugggcaacgagaccgggcuggagcucacgcugaccaauacaucuaucaucaaccauaaauucugcaaucuuagcgacgcgcacaagaaaaaccuguacgaucaugcucucauguccauuaucucuaccuuucaccugagcauuccgaauuucaaccaguaugaagccauguccugugacuuuaauggaggcaagaucagcguucaguacaaccugucucacuccuaugccggcgaugcugccaaucauugcgggacaguggcuaacggaguccuccaaaccuucaugcggauggccuggggcgggagcuacauugcgcuggacucuggauguggcaagugggauugcaucaugacguccuaccaguaucuuauuauccagaacacaaccugggaggaccacugucaguuuagccgccccucuccuaucggguaccugggacuccugucccaaagaacacgggauauuuauaucagccgcagacuucugggcaccuucaccuggacacucuccgacucugaaggcaaagauacgcccgggggauacugccugacccgguggaugcugauugaggccgagcucaaguguuuuggcaauacagcuguggccaaaugcaacgaaaagcaugacgaggaguucugcgauaugcugcgccuuuuugacuucaauaaacaggcuauccagagacugaaggccccugcgcagaugagcauucaacucaucaacaaggccgugaaugcucugaucaacgaucagcuuauuaugaaaaaucaucugcgggacaucauguguauucccuauugcaacuacuccaaguauugguaccucaaucacaccacaaccgggaaaacgagccugccuaaguguuggcuggucucuaacggauccuaccucaaugaaacacacuucagcgacgauaucgaacagcaagccgacaacaugauuaccgagaugcugcagaaagaguauauggaacgccagggcaagaccccgcuugggcugguugaucucuuuguguucucuaccagcuuuuaccugaucuccaucuuccugcaccuugugaaaauucccacacauagacacaucgucggaaagucuugcccuaagccccaucggcucaaucacaugggcauuuguagcugcggccuguauaaacagccuggggugcccguucgcuggaagagaugaggacuagucccuguucccagagcccacuuuuuuuucuuuuuuugaaauaaaauagccugucuuucagaucucaaaggcucuuuucagagccaccaaaaaaaaaaaaaaaaaaaaaaaaaaaaaaaaaaaaaaaaaaaaaaaaaaaaaaaaaaaaaaaaagaauu

SEQ ID NO: 28707 - RNA, 1736 nt, Artificial Sequence
  mRNA product Design a-2 (hSL-A64-N5) comprising derived and/or modified sequence from LASV(Mad39;Clade IV)__ANH09722__GPCmut5 (opt5)
aggagaguccgcucagccagguugcagaagcggcuuagcguguguccuaaucuucucucugcguguagguaggccugugccgcaaacaagcuuaccaugggccagaucgugaccuucuuucaagaggucccccacguuauugaagaggugaugaacaucgugcugauugcccucagcauccuggcuguccuuaaggggcuguacaauguggccacaugcggacucauuggccugguuacguuccuucugcucugugggagauccugcaccacaacccuguauaaaggaguguacgaacugcaggcgcucgagcugaacauggaaacacuuaauaugaccaugccucugucuuguacaaagaacaauagccaucacuauauccgggucggcaacgagaccgggcucgagcugacgcuuaccaauacaucccugaucaaccauaaauuuugcaaucucucugacgcucacaagaaaaaccuguacgaucaugcccugaugagcauuaucuccaccuuccaccucucuauuccgaauuuuaaccaguaugaagccaugagcugugacuucaaugauggaaagaucuccgugcaguacaaccugagccacacauaugcuggcgacaccgccaaucauugcggcacgguugcuaacggggugcuucaaacauuuaugcgcauggccuggggaggcucuuacauugcgcuggauuccggguguggaggcugggacugcaucaugaccagcuaccaguaucucauuauccagaacacaaccugggaggaucacugucaguucucuagacccuccccuaucggguaccugggacuucugagccaacggacccgcgacauuuauaucucuagacggcuccugggcacauuuacguggacccuguccgauagcgaaggcaaggacacacccgggggauacugccucacccgcuggaugcugauugaggccgagcuuaaauguuucggcaauacagcugucgccaagugcaacgaaaaacaugaugaggaauuuugcgacaugcugagacucuucgauuuuaauaagcaggcuauccagcggcugaaagccccugcgcagauguccauucaacuuaucaacaaggccgugaaugcucugaucaacgaccagcucauuaugaagaaucaucugcgcgacaucauguguauucccuauugcaacuacucuaaauauugguaccugaaucacaccgugacggggaagacaagccucccuaaauguuggcuggucuccaacggaagcuaccuuaaugagacccacuucucugaugacaucgaacagcaagccgauaacaugauuaccgagaugcugcagaaggaguauauggaaagacagggcaaaacaccgcucgggcugguugaccuguucguguuuuccaccagcuucuaccuuaucucuaucuuucuccaccuggugaagauucccacacaucggcacgucgugggaaaaccuugccccaagccucaucgccugaaucacaugggcaucuguagcugcggcuucuauaagcagcccgggguuccggugagauggaaacggugaggacuagucccuguucccagagcccacuuuuuuuucuuuuuuugaaauaaaauagccugucuuucagaucucaaaggcucuuuucagagccaccaaaaaaaaaaaaaaaaaaaaaaaaaaaaaaaaaaaaaaaaaaaaaaaaaaaaaaaaaaaaaaaaagaauu

SEQ ID NO: 28708 - RNA, 1736 nt, Artificial Sequence
  mRNA product Design a-2 (hSL-A64-N5) comprising derived and/or modified sequence from LASV(Z0947-SLE-2011;Clade IV)__AIT17840__GPCmut5 (opt5)
aggagaguccgcucagccagguugcagaagcggcuuagcguguguccuaaucuucucucugcguguagguaggccugugccgcaaacaagcuuaccaugggccagaucgugaccuucuuucaagaggucccccacguuauugaagaggugaugaacaucgugcugauugcccucagcauccuggcuguccuuaaggggcuguacaauuucgccacaugcggacucgugggccugguuacguuucuucugcucugugggagauccugcaccauuucucuguauaaaggaguguacgaacugcagacacucgagcugaacauggaaacccuuaauaugacaaugccucugagcuguaccaagaacaauucccaucacuauaucauggucggcaacgagacagggcucgagcugacccuuacgaauaccucuaucauuaaccauaaauucugcaaucugagcgacgcgcacaagaaaaaccucuacgaucaugcucugauguccaucauuucuacauuucaccugagcaucccgaauuucaaccaguaugaagccauguccugugacuuuaauggaggcaagauuagcgugcaguacaaccucucucacuccuaugccggcgaugcugccaaucauugcgggaccguugcuaacggagugcugcaaacauucaugcggauggccuggggcgggagcuacaucgcgcuugacucuggaugugaucgcugggacugcauuaugaccuccuaccaguaucugaucauccagaacacgacaugggaggaucacugucaguuuagcagacccucuccuauuggcuaccucgggcugcuuucccaacggacccgcgacaucuauauuagcagacggcugcucggaacauucaccuggacccuguccgauucugaaggcaaggacacacccggcggguacugccugacgcgcuggaugcucaucgaggccgagcugaaauguuuuggaaauaccgcugucgccaagugcaacgaaaaacaugaugaggaguucugcgacaugcuuagacuguuugauuucaauaagcaggcuauucagcggcucaaagccccugcgcagaugagcauccaacugaucaacaaggccgugaaugcucuuauuaacgaccagcugaucaugaagaaucaccuccgcgacauuauguguauccccuauugcaacuacuccaaauauugguaccugaaucacacaaccacaggcaagaccagccugccuaaauguuggcucgugucuaacggguccuaccugaaugaaacgcauuucagcgaugacauugaacagcaagccgauaacaugaucacagagaugcuucagaaggaguauauggaaagacagggaaaaaccccgcugggccucgucgaccuguuuguuuucucuaccagcuuuuaccugaucuccauuuuccuucaccucgugaagauccccacacaucggcacauuguggggaaaccuugccccaagccucaucgccugaaucacaugggaaucuguucuugcggccuguauaagcagcccggcgucccggugaaauggaagagaugaggacuagucccuguucccagagcccacuuuuuuuucuuuuuuugaaauaaaauagccugucuuucagaucucaaaggcucuuuucagagccaccaaaaaaaaaaaaaaaaaaaaaaaaaaaaaaaaaaaaaaaaaaaaaaaaaaaaaaaaaaaaaaaaagaauu

SEQ ID NO: 28709 - RNA, 1767 nt, Artificial Sequence
  mRNA product Design a-2 (hSL-A100) comprising derived and/or modified sequence from LASV(Josiah;Clade IV)__NP_694870__GPCmut5 (opt1)
aggagaguccgcucagccagguugcagaagcggcuuagcguguguccuaaucuucucucugcguguagguaggccugugccgcaaacaagcuuaccaugggccagaucgugaccuucuuccaggaggucccccacgugaucgaggaggugaugaacaucguccugaucgcccucagcgugcuggccgugcugaaggggcucuacaacuucgcgaccugcggccuggucgggcuggugacguuccuccugcugugcggccgcuccugcaccaccagccucuacaaggggguguacgagcugcagacccuggagcucaacauggagacgcugaacaugaccaugccgcuguccugcaccaagaacaacagccaccacuacaucauggucggcaacgagaccggccucgagcugacgcugaccaacaccuccaucaucaaccacaaguucugcaaccucagcgacgcccacaagaagaaccuguacgaccacgcccugauguccaucaucagcaccuuccaccucuccauccccaacuucaaccaguacgaggccaugagcugcgacuucaacgggggcaagaucuccgugcaguacaaccugagccacuccuacgccggggacgcggccaaccacugcggcacgguggccaacgggguccugcagaccuucaugcggauggccuggggcggcagcuacaucgcgcucgacuccgggugcggcaacugggacugcaucaugaccagcuaccaguaccugaucauccagaacaccacgugggaggaccacugccaguucucccggcccagccccaucggguaccugggccuccugucccagcgcacccgggacaucuacaucagccgccggcugcucggcaccuucaccuggacgcugagcgacuccgaggggaaggacaccccgggcggguacugccugacccgcuggaugcucaucgaggccgagcugaagugcuucggcaacaccgccguggccaagugcaacgagaagcacgacgaggaguucugcgacaugcugcggcuguucgacuucaacaagcaggccauccagcgccugaaggcgcccgcccagaugagcauccagcugaucaacaaggccgugaacgcccucaucaacgaccagcugaucaugaagaaccaccuccgggacaucaugugcauccccuacugcaacuacuccaaguacugguaccucaaccacacgaccaccggccgcaccagccugcccaagugcuggcuggucuccaacggcagcuaccucaacgagacgcacuucuccgacgacaucgagcagcaggccgacaacaugaucaccgagaugcugcagaaggaguacauggagcggcaggggaagacgccccugggccucguggaccuguucguguucagcaccuccuucuaccugaucagcaucuuccugcaccucgucaagaucccgacccaccgccacaucguggggaaguccugccccaagccccaccggcugaaccacaugggcaucugcagcugcgggcuguacaagcagcccggcgugccggucaaguggaagcgcugaggacuagucccuguucccagagcccacuuuuuuuucuuuuuuugaaauaaaauagccugucuuucagaucucaaaggcucuuuucagagccaccaaaaaaaaaaaaaaaaaaaaaaaaaaaaaaaaaaaaaaaaaaaaaaaaaaaaaaaaaaaaaaaaaaaaaaaaaaaaaaaaaaaaaaaaaaaaaaaaaaaaa

SEQ ID NO: 28710 - RNA, 1764 nt, Artificial Sequence
  mRNA product Design a-2 (hSL-A100) comprising derived and/or modified sequence from LASV(LP;Clade I)__AAF86701__GPCmut5 (opt1)
aggagaguccgcucagccagguugcagaagcggcuuagcguguguccuaaucuucucucugcguguagguaggccugugccgcaaacaagcuuaccaugggccagaucaucaccuucuuccaggaggugccccacgucaucgaggaggugaugaacaucgugcugaucgcccucagccugcuggccauccucaaggggcuguacaacaucgcgaccugcggcaucaucgggcuggucgccuuccucuuccugugcggcaaguccugcagccugacgcucaagggcggguacgagcugcagacccuggagcucaacauggagacccugaacaugaccaugccgcuguccugcacgaagaacagcucccaccacuacauccgcgugggcaacgagaccgggcucgagcugacccugaccaacacgagcaucaucaaccacaaguucugcaaccucuccgacgcccacaagaagaaccuguacgaccacgcccugaugagcaucaucuccaccuuccaccucagcauccccaacuucaaccaguacgaggccauguccugcgacuucaacggcgggaagaucagcgugcaguacaaccugucccacagcuacgcgggcgacgccgccgagcacugcgggaccgucgccaacggcgugcugcagaccuucaugcggauggcguggggcgggcgcuacaucgcccucgacuccggcugcgggaacugggacugcaucaugacgagcuaccaguaccugaucauccagaacaccaccugggaggaccacugccaguucucccggcccagccccaucggcuaccugggccuccugucccagcgcacccgggacaucuacaucagccgccggcugcucgggacguucaccuggacccugagcgacuccgagggcaacgagacccccgggggcuacugccugacgcgcuggaugcucaucgaggccgagcugaagugcuucgggaacaccgccguggccaagugcaacgagaagcacgacgaggaguucugcgacaugcugcggcuguucgacuucaacaagcaggcgauccgccggcugaaggcccccgcccagaugagcauccagcugaucaacaaggccgucaacgcccucaucaacgaccagcugaucaugaagaaccaccuccgcgacaucaugugcauccccuacugcaacuacuccaaguacugguaccucaaccacaccagcuccggccggaccagccugcccaagugcuggcugaucuccaacgggagcuaccucaacgagacgcaguucuccgacgacaucgagcagcaggcggacaacaugaucaccgagaugcugcagaaggaguacaucgagcgccagggcaagaccccgcuggggcucguggacaucuucaucuucagcaccuccuucuaccugaucagcaucuuccugcaccugaucaagaucccgacgcaccggcacaucgugggcaagcccugccccaagccccaccgccucaaccacaugggggucugcuccugcggccuguacaagcacccgggcgugcccaccaaguggaagcggugaggacuagucccuguucccagagcccacuuuuuuuucuuuuuuugaaauaaaauagccugucuuucagaucucaaaggcucuuuucagagccaccaaaaaaaaaaaaaaaaaaaaaaaaaaaaaaaaaaaaaaaaaaaaaaaaaaaaaaaaaaaaaaaaaaaaaaaaaaaaaaaaaaaaaaaaaaaaaaaaaaaaa

SEQ ID NO: 28711 - RNA, 1764 nt, Artificial Sequence
  mRNA product Design a-2 (hSL-A100) comprising derived and/or modified sequence from LASV(803213;Clade II)__AAF86703__GPCmut5 (opt1)
aggagaguccgcucagccagguugcagaagcggcuuagcguguguccuaaucuucucucugcguguagguaggccugugccgcaaacaagcuuaccaugggccagaucaucaccuucuuccaggaggugccccacgucaucgaggaggugaugaacaucgugcugaucgcccucagccugcuggccauccucaaggggaucuacaacgucgcgaccugcggccuguucgggcugaucuccuuccuccugcugugcggccgcagcugcuccgugacguacaaggggguguacgagcuccagacccuggagcugaacauggccaaccucaacaugaccaugccgcugagcugcaccaagaacaacucccaccacuacaucauggucggcaacgagacgggccuggagcucacccugaccaacaccagcaucaucaaccacaaguucugcaaccuguccgacgcccacaagaagaaccucuacgaccacgcccugaugagcaucaucuccacguuccaccugagcauccccaacuucaaccaguacgaggccauguccugcgacuucaacgggggcaagaucagcgugcaguacaaccucucccacagcuucgcgguggacgccgccaaccacugcgggaccaucgccaacggcguccugcagaccuucaugcggauggcguggggcggguccuacaucgcccuggacagcggcugcgggaacugggacugcaucaugaccuccuaccaguaccucaucauccagaacacgaccugggaggaccacugccaguucagccgccccucccccaucggcuaccuggggcugcucagccagcggacccgcgacaucuacaucagccggcgccugcugggcaccuucacguggacccucuccgacagcgagggcaacgaggcccccgggggcuacugccugacccgguggaugcugaucgaggccgagcucaagugcuucgggaacaccgccguggcgaagugcaacgagaagcacgacgaggaguucugcgacaugcugcgccuguucgacuucaacaagcaggccaucaagcggcucaagacgcccgcccagauguccauccagcugaucaacaaggccgugaacgcccugaucaacgaccagcucaucaugaagaaccaccuccgcgacaucaugugcauccccuacugcaacuacagccgguacugguaccugaaccacaccgucaccgggaagaccucccugccccgcugcuggcuggugagcaacggcuccuaccugaacgagacgcacuucagcgacgacaucgagcagcaggcggacaacaugaucaccgagaugcuccagaaggaguacauggaccggcagggcaagaccccgcuggggcugguggaccucuucgucuucuccaccagcuucuaccugaucuccaucuuccugcaccuggugaagaucccgacgcaccgccacaucgugggcaagcccugccccaagccccaccggcucaaccacauggggaucugcagcugcggccuguacaagcacccggggguccccgugaaguggaagcgcugaggacuagucccuguucccagagcccacuuuuuuuucuuuuuuugaaauaaaauagccugucuuucagaucucaaaggcucuuuucagagccaccaaaaaaaaaaaaaaaaaaaaaaaaaaaaaaaaaaaaaaaaaaaaaaaaaaaaaaaaaaaaaaaaaaaaaaaaaaaaaaaaaaaaaaaaaaaaaaaaaaaaa

SEQ ID NO: 28712 - RNA, 1764 nt, Artificial Sequence
  mRNA product Design a-2 (hSL-A100) comprising derived and/or modified sequence from LASV(GA391;Clade III)__CAA36645__GPCmut5 (opt1)
aggagaguccgcucagccagguugcagaagcggcuuagcguguguccuaaucuucucucugcguguagguaggccugugccgcaaacaagcuuaccaugggccagaucgugaccuucuuccaggaggucccccacgugaucgaggaggugaugaacaucguccugaucgcccucagcauccuggccauccugaaggggcucuacaacguggcgaccugcggccugaucgggcuggugacguuccuccugcuguccggccgcagcugcucccucaucuacaaggggaccuacgagcugcagacccuggagcucaacauggagacccugaacaugacgaugccgcugagcugcaccaagaacaacucccaccacuacauccgggucggcaacgagaccggccucgagcugacccugacgaacaccagcauccucaaccacaaguucugcaaccuguccgacgcccacaagcgcaaccuguacgaccacagccucauguccaucaucagcaccuuccaccuguccauccccaacuucaaccaguacgaggccaugagcugcgacuucaacgggggcaagaucaccgugcaguacaaccugucccacagcuucgccguggacgccgcggggcacugcggcacgcucgccaacgggguccugcagaccuucaugcggauggccuggggcggcuccuacaucgcccuggacagcgggugcggcaacugggacugcaucaugaccuccuaccaguaccucaucauccagaacaccacgugggacgaccacugccaguucagccggcccucccccaucggguaccugggccugcucagccagcgcacccgggacaucuacaucagccgccggcugcugggcaccuucaccuggacgcucuccgacagcgaggggaacgagaccccgggcggguacugccugacccgcuggaugcugaucgaggcggagcucaagugcuucggcaacaccgccguggccaagugcaacgagaagcacgacgaggaguucugcgacaugcugcggcuguucgacuucaacaagcaggccauccgccggcucaagacgcccgcccagauguccauccagcugaucaacaaggcggugaacgcccugaucaacgaccagcucaucaugaagaaccaccuccgcgacaucaugugcauccccuacugcaacuacagccgguacugguaccugaaccacaccuccaccggcaagaccagccugccccgcugcuggcugaucuccaacggcagcuaccugaacgagacgaaguucuccgacgacaucgagcagcaggccgacaacaugaucaccgagaugcuccagaaggaguacaucgaccggcaggggaagacgccccugggccuggucgaccuguucguguucagcaccuccuucuaccucaucagcaucuuccugcaccuggugaagaucccgacccaccgccacaucgucgggaagcccugccccaagccccaccggcucaaccacaugggcaucugcuccugcgggcuguacaagcagccgggcgugcccgugcgcuggaagcggugaggacuagucccuguucccagagcccacuuuuuuuucuuuuuuugaaauaaaauagccugucuuucagaucucaaaggcucuuuucagagccaccaaaaaaaaaaaaaaaaaaaaaaaaaaaaaaaaaaaaaaaaaaaaaaaaaaaaaaaaaaaaaaaaaaaaaaaaaaaaaaaaaaaaaaaaaaaaaaaaaaaaa

SEQ ID NO: 28713 - RNA, 1767 nt, Artificial Sequence
  mRNA product Design a-2 (hSL-A100) comprising derived and/or modified sequence from LASV(AV;Clade V)__CCA30314__GPCmut5 (opt1)
aggagaguccgcucagccagguugcagaagcggcuuagcguguguccuaaucuucucucugcguguagguaggccugugccgcaaacaagcuuaccaugggccagaucgugaccuucuuccaggaggucccccacgugaucgaggaggugaugaacaucguccugaucgcccucagcauccuggccgugcugaaggggcucuacaacaucgcgaccugcggccugaucgggcugaucacguuccuccugcugugcggccgcuccugcagcuccaaccucuacaaggggguguacgagcugcagagccuggaccucaacauggagacccugaacaugaccaugccgcuguccugcaccaagaacaacagccaccacuacauccgggucggcaacgacacgggccucgagcugacccugaccaacaccuccauccucaaccacaaguucugcaaccugagcgacgcccacaagaaggaccuguacgaccacgcccucauguccaucaucagcacguuccaccuguccauccccaacuucaaccaguacgaggccaugagcugcgacuucaacgggggcaagaucuccgugcaguacaaccugagccacuccuacgccaucgacgcggccaaccacugcgggaccguggccaacggcauccuccagaccuucaugcgcauggccuggggcgggagcuacaucgcgcuggacuccggcugcgggaacugggacugcaucaugaccagcuaccaguaccugaucauccagaacacgaccugggagaaccacugccaguucucccgccccagccccaucggcuaccucgggcugcugagccagcggacccgcgacaucuacaucucccggcgccuccugggcaccuucacguggacccugagcgacuccgagggcaacgccacccccgggggcuacugccucacccgguggaugcugaucgaggccgagcugaagugcuucgggaacacggccgucgccaagugcaacgagaagcacgacgaggaguucugcgacaugcuccgccuguucgacuucaacaagcaggcgaucagccggcugaagucccccgcccagaugagcauccagcucaucaacaaggccgugaacgcccugaucaacgaccagcugaucaugaagaaccaccuccgcgacaucaugugcauccccuacugcaacuacuccaaguacugguaccugaaccacaccaucaccgggaagaccagccugcccaagugcuggcucguguccaacggcagcuaccugaacgagacgcacuucuccgacgacaucgagcagcaggccgacaacaugaucaccgagaugcugcagaaggaguacauggagcggcagggcaagaccccgcucgggcuggucgaccuguucguguucagcaccuccuucuaccugaucagcaucuuccuccgccuggugaagaucccgacgcaccggcacaucgucggcaagcccugccccaagccccaccgccugaaccacauggggaucugcuccugcggccucuacaagcagccgggggugcccgugcgguggaagcgcugaggacuagucccuguucccagagcccacuuuuuuuucuuuuuuugaaauaaaauagccugucuuucagaucucaaaggcucuuuucagagccaccaaaaaaaaaaaaaaaaaaaaaaaaaaaaaaaaaaaaaaaaaaaaaaaaaaaaaaaaaaaaaaaaaaaaaaaaaaaaaaaaaaaaaaaaaaaaaaaaaaaaa

SEQ ID NO: 28714 - RNA, 1764 nt, Artificial Sequence
  mRNA product Design a-2 (hSL-A100) comprising derived and/or modified sequence from LASV(Togo/2016/7082;Clade VI)__AMR44577__GPCmut5 (opt1)
aggagaguccgcucagccagguugcagaagcggcuuagcguguguccuaaucuucucucugcguguagguaggccugugccgcaaacaagcuuaccaugggccagaucaucaccuucuuccaggaggugccccacgucaucgaggaggugaugaacaucgugcugaucgcccucagccugcuggccauccucaagggggucuacaacguggcgaccugcggcaucaucgggcuggugacguuccuguuccucugcggccgcuccugcagccugaucuacaagggguccuacgagcugcagacccucgagcugaacauggagacccugaacaugaccaugccgcucagcugcacgaagaacuccagccaccacuacauccgggucggcaacgagaccggccuggagcugacccucaccaacacguccaucaucaaccacaaguucugcaaccugagcgacgcccacaagcgcaaccuguacgaccacgcccucauguccauccugagcaccuuccaccuguccauccccaacuucaaccaguacgaggccaugagcugcgacuucaacgggggcaagaucuccgugcaguacaaccucagccacgccuacgcgguggacgccgccgagcacugcgggaccgucgccaacggcgugcugcagaccuucaugcggauggcguggggcggguccuacaucgcccuggacagcggcugcgggaacugggacugcaucaugacguccuaccaguaccucaucauccagaacaccaccugggaggaccacugccaguucagccggcccucccccaucggcuaccuggggcugcucagccagcgcacccgggacaucuacaucagccgccggcugcugggcacguucaccuggacccucuccgacagcgagggcaacgagacccccgggggcuacugccugacgcgcuggaugcugaucgaggccgagcucaagugcuucgggaacaccgccguggccaagugcaacgagaagcacgacgaggaguucugcgacaugcugcggcuguucgacuucaacaagcaggcgauccagcgccucaagucccccgcccagaugagcauccagcugaucaacaaggccgucaacgcccugaucaacgaccagcucaucaugaagaaccaccuccgggacaugaugugcauccccuacugcaacuacuccaaguacugguaccugaaccacaccagcuccgggcgcaccagccugcccaagugcuggcugguguccaacggcagcuaccugaacgagacgcacuucuccgacgacaucgagcagcaggccgacaacaugaucaccgagaugcuccagaaggaguacaucgaccggcagggcaagaccccgcuggggcugguggaccucuucgucuucagcaccuccuucuaccugaucagcaucuuccugcaccugaucaagaucccgacgcaccgccacaucgugggcaagcccugccccaagccccaccggcucaaccacauggggaucugcuccugcggccuguacaagcagccgggggugcccacccgcuggaagcggugaggacuagucccuguucccagagcccacuuuuuuuucuuuuuuugaaauaaaauagccugucuuucagaucucaaaggcucuuuucagagccaccaaaaaaaaaaaaaaaaaaaaaaaaaaaaaaaaaaaaaaaaaaaaaaaaaaaaaaaaaaaaaaaaaaaaaaaaaaaaaaaaaaaaaaaaaaaaaaaaaaaaa

SEQ ID NO: 28715 - RNA, 1764 nt, Artificial Sequence
  mRNA product Design a-2 (hSL-A100) comprising derived and/or modified sequence from LASV(KAK-428;Clade n.d. (VII))__ANH09740__GPCmut5 (opt1)
aggagaguccgcucagccagguugcagaagcggcuuagcguguguccuaaucuucucucugcguguagguaggccugugccgcaaacaagcuuaccaugggccagaucgugaccuucuuccaggaggucccccacgugaucgaggaggugaugaacaucguccugaucgcccucagccugcuggccauccucaaggggcuguacaacuucgcgaccugcggcgugaucgggcugaucacguuccuccugcugugcggccgcuccugcagcgccaccuacaaggggcaguacgagcuccagacccuggagcugaacauggagucccucaacaugaccaugccgcugagcugcacgaagaacaacucccaccacuacauccgggccggcaacaacaccggccuggagcucacccugaccaacacgagcaucaucucccacaaguucugcaaccugagcgacgcccacaagaagaaccucuacgaccacacccugauguccaucaucaccaccuuccaccugagcauccccaacuucaaccaguacgaggccauguccugcgacuucaacgggggcaagaucagcauccaguacaaccucucccacagcuacgcgggggacgccgcccagcacugcggcacgguggccaacgggguccugcagaccuucaugcgcauggcguggggcggcuccuaccuggcccucgacagcgggugccgcggcugggacugcaucaucuccagcuaccaguaccugaucauccagaacaccaccugggacgaccacugccaguucucccggcccagccccaucggguaccugggcuucgugagccagaagacgcgcgacaucuacaucucccggcgccuccugggcaccuucaccuggacccugagcgacuccgaggggcacgacaugccgggcggguacugccucacgcgguggaugcugaucgaggccgaccugaagugcuucggcaacaccgccguggccaagugcaacgagaagcacgacgaggaguucugcgacauguggcgccucuucgacuucaacaagcaggcgauccagcggcugaaggcccccgcccagaugaacauccagcugaucaacaaggccgucaacgcccucaucaacgaccagcugaugaugaagaaccaccuccgcgacaucaugugcauccccuacugcaacuacagcaaguucugguaccugaacaacaccaccacgggccggaccucccugccccgcugcuggcugaucagcaacggcuccuaccucaacgagacccacuucagcgacgacaucgagcagcaggcggacaacaugaucaccgagaugcugcagaaggaguacauggaccggcaggggaagacgccccugggccucguggaccuguucguguucuccaccagcuucuaccugaucaccaucuuccuccaccuggucaagaucccgacccaccgccacaucguggggaagcccugccccaagccccaccggcugaaccacaugggcaucugcuccugcgggcuguacaagcagccgggcgugcccguccgcuggaagcggugaggacuagucccuguucccagagcccacuuuuuuuucuuuuuuugaaauaaaauagccugucuuucagaucucaaaggcucuuuucagagccaccaaaaaaaaaaaaaaaaaaaaaaaaaaaaaaaaaaaaaaaaaaaaaaaaaaaaaaaaaaaaaaaaaaaaaaaaaaaaaaaaaaaaaaaaaaaaaaaaaaaaa

SEQ ID NO: 28716 - RNA, 1764 nt, Artificial Sequence; identical to SEQ ID NO: 28710
  mRNA product Design a-2 (hSL-A100) comprising derived and/or modified sequence from LASV(Pinneo-NIG-1969;Clade I)__AIT17836__GPCmut5 (opt1)

SEQ ID NO: 28717 - RNA, 1764 nt, Artificial Sequence
  mRNA product Design a-2 (hSL-A100) comprising derived and/or modified sequence from LASV(ISTH0009-NIG-2011;Clade II)__AIT17404__GPCmut5 (opt1)
aggagaguccgcucagccagguugcagaagcggcuuagcguguguccuaaucuucucucugcguguagguaggccugugccgcaaacaagcuuaccaugggccagaucaucaccuucuuccaggaggugccccacgucaucgaggaggugaugaacaucgugcugaucgcccucagccugcuggccauccucaaggggaucuacaacgucgcgaccugcggccuguucgggcugguguccuuccuccugcugugcggccgcagcugcuccacgaccuacaaggggguguacgagcuccagacccuggagcuggacauggccagccucaacaugaccaugccgcuguccugcacgaagaacaacagccaccacuacaucauggucggcaacgagaccggccuggagcucacccugaccaacacguccaucaucaaccacaaguucugcaaccugagcgacgcccacaagaagaaccucuacgaccacgcccugauguccaucaucagcaccuuccaccuguccauccccaacuucaaccaguacgaggccaugagcugcgacuucaacgggggcaagaucuccgugcaguacaaccucagccacgcguacgccguggacgccgccaaccacugcgggaccaucgcgaacggcguccugcagaccuucaugcggauggccuggggcggguccuacaucgcccuggacagcggcugcggguccugggacugcaucaugacgagcuaccaguaccucaucauccagaacaccaccugggaggaccacugccaguucucccgccccagccccaucggcuaccuggggcugcucagccagcggacccgcgacaucuacaucucccggcgccugcugggcacguucaccuggacccucagcgacuccgagggcaacgagacccccgggggcuacugccugacgcgguggaugcugaucgaggccgagcucaagugcuucgggaacaccgccguggcgaagugcaacgagaagcacgacgaggaguucugcgacaugcugcgccuguucgacuucaacaagcaggccauccggcgccucaagacccccgcccagaugagcauccagcugaucaacaaggccgugaacgcccugaucaacgaccagcucaucaugaagaaccaccuccgggacaucaugugcaucccguacugcaacuacuccaaguacugguaccugaaccacaccgucacggggaagaccagccugccccgcugcuggcugguguccaacggcagcuaccugaacgagacccacuucuccgacgacaucgagcagcaggcggacaacaugaucaccgagcuccugcagaaggaguacauggaccggcagggcaagacgccccuggggcucguggaccuguucgucuucagcaccuccuucuaccugaucagcaucuuccugcaccucaucaagaucccgacccaccgccacaucaccggcaagcccugccccaagccccaccggcugaaccacauggggaucugcuccugcggccuguacaagcacccgggggugcccgugaaguggaagcgcugaggacuagucccuguucccagagcccacuuuuuuuucuuuuuuugaaauaaaauagccugucuuucagaucucaaaggcucuuuucagagccaccaaaaaaaaaaaaaaaaaaaaaaaaaaaaaaaaaaaaaaaaaaaaaaaaaaaaaaaaaaaaaaaaaaaaaaaaaaaaaaaaaaaaaaaaaaaaaaaaaaaaa

SEQ ID NO: 28718 - RNA, 1764 nt, Artificial Sequence
  mRNA product Design a-2 (hSL-A100) comprising derived and/or modified sequence from LASV(ISTH2010-NIG-2012;Clade II)__AIT17482__GPCmut5 (opt1)
aggagaguccgcucagccagguugcagaagcggcuuagcguguguccuaaucuucucucugcguguagguaggccugugccgcaaacaagcuuaccaugggccagaucaucaccuucuuccaggaggugccccacgucaucgaggaggugaugaacaucgugcugaucgcccucagccugcuggccauccucaaggggaucuacaacgucgcgaccugcggccuguucgggcugguguccuuccuccugcugugcggccgcagcugcuccacgaccuacaaggggguguacgagcuccagacccuggagcuggacauggccagccucaacaugaccaugccgcuguccugcacgaagaacaacagccaccacuacaucauggucggcaacgagaccggccuggagcucacccugaccaacacguccaucaucaaccacaaguucugcaaccugagcgacgcccacaagaagaaccucuacgaccacgcccugauguccaucaucagcaccuuccaccuguccauccccaacuucaaccaguacgaggccaugagcugcgacuucaacgggggcaagaucuccgugcaguacaaccucagccacgcguacgccguggacgccgccaaccacugcgggaccaucgcgaacggcguccugcagaccuucaugcggauggccuggggcggguccuacaucgcccuggacagcggcugcggguccugggacugcaucaugacgagcuaccaguaccucaucauccagaacaucaccugggaggaccacugccaguucucccgccccagccccaucggcuaccuggggcugcucagccagcggacccgcgacaucuacaucucccggcgccugcugggcaccuucacguggacccucagcgacuccgagggcaacgagacccccgggggcuacugccugacccgguggaugcugaucgaggccgagcucaagugcuucgggaacacggccguggcgaagugcaacgagaagcacgacgaggaguucugcgacaugcugcgccuguucgacuucaacaagcaggccauccggcgccucaagacccccgcccagaugagcauccagcugaucaacaaggccgugaacgcccugaucaacgaccagcucaucaugaagaaccaccuccgggacaucaugugcauccccuacugcaacuacuccaaguacugguaccugaaccacaccgucaccgggaagacgagccugccccgcugcuggcugguguccaacggcagcuaccugaacgagacccacuucuccgacgacaucgagcagcaggcggacaacaugaucaccgagcuccugcagaaggaguacaucgaccggcagggcaagaccccgcuggggcucguggaccuguucgucuucagcacguccuucuaccugaucagcaucuuccugcaccucgugaagaucccgacccaccgccacguggucggcaagcccugccccaagccccaccggcugaaccacauggggaucugcuccugcggccuguacaagcacccgggggugcccgugaaguggaagcgcugaggacuagucccuguucccagagcccacuuuuuuuucuuuuuuugaaauaaaauagccugucuuucagaucucaaaggcucuuuucagagccaccaaaaaaaaaaaaaaaaaaaaaaaaaaaaaaaaaaaaaaaaaaaaaaaaaaaaaaaaaaaaaaaaaaaaaaaaaaaaaaaaaaaaaaaaaaaaaaaaaaaaa

SEQ ID NO: 28719 - RNA, 1764 nt, Artificial Sequence
  mRNA product Design a-2 (hSL-A100) comprising derived and/or modified sequence from LASV(Lassa virus/H.sapiens-wt/NGA/2015/ISTH_0543;Clade II)__AVO03639__GPCmut5 (opt1)
aggagaguccgcucagccagguugcagaagcggcuuagcguguguccuaaucuucucucugcguguagguaggccugugccgcaaacaagcuuaccaugggccagaucaucaccuucuuccaggaggugccccacgucaucgaggaggugaugaacaucgugcugaucgcccucagccugcuggccauccucaaggggaucuacaacgucgcgaccugcggccuguucgggcugguguccuuccuccugcugugcggccgcagcugcuccacgaccuacaaggggguguacgagcuccagacccuggagcuggacauggccaaccucaacaugaccaugccgcugagcugcacgaagaacaacucccaccacuacaucauggucggcaacgagaccggccuggagcucacccugaccaacacgagcaucaucaaccacaaguucugcaaccuguccgacgcccacaagaagaaccucuacgaccacgcccugaugagcaucaucuccaccuuccaccugagcauccccaacuucaaccaguacgaggccauguccugcgacuucaacgggggcaagaucagcgugcaguacaaccucucccacaccuacgcgguggacgccgccaaccacugcgggaccaucgccaacggcguccugcagacguucaugcggauggcguggggcgggagcuacaucgcccuggacuccggcugcgggagcugggacugcaucaugaccuccuaccaguaccucgugauccagaacaccaccugggaggaccacugccaguucagccgccccucccccaucggcuaccuggggcugcucagccagcggacgcgcgacaucuacaucagccggcgccugcugggcaccuucaccuggacccucuccgacagcgagggcaacgagacgcccgggggcuacugccugacccgguggaugcugaucgaggccgagcucaagugcuucgggaacaccgccguggccaagugcaacgagaagcacgacgaggaguucugcgacaugcugcgccuguucgacuucaacaagcaggcgauccggcgccucaagacccccgcccagauguccauccagcugaucaacaaggccgucaacgcccugaucaacgaccagcucaucaugaagaaccaccuccgggacaucaugugcauccccuacugcaacuacagcaaguacugguaccugaaccacacggugaccgggaagaccucccugccccgcugcuggcuggugagcaacggcuccuaccugaacgagacccacuucagcgacgacaucgagcagcaggccgacaacaugaucacggagcuccugcagaaggaguacaucgaccggcagggcaagaccccgcuggggcucgucgaccuguucguguucuccaccagcuucuaccugaucuccaucuuccugcaccucgugaagaucccgacccaccgccacaucacgggcaagcccugccccaagccccaccggcugaaccacauggggaucugcagcugcggccuguacaagcacccggggguccccgugaaguggaagcgcugaggacuagucccuguucccagagcccacuuuuuuuucuuuuuuugaaauaaaauagccugucuuucagaucucaaaggcucuuuucagagccaccaaaaaaaaaaaaaaaaaaaaaaaaaaaaaaaaaaaaaaaaaaaaaaaaaaaaaaaaaaaaaaaaaaaaaaaaaaaaaaaaaaaaaaaaaaaaaaaaaaaaa

SEQ ID NO: 28720 - RNA, 1764 nt, Artificial Sequence
  mRNA product Design a-2 (hSL-A100) comprising derived and/or modified sequence from LASV(Lassa virus/H.sapiens-wt/NGA/2016/ISTH_0009;Clade II)__AVO03571__GPCmut5 (opt1)
aggagaguccgcucagccagguugcagaagcggcuuagcguguguccuaaucuucucucugcguguagguaggccugugccgcaaacaagcuuaccaugggccagaucaucaccuucuuccaggaggugccccacgucaucgaggaggugaugaacaucgugcugaucgcccucagccugcuggccauccucaaggggaucuacaacgucgcgaccugcggccugcuggggcucguguccuuccugcugcucugcggccgcagcugcuccacgaccuacaaggggguguacgagcugcagacccuggagcucgacauggccagccugaacaugaccaugccgcuguccugcacgaagaacaacagccaccacuacaucauggucggcaacgagaccggccucgagcugacccugaccaacacguccaucaucaaccacaaguucugcaaccucagcgacgcccacaagaagaaccuguacgaccacgcccugauguccaucaucagcaccuuccaccucuccauccccaacuucaaccaguacgaggccaugagcugcgacuucaacgggggccggaucuccgugcaguacaaccugagccacuccuacgcgguggacgccgccaaccacugcgggaccaucgccaacggcguccugcagaccuucaugcgcauggcguggggcgggagcuacaucgcccucgacuccggcugcgggagcugggacugcaucaugacguccuaccaguaccugaucauccagaacaccaccugggaggaccacugccaguucagccggcccagccccaucggcuaccuggggcuccugucccagcgcacccgggacaucuacaucagccgccggcugcucggcacguucaccuggacccuguccgacagcgagggcaacgagacccccgggggcuacugccugacgcgcuggaugcucaucgaggccgagcugaagugcuucgggaacaccgccguggccaagugcaacgagaagcacgacgaggaguucugcgacaugcugcggcuguucgacuucaacaagcaggcgauccgccggcugaagacccccgcccagauguccauccagcugaucaacaaggccgugaacgcccucaucaacgaccagcugaucaugaagaaccaccuccgcgacaucaugugcaucccguacugcaacuacagcaaguacugguaccucaaccacaccgucacggggaagaccucccugccccggugcuggcuggugagcaacggcuccuaccucaacgagacccacuucagcgacgacaucgagcagcaggccgacaacaugaucaccgagcugcugcagaaggaguacaucgaccgccagggcaagacgccccucgggcugguggaccuguucgucuucuccaccagcuucuaccugaucuccaucuuccuccaccuggugaagaucccgacccaccggcacaucaccggcaagcccugccccaagccccaccgccugaaccacauggggaucugcagcugcggccucuacaaccacccgggggugcccgucaaguggaagcggugaggacuagucccuguucccagagcccacuuuuuuuucuuuuuuugaaauaaaauagccugucuuucagaucucaaaggcucuuuucagagccaccaaaaaaaaaaaaaaaaaaaaaaaaaaaaaaaaaaaaaaaaaaaaaaaaaaaaaaaaaaaaaaaaaaaaaaaaaaaaaaaaaaaaaaaaaaaaaaaaaaaaa

SEQ ID NO: 28721 - RNA, 1764 nt, Artificial Sequence
  mRNA product Design a-2 (hSL-A100) comprising derived and/or modified sequence from LASV(Lassa virus/H.sapiens-wt/NGA/2016/ISTH_0017;Clade II)__AVO03567__GPCmut5 (opt1)
aggagaguccgcucagccagguugcagaagcggcuuagcguguguccuaaucuucucucugcguguagguaggccugugccgcaaacaagcuuaccaugggccagaucaucaccuucuuccaggaggugccccacgucaucgaggaggugaugaacaucgugcugaucgcccucagccugcuggccauccucaaggggaucuacaacgucgcgaccugcggccuguucgggcugguguccuuccuccugcugugcggccgcagcugcuccacgaccuacaaggggguguacgagcuccagacccuggagcuggacauggccagccucaacaugaccaugccgcuguccugcacgaagaacaacagccaccacuacaucauggucggcaacgagaccggccuggagcucacccugaccaacacguccaucaucaaccacaaguucugcaaccugagcgacgcccacaagaagaaccucuacgaccacgcccugauguccaucaucagcaccuuccaccuguccauccccaacuucaaccaguacgaggccaugagcugcgacuucaacgggggcaagaucuccgugcaguacaaccucagccacaccuacgcgaucgacgccgccaaccacugcgggaccaucgccaacggcgugcugcagacguucaugcggauggcguggggcggguccuacaucgcccuggacagcggcugcggguccugggacugcaucaugaccagcuaccaguaccucaucauccagaacaccaccugggaggaccacugccaguucucccgccccagccccaucggcuaccuggggcugcucagccagcggacgcgcgacaucuacaucucccggcgccugcugggcaccuucaccuggacccucagcgacuccgagggcaacgagacgcccgggggcuacugccugacccgguggaugcugaucgaggccgagcucaagugcuucgggaacaccgccgucgccaagugcaacgagaagcacgacgaggaguucugcgacaugcugcgccuguucgacuucaacaagcaggcgauccggcgccucaagacccccgcccagaugagcauccagcugaucaacaaggccgugaacgcccugaucaacgaccagcucaucaugaagaaccaccuccgggacaucaugugcauccccuacugcaacuacuccaaguacugguaccugaaccacacggugaccgggaagaccagccugccccgcugcuggcuggucuccaacggcagcuaccugaacgagacccacuucuccgacgacaucgagcagcaggccgacaacaugaucacggagcuccugcagaaggaguacauggaccggcagggcaagaccccgcuggggcucguggaccuguucguguucagcaccuccuucuaccugaucagcaucuuccugcaccucguccgcaucccgacccaccggcacgugaucggcaagcccugccccaagccccaccgccugaaccacauggggaucugcuccugcggccuguacaagcacccgggggugcccgucaaguggaagcggugaggacuagucccuguucccagagcccacuuuuuuuucuuuuuuugaaauaaaauagccugucuuucagaucucaaaggcucuuuucagagccaccaaaaaaaaaaaaaaaaaaaaaaaaaaaaaaaaaaaaaaaaaaaaaaaaaaaaaaaaaaaaaaaaaaaaaaaaaaaaaaaaaaaaaaaaaaaaaaaaaaaaa

SEQ ID NO: 28722 - RNA, 1764 nt, Artificial Sequence
  mRNA product Design a-2 (hSL-A100) comprising derived and/or modified sequence from LASV(Lassa virus/H.sapiens-wt/NGA/2018/ISTH_0959;Clade II)__AVV65099__GPCmut5 (opt1)
aggagaguccgcucagccagguugcagaagcggcuuagcguguguccuaaucuucucucugcguguagguaggccugugccgcaaacaagcuuaccaugggccagaucaucaccuucuuccaggaggugccccacgucaucgaggaggugaugaacaucgugcugaucgcccucagccugcuggccauccucaaggggaucuacaacgucgugaccugcggccuguucgggcugguguccuuccuccugcugugcggccgcagcugcuccacgaccuacaagggggucuacgagcuccagacccuggagcuggacauggcgagccucaacaugaccaugccgcuguccugcacgaagaacaacagccaccacuacaucauggugggcaacgagaccggccuggagcucacccugaccaacacguccaucaucaaccacaaguucugcaaccugagcgacgcccacaagaagaaccucuacgaccacgcccugauguccaucaucagcaccuuccaccuguccauccccaacuucaaccaguacgaggccaugagcugcgacuucaacgggggcaagaucuccgugcaguacaaccucagccacgccuacgcgaucgacgccgccaaccacugcgggaccaucgccaacggcguccugcagaccuucaugcggauggcguggggcggguccuacaucgcccuggacagcggcugcggguccugggacugcaucaugacgagcuaccaguaccucaucauccagaacaccaccugggaggaccacugccaguucucccgccccagccccaucggcuaccuggggcugcucagccagcggacccgcgacaucuacaucucccggcgccugcugggcacguucaccuggacccucagcgacuccgagggcaacgagacccccgggggcuacugccugacgcgguggaugcugaucgaggccgagcucaagugcuucgggaacaccgccguggccaagugcaacgagaagcacgacgaggaguucugcgacaugcugcgccuguucgacuucaacaagcaggcgauccggcgccucaagacccccgcccagaugagcauccagcugaucaacaaggccgugaacgcccugaucaacgaccagcucaucaugaagaaccaccuccgggacaucaugugcaucccguacugcaacuacuccaaguacugguaccugaaccacaccgucacggggaagaccagccugccccgcugcuggcugguguccaacggcagcuaccugaacgagacccacuucuccgacgacaucgagcagcaggccgacaacaugaucaccgagcuccugcagaaggaguacaucgaccggcagggcaagacgccccuggggcucguggaccuguucgucuucagcaccuccuucuaccugaucagcaucuuccugcaccucgugaagaucccgacccaccgccacgugaucggcaagcccugccccaagccccaccggcugaaccacauggggaucugcuccugcggccuguacaagcacccggggguccccgugaaguggaagcgcugaggacuagucccuguucccagagcccacuuuuuuuucuuuuuuugaaauaaaauagccugucuuucagaucucaaaggcucuuuucagagccaccaaaaaaaaaaaaaaaaaaaaaaaaaaaaaaaaaaaaaaaaaaaaaaaaaaaaaaaaaaaaaaaaaaaaaaaaaaaaaaaaaaaaaaaaaaaaaaaaaaaaa

SEQ ID NO: 28723 - RNA, 1764 nt, Artificial Sequence
  mRNA product Design a-2 (hSL-A100) comprising derived and/or modified sequence from LASV(LASV003-NIG-2008;Clade II)__AIT17580__GPCmut5 (opt1)
aggagaguccgcucagccagguugcagaagcggcuuagcguguguccuaaucuucucucugcguguagguaggccugugccgcaaacaagcuuaccaugggccagaucaucaccuucuuccaggaggugccccacgucaucgaggaggugaugaacaucgugcugaucgcccucagccugcuggccauccucaaggggaucuacaacgucgcgaccugcggccuguucgggcugguguccuuccuccugcugugcggccgcagcugcuccacgaccuacaaggggguguacgagcuccagacccuggagcuggacauggccagccucaacaugaccaugccgcuguccugcacgaagaacaacagccaccacuacaucauggucggcaacgagaccggccuggagcucacccugaccaacacguccaucaucaaccacaaguucugcaaccugagcgacgcccacaagaagaaccucuacgaccacgcccugauguccaucaucagcaccuuccaccuguccauccccaacuucaaccaguacgaggccaugagcugcgacuucaacgggggcaagaucuccgugcaguacaaccucagccacaccuacgcgguggacgccgccaaccacugcgggaccaucgccaacggcguccugcagacguucaugcggauggcguggggcggguccuacaucgcccuggacagcggcugcggguccugggacugcaucaugaccagcuaccaguaccucaucauccagaacaccaccugggaggaccacugccaguucucccgccccagccccaucggcuaccuggggcugcucagccagcggacgcgcgacaucuacaucucccggcgccugcugggcaccuucaccuggacccucagcgacuccgagagcaacgagacgccgggcggguacugccugacccgguggaugcugaucgaggccgagcucaagugcuucggcaacaccgccguggccaagugcaacgagaagcacgacgaggaguucugcgacaugcugcgccuguucgacuucaacaagcaggcgauccggcgccucaaggcccccgcccagauguccauccagcugaucaacaaggccgugaacgcccugaucaacgaccagcucaucaugaagaaccaccuccgggacaucaugugcauccccuacugcaacuacagcaaguacugguaccugaaccacaccgucacgggccgcaccucccugccccggugcuggcuggugagcaacggguccuaccugaacgagacccacuucagcgacgacaucgagcagcaggcggacaacaugaucaccgagcuccugcagaaggaguacauggaccgccagggcaagacgccccugggccucguggaccuguucgucuucuccaccagcuucuaccugaucuccaucuuccugcaccucgugaagaucccgacccaccggcacgugaucgggaagcccugccccaagccccaccgccugaaccacaugggcaucugcagcugcgggcuguacaagcacccgggcguccccgugaaguggaagcggugaggacuagucccuguucccagagcccacuuuuuuuucuuuuuuugaaauaaaauagccugucuuucagaucucaaaggcucuuuucagagccaccaaaaaaaaaaaaaaaaaaaaaaaaaaaaaaaaaaaaaaaaaaaaaaaaaaaaaaaaaaaaaaaaaaaaaaaaaaaaaaaaaaaaaaaaaaaaaaaaaaaaa

SEQ ID NO: 28724 - RNA, 1764 nt, Artificial Sequence
  mRNA product Design a-2 (hSL-A100) comprising derived and/or modified sequence from LASV(LASV035-NIG-2009;Clade II)__AIT17588__GPCmut5 (opt1)
aggagaguccgcucagccagguugcagaagcggcuuagcguguguccuaaucuucucucugcguguagguaggccugugccgcaaacaagcuuaccaugggccagaucaucaccuucuuccaggaggugccccacgucaucgaggaggugaugaacaucgugcugaucgcccucagccugcuggccauccucaaggggaucuacaacgucgcgaccugcggccuguucgggcugguguccuuccuccugcugugcggccgcagcugcuccacgaccuacaaggggguguacgagcuccagacccuggagcuggacauggccagccucaacaugaccaugccgcuguccugcacgaagaacaacagccaccacuacaucauggucggcaacgagaccggccuggagcucacccugaccaacacguccaucaucaaccacaaguucugcaaccugagcgacgcccacaagaagaaccucuacgaccacgcccugauguccaucaucagcaccuuccaccuguccauccccaacuucaaccaguacgaggccaugagcugcgacuucaacgggggcaagaucuccgugcaguacaaccucagccacgcguacgccguggacgccgccaaccacugcgggaccaucgcgaacggcguccugcagaccuucaugcggauggccuggggcggguccuacaucgcccuggacagcggcugcggguccugggacugcaucaugacgagcuaccaguaccucaucauccagaacaccaccugggaggaccacugccaguucucccgccccagccccaucggcuaccuggggcugcucagccagcggacccgcgacaucuacaucucccggcgccugcugggcacguucaccuggacccucagcgacuccgagggcaacgagacccccgggggcuacugccugacgcgguggaugcugaucgaggccgagcucaagugcuucgggaacaccgccguggcgaagugcaacgagaagcacgacgaggaguucugcgacaugcugcgccuguucgacuucaacaagcaggccauccggcgccucaaggcccccgcccagaugagcauccagcugaucaacaaggccgugaacgcgcugaucaacgaccagcucaucaugaagaaccaccuccgggacaucaugugcauccccuacugcaacuacuccaaguacugguaccugaaccacaccgucaccgggaagacgagccugccccgcugcuggcugguguccaacggcagcuaccugaacgagacccacuucuccgacgacaucgagcagcaggccgacaacaugaucaccgagcuccugcagaaggaguacaucgaccggcagggcaagaccccgcuggggcucguggaccuguucgucuucagcacguccuucuaccugaucagcaucuuccugcaccucgugaagaucccgacccaccgccacgugaucggcaagcccugccccaagccccaccggcugaaccacauggggaucugcuccugcggccuguacaagcacccggggguccccgugaaguggaagcgcugaggacuagucccuguucccagagcccacuuuuuuuucuuuuuuugaaauaaaauagccugucuuucagaucucaaaggcucuuuucagagccaccaaaaaaaaaaaaaaaaaaaaaaaaaaaaaaaaaaaaaaaaaaaaaaaaaaaaaaaaaaaaaaaaaaaaaaaaaaaaaaaaaaaaaaaaaaaaaaaaaaaaa

SEQ ID NO: 28725 - RNA, 1764 nt, Artificial Sequence
  mRNA product Design a-2 (hSL-A100) comprising derived and/or modified sequence from LASV(LASV1000-NIG-2009;Clade II)__AIT17782__GPCmut5 (opt1)
aggagaguccgcucagccagguugcagaagcggcuuagcguguguccuaaucuucucucugcguguagguaggccugugccgcaaacaagcuuaccaugggccagaucaucaccuucuuccaggaggugccccacgucaucgaggaggugaugaacaucgugcugaucgcccucagccugcuggccauccucaaggggaucuacaacgucgcgaccugcggccuguucgggcugguguccuuccuccugcugugcggccgcagcugcuccacgaccuacaaggggguguacgagcuccagacccuggagcuggacauggccagccucaacaugaccaugccgcuguccugcacgaagaacaacagccaccacuacaucauggucggcaacgagaccggccuggagcucacccugaccaacacguccaucaucaaccacaaguucugcaaccugagcgacgcccacaagaagaaccucuacgaccacgcccugauguccaucaucagcaccuuccaccuguccauccccaacuucaaccaguacgaggccaugagcugcgacuucaacgggggcaagaucuccgugcaguacaaccucagccacaccuacgcgguggacgccgccaaccacugcgggaccaucgccaacggcguccugcagacguucaugcggauggcguggggcggguccuacaucgcccuggacagcggcugcggguccugggacugcaucaugaccagcuaccaguaccucaucauccagaacaccaccugggaggaccacugccaguucucccgccccagccccaucggcuaccuggggcugcucagccagcggacgcgcgacaucuacaucucccggcgccugcugggcaccuucaccuggacccucagcgacuccgagggcaacgagacgcccgggggcuacugccugacccgguggaugcugaucgaggccgagcucaagugcuucgggaacaccgccguggccaagugcaacgagaagcacgacgaggaguucugcgacaugcugcgccuguucgacuucaacaagcaggcgaucaagcggcucaagacccccgcccagaugagcauccagcugaucaacaaggccgugaacgcccugaucaacgaccagcucaucaugaagaaccaccuccgcgacaucaugugcauccccuacugcaacuacuccaaguacugguaccugaaccacacggucaccgggaagaccagccugccccggugcuggcugguguccaacggcagcuaccugaacgagacccacuucuccgacgacaucgagcagcaggccgacaacaugaucacggagcuccugcagaaggaguacaucgaccgccagggcaagaccccgcuggggcucguggaccuguucgucuucagcaccuccuucuaccugaucagcaucuuccugcaccucgugaagaucccgacccaccggcacguggucggcaagcccugccccaagccccaccgccugaaccacauggggaucugcuccugcggccuguacaagcacccgggggugcccgugaaguggaagcggugaggacuagucccuguucccagagcccacuuuuuuuucuuuuuuugaaauaaaauagccugucuuucagaucucaaaggcucuuuucagagccaccaaaaaaaaaaaaaaaaaaaaaaaaaaaaaaaaaaaaaaaaaaaaaaaaaaaaaaaaaaaaaaaaaaaaaaaaaaaaaaaaaaaaaaaaaaaaaaaaaaaaa

SEQ ID NO: 28726 - RNA, 1764 nt, Artificial Sequence
  mRNA product Design a-2 (hSL-A100) comprising derived and/or modified sequence from LASV(LASV221-NIG-2010;Clade II)__AIT17624__GPCmut5 (opt1)
aggagaguccgcucagccagguugcagaagcggcuuagcguguguccuaaucuucucucugcguguagguaggccugugccgcaaacaagcuuaccaugggccagaucaucaccuucuuccaggaggugccccacgucaucgaggaggugaugaacaucgugcugaucgcccucagccugcuggccauccucaaggggaucuacaacgucgcgaccugcggccuguucgggcugguguccuuccuccugcugugcggccgcagcugcuccacgaccuacaaggggguguacgagcuccagacccuggagcuggacauggccagccucaacaugaccaugccgcuguccugcacgaagaacaacagccaccacuacaucauggucggcaacgagaccggccuggagcucacccugaccaacacguccaucaucaaccacaaguucugcaaccugagcgacgcccacaagaagaaccucuacgaccacgcccugauguccaucaucagcaccuuccaccuguccauccccaacuucaaccaguacgaggccaugagcugcgacuucaacgggggcaagaucuccgugcaguacaaccucagccacaccuacgcgaucgacgccgccaaccacugcgggaccaucgccaacggcgugcugcagacguucaugcggauggcguggggcggguccuacaucgcccuggacagcggcugcggguccugggacugcaucaugaccagcuaccaguaccucaucauccagaacaccaccugggaggaccacugccaguucucccgccccagccccaucggcuaccuggggcugcucagccagcggacgcgcgacaucuacaucucccggcgccugcugggcaccuucaccuggacccucagcgacuccgagggcaacgagacgcccgggggcuacugccugacccgguggaugcugaucgaggccgagcucaagugcuucgggaacaccgccgucgccaagugcaacgagaagcacgacgaggaguucugcgacaugcugcgccuguucgacuucaacaagcaggcgauccggcgccucaagacccccgcccagaugagcauccagcugaucaacaaggccgugaacgcccugaucaacgaccagcucaucaugaagaaccaccuccgggacaucaugugcauccccuacugcaacuacuccaaguacugguaccugaaccacacggugaccgggaagaccagccugccccgcugcuggcuggucuccaacggcagcuaccugaacgagacccacuucuccgacgacaucgagcagcaggccgacaacaugaucacggagaugcuccagaaggaguacauggaccggcagggcaagaccccgcuggggcugguggaccucuucguguucagcaccuccuucuaccugaucagcaucuuccugcaccuggucaagaucccgacccaccgccacgugaucggcaagcccugccccaagccccaccggcucaaccacauggggaucugcuccugcggccuguacaagcacccgggggugcccgucaaguggaagcgcugaggacuagucccuguucccagagcccacuuuuuuuucuuuuuuugaaauaaaauagccugucuuucagaucucaaaggcucuuuucagagccaccaaaaaaaaaaaaaaaaaaaaaaaaaaaaaaaaaaaaaaaaaaaaaaaaaaaaaaaaaaaaaaaaaaaaaaaaaaaaaaaaaaaaaaaaaaaaaaaaaaaaa

SEQ ID NO: 28727 - RNA, 1764 nt, Artificial Sequence
  mRNA product Design a-2 (hSL-A100) comprising derived and/or modified sequence from LASV(LASV237-NIG-2010;Clade II)__AIT17638__GPCmut5 (opt1)
aggagaguccgcucagccagguugcagaagcggcuuagcguguguccuaaucuucucucugcguguagguaggccugugccgcaaacaagcuuaccaugggccagaucaucaccuucuuccaggaggugccccacgucaucgaggaggugaugaacaucgugcugaucgcccucagccugcuggccauccucaaggggaucuacaacgucgcgaccugcggccuguucgggcugguguccuuccuccugcugugcggccgcagcugcuccacgaccuacaaggggguguacgagcuccagacccuggagcuggacauggccagccucaacaugaccaugccgcuguccugcacgaagaacaacagccaccacuacaucauggucggcaacgagaccggccuggagcucacccugaccaacacguccaucaucaaccacaaguucugcaaccugagcgacgcccacaagaaggaccucuacgaccacgcccugauguccaucaucagcaccuuccaccuguccauccccaacuucaaccaguacgaggccaugagcugcgacuucaacgggggcaagaucuccgugcaguacaaccucagccacaccuacgcgguggacgccgccaaccacugcgggaccaucgccaacggcguccugcagacguucaugcggauggcguggggcggguccuacaucgcccuggacagcggcugcggguccugggacugcaucaugaccagcuaccaguaccucaucauccagaacaccaccugggaggaccacugccaguucucccgccccagccccaucggcuaccuggggcugcucagccagcggacgcgcgacaucuacaucucccggcgccugcugggcaccuucaccuggacccucagcgacuccgagggcaacgagacgcccgggggcuacugccugacccgguggaugcugaucgaggccgagcucaagugcuucgggaacaccgccguggccaagugcaacgagaagcacgacgaggaguucugcgacaugcugcgccuguucgacuucaacaagcaggcgauccggcgccucaagacccccgcccagaugagcauccagcugaucaacaaggccgugaacgcccugaucaacgaccagcucaucaugaagaaccaccuccgggacaucaugugcauccccuacugcaacuacuccaaguacugguaccugaaccacacggucaccgggaagaccagccugccccgcugcuggcugguguccaacggcagcuaccugaacgagacccacuucuccgacgacaucgagcagcaggccgacaacaugaucacggagcuccugcagaaggaguacauggaccggcagggcaagaccccgcuggggcucguggaccuguucgucuucagcaccuccuucuaccugaucagcaucuuccugcaccucaucaagaucccgacccaccgccacaucacgggcaagcccugccccaagccccaccggcugaaccacauggggaucugcuccugcggccuguacaagcacccgggggugcccgugaaguggaagcgcugaggacuagucccuguucccagagcccacuuuuuuuucuuuuuuugaaauaaaauagccugucuuucagaucucaaaggcucuuuucagagccaccaaaaaaaaaaaaaaaaaaaaaaaaaaaaaaaaaaaaaaaaaaaaaaaaaaaaaaaaaaaaaaaaaaaaaaaaaaaaaaaaaaaaaaaaaaaaaaaaaaaaa

SEQ ID NO: 28728 - RNA, 1764 nt, Artificial Sequence
  mRNA product Design a-2 (hSL-A100) comprising derived and/or modified sequence from LASV(LASV253-NIG-2011;Clade II)__AIT17670__GPCmut5 (opt1)
aggagaguccgcucagccagguugcagaagcggcuuagcguguguccuaaucuucucucugcguguagguaggccugugccgcaaacaagcuuaccaugggccagaucaucaccuucuuccaggaggugccccacgucaucgaggaggugaugaacaucgugcugaucgcccucagccugcuggccauccucaaggggaucuacaacgucgcgaccugcggccuguucgggcugguguccuuccuccugcugugcggccgcagcugcuccacgaccuacaaggggguguacgagcuccagacccuggagcuggacauggccagccucaacaugaccaugccgcuguccugcacgaagaacaacagccaccacuacaucauggucggcaacgagaccggccuggagcucacccugaccaacacguccaucaucaaccacaaguucugcaaccugagcgacgcccacaagaagaaccucuacgaccacgcccugauguccaucaucagcaccuuccaccuguccauccccaacuucaaccaguacgaggccaugagcugcgacuucaacgggggcaagaucuccgugcaguacaaccucagccacaccuacgcgguggacgccgccaaccacugcgggaccaucgccaacggcguccugcagacguucaugcggauggcguggggcggguccuacaucgcccuggacagcggcugcggguccugggacugcaucaugaccagcuaccaguaccucaucauccagaacaccaccugggaggaccacugccaguucucccgccccagccccaucggcuaccuggggcugcucagccagcggacgcgcgacaucuacaucucccggcgccugcugggcaccuucaccuggacccucagcgacuccgagggcaacgagacgcccgggggcuacugccugacccgguggaugcugaucgaggccgagcucaagugcuucgggaacaccgccguggccaagugcaacgagaagcacgacgaggaguucugcgacaugcugcgccuguucgacuucaacaagcaggcgauccggcgccucaaggcccccgcccagaugagcauccagcugaucaacaaggccgugaacgcccugaucaacgaccagcucaucaugaagaaccaccuccgggacaucaugugcaucccguacugcaacuacuccaaguacugguaccugaaccacaccgucacggggcgcaccagccugccccggugcuggcugguguccaacggcagcuaccugaacgagacccacuucuccgacgacaucgagcagcaggcggacaacaugaucaccgagcuccugcagaaggaguacaucgaccgccagggcaagacgccccuggggcucguggaccuguucgucuucagcaccuccuucuaccugaucagcaucuuccugcaccucgugaagaucccgacccaccggcacaucaucggcaagcccugccccaagccccaccgccugaaccacauggggaucugcuccugcggccuguacaagcacccgggggugcccgucaaguggaagcggugaggacuagucccuguucccagagcccacuuuuuuuucuuuuuuugaaauaaaauagccugucuuucagaucucaaaggcucuuuucagagccaccaaaaaaaaaaaaaaaaaaaaaaaaaaaaaaaaaaaaaaaaaaaaaaaaaaaaaaaaaaaaaaaaaaaaaaaaaaaaaaaaaaaaaaaaaaaaaaaaaaaaa

SEQ ID NO: 28729 - RNA, 1764 nt, Artificial Sequence
  mRNA product Design a-2 (hSL-A100) comprising derived and/or modified sequence from LASV(LASV254-NIG-2011;Clade II)__AIT17674__GPCmut5 (opt1)
aggagaguccgcucagccagguugcagaagcggcuuagcguguguccuaaucuucucucugcguguagguaggccugugccgcaaacaagcuuaccaugggccagaucaucaccuucuuccaggaggugccccacgucaucgaggaggugaugaacaucgugcugaucgcccucagccugcuggccauccucaaggggaucuacaacgucgcgaccugcggccuguucgggcugguguccuuccuccugcugugcggccgcagcugcuccacgaccuacaaggggguguacgagcuccagacccuggagcuggacaugaccaaccucaacaugacgaugccgcugagcugcaccaagaacaacucccaccacuacaucauggucggcaacgagaccggccuggagcucacccugacgaacaccagcaucaucaaccacaaguucugcaaccuguccgacgcccacaagaagaaccucuacaaccacgcccugaugagcaucaucuccaccuuccaccugagcauccccaacuucaaccaguacgaggccauguccugcgacuucaacgggggcaagaucagcgugcaguacaaccucucccacagcuacgccguggacgcggccaaccacugcgggaccaucgccaacggcguccugcagacguucaugcggauggccuggggcggguccuacaucgcgcuggacagcggcugcgggaacugggacugcaucaugaccuccuaccaguaccucaucauccagaacaccaccugggaggaccacugccaguucagccgccccucccccaucggcuaccuggggcugcucagccagcggacgcgcgacaucuacaucagccggcgccugcugggcaccuucaccuggacccucuccgacagcgagggcaacgagacgcccgggggcuacugccugacccgguggaugcugaucgaggccgagcucaagugcuucgggaacaccgccguggccaagugcaacgagaagcacgacgaggaguucugcgacaugcugcgccuguucgacuucaacaagcaggccauccggcgccucaagacccccgcgcaggccaacauccagcugaucaacaaggccgugaacgcccugaucaacgaccagcucaucaugaagaaccaccuccgggacaucaugugcauccccuacugcaacuacuccaaguacugguaccugaaccacacggucaccgggaagaccagccugccccgcugcuggcugguguccaacggcagcuaccugaacgagacccacuucuccgacgacaucgagcagcaggccgacaacaugaucacggagcuccugcagaaggaguacauggaccggcagggcaagaccccgcuggggcucguggaccuguucgucuucagcaccuccuucuaccugaucagcaucuuccugcaccucgugaagaucccgacccaccgccacgugaucggcaagcccugccccaagccccaccggcugaaccacauggggaucugcuccugcggccuguacaagcacccggggguccccgugaaguggaagcgcugaggacuagucccuguucccagagcccacuuuuuuuucuuuuuuugaaauaaaauagccugucuuucagaucucaaaggcucuuuucagagccaccaaaaaaaaaaaaaaaaaaaaaaaaaaaaaaaaaaaaaaaaaaaaaaaaaaaaaaaaaaaaaaaaaaaaaaaaaaaaaaaaaaaaaaaaaaaaaaaaaaaaa

SEQ ID NO: 28730 - RNA, 1764 nt, Artificial Sequence
  mRNA product Design a-2 (hSL-A100) comprising derived and/or modified sequence from LASV(Nig08-A19;Clade III)__ADU56618__GPCmut5 (opt1)
aggagaguccgcucagccagguugcagaagcggcuuagcguguguccuaaucuucucucugcguguagguaggccugugccgcaaacaagcuuaccaugggccagaucgugaccuucuuccaggaggucccccacgugaucgaggaggugaugaacaucguccugaucgcccucagcauccuggccauccugaaggggcucuacaacaucgcgaccugcggccugaucgggcuggugacguuccuccugcuguccggccgcagcugcuccaugaccuacaaggggguguacgagcuccagacccuggagcugaacaugaacacccucaacaugacgaugccgcugagcugcaccaagaacaacucccaccacuacaucauggucggcaacgagaccggccuggagcucacccugacgaacaccagccugcuccaccacaaguucugcaaccuguccgacgcccacaagaagaaccuguacgaccacacccucaugagcaucaucuccaccuuccaccugagcauccccaacuucaaccaguacgaggccauguccugcgacuucaacgggggcaagaucacggugcaguacaaccugagccacuccuacgccaucgacgccgcgaaccacugcgggaccguggccaacggcguccuccagaccuucaugcggauggccuggggcgggagcuacaucgcccuggacuccggcugcgggaagugggacugcaucaugaccagcuaccaguaccugaucauccagaacacgaccugggaggaccacugccaguucucccggcccagccccaucggcuaccucgggcugcugucccagcgcacccgggacaucuacaucagccgccggcuccugggcaccuucacguggacccugagcgacuccgagggcaacgagacccccgggggcuacugccucacccgcuggaugcugaucgaggcggagcugaagugcuucgggaacacggccguggccaagugcaacgagaagcacgacgaggaguucugcgacaugcuccggcuguucgacuucaacaagcaggccauccgccggcugaaggcccccgcgcagaugagcauccagcucaucaacaaggccgugaacgcccugaucaacgaccagcugaucaugaagaaccaccuccgcgacaucaugugcauccccuacugcaacuacuccaaguacugguaccugaaccacaccagcaccgggcggaccucccugccccgcugcuggcucgucagcaacggcuccuaccugaacgagacgcacuucagcgacgacaucgagcagcaggccgacaacaugaucaccgagaugcugcagaaggaguaccucgaccggcagggcaagaccccgcuggggcugguggaccuguucguguucuccaccagcuucuaccucaucuccaucuuccugcaccuggucaagaucccgacgcaccgccacaucgugggcaagcccugccccaagccccaccggcucaaccacauggggaucugcagcugcggccuguacaagcagccgggggugcccguccgcuggaagcggugaggacuagucccuguucccagagcccacuuuuuuuucuuuuuuugaaauaaaauagccugucuuucagaucucaaaggcucuuuucagagccaccaaaaaaaaaaaaaaaaaaaaaaaaaaaaaaaaaaaaaaaaaaaaaaaaaaaaaaaaaaaaaaaaaaaaaaaaaaaaaaaaaaaaaaaaaaaaaaaaaaaaa

SEQ ID NO: 28731 - RNA, 1767 nt, Artificial Sequence
  mRNA product Design a-2 (hSL-A100) comprising derived and/or modified sequence from LASV(G1180-SLE-2010;Clade IV)__AIT17168__GPCmut5 (opt1)
aggagaguccgcucagccagguugcagaagcggcuuagcguguguccuaaucuucucucugcguguagguaggccugugccgcaaacaagcuuaccaugggccagaucgugaccuucuuccaggaggucccccacgugaucgaggaggugaugaacaucguccugaucgcccucagcauccuggccgugcugaaggggcucuacaacuucgcgaccugcggccugguggggcugcucaccuuccugcugcucugcggccgcuccugcaccgccagccgguacaagggggucuacgagcugcagacccuggagcucaacauggagacccugaacaugacgaugccgcuguccugcaccaagaacaacagccaccacuacaucauggugggcaacgagaccggccucgagcugacccugacgaacaccuccaucaucaaccacaaguucugcaaccucagcgacgcccacaagaagaaccuguacgaccacgcccugauguccaucaucagcaccuuccaccucuccauccccaacuucaaccaguacgaggccaugagcugcgacuucaacgggggcaagaucuccgugcaguacaaccugagccacuccuacgcgggggacgccgccaaccacugcggcaccgucgccaacggggugcugcagacguucaugcgcauggcguggggcggcagcuacaucgcccucgacuccgggugcggcagcugggacugcaucaugaccuccuaccaguaccugaucauccagaacaccaccugggaggaccacugccaguucagccggcccucccccaucggguaccugggccuccugagccagcgcacgcgggacaucuacaucagccgccggcugcucggcaccuucaccuggacccuguccgacagcgaggggaaggacacgccgggcggguacugccugacccgcuggaugcucaucgaggccgagcugaagugcuucggcaacaccgccguggccaagugcaacgagaagcacgacgaggaguucugcgacaugcugcggcuguucgacuucaacaagcaggcgauccagcgccugaaggcccccgcccagauguccauccagcugaucaacaaggccgucaacgcccucaucaacgaccagcugaucaugaagaaccaccuccgggacaucaugugcauccccuacugcaacuacagcaaguacugguaccucaaccacaccacgaccggcaagaccucccugcccaagugcuggcuggugagcaacggcuccuaccucaacgagacccacuucagcgacgacaucgagcagcaggcggacaacaugaucacggagaugcugcagaaggaguacauggagcgccaggggaagacgccccugggccucguggaccuguucgucuucuccaccagcuucuaccugaucuccaucuuccugcaccucgugaagaucccgacccaccggcacaucgugggcaagagcugccccaagccccaccgccugaaccacauggggaucugcuccugcgggcuguacaagcagcccggcgucccggugaaguggaagcggugaggacuagucccuguucccagagcccacuuuuuuuucuuuuuuugaaauaaaauagccugucuuucagaucucaaaggcucuuuucagagccaccaaaaaaaaaaaaaaaaaaaaaaaaaaaaaaaaaaaaaaaaaaaaaaaaaaaaaaaaaaaaaaaaaaaaaaaaaaaaaaaaaaaaaaaaaaaaaaaaaaaaa

SEQ ID NO: 28732 - RNA, 1767 nt, Artificial Sequence
  mRNA product Design a-2 (hSL-A100) comprising derived and/or modified sequence from LASV(G1442-SLE-2011;Clade IV)__AIT17180__GPCmut5 (opt1)
aggagaguccgcucagccagguugcagaagcggcuuagcguguguccuaaucuucucucugcguguagguaggccugugccgcaaacaagcuuaccaugggccagaucgugaccuucuuccaggaggucccccacgugaucgaggaggugaugaacaucguccugaucgcccucagcauccuggccgugcugaaggggcucuacaacguggcgaccugcggccugaucgggcuggucacguuccuccugcugugcggccgcuccugcaccaccacccucuacaaggggguguacgagcugcagacgcuggagcucaacauggagacccugaacaugaccaugccgcugagcugcaccaagaacaacucccaccacuacauccgggugggcaacgagacgggccucgagcugacccugaccaacaccagcaucaucaaccacaaguucugcaaccucuccgacgcccacaagaagaaccuguacgaccacgcccugaugagcaucaucuccacguuccaccucagcauccccaacuucaaccaguacgaggccauguccugcgacuucaacgggggcaagaucagcguccaguacaaccugucccacagcuacgccggggacgcggccaaccacugcggcaccguggccaacggggugcugcagaccuucaugcgcauggccuggggcggcuccuacaucgcgcucgacagcgggugcggcaacugggacugcaucaugaccuccuaccaguaccugaucauccagaacacgaccugggacgaccacugccaguucagccgccccucccccaucggguaccugggccuccugagccagcggacccgcgacgucuacaucucccggcgccugcucggcaccuucacguggacccugagcgacagcgaggggaaggacaccccgggcggguacugccugacccgguggaugcucaucgaggccgagcugaagugcuucggcaacacggccguggccaagugcaacgagaagcacgacgaggaguucugcgacaugcugcgccucuucgacuucaacaagcaggccauccagcggcugaaggcgcccgcccagauguccauccagcugaucaacaaggccgugaacgcccucaucaacgaccagcugaucaugaagaaccaccuccgcgacaucaugugcauccccuacugcaacuacagcaaguacugguaccugaacaacaccgccaccggcaagaccucccugcccaagugcuggcugaucagcaacggcuccuaccucaacgagacgcacuucagcgacgacaucgagcaggaggcggacaacaugaucaccgagaugcugcagaaggaguacauggagcggcaggggaagacgccccugggccucgucgaccuguucguguucuccaccagcuucuaccugaucuccaucuuccugcaccucgugaagaucccgacccaccgccacaucgucggcaagagcugccccaagccccaccggcugaaccacauggggaucugcuccugcgggcuguacaagcagcccggcgugccggugcgcuggaagcggugaggacuagucccuguucccagagcccacuuuuuuuucuuuuuuugaaauaaaauagccugucuuucagaucucaaaggcucuuuucagagccaccaaaaaaaaaaaaaaaaaaaaaaaaaaaaaaaaaaaaaaaaaaaaaaaaaaaaaaaaaaaaaaaaaaaaaaaaaaaaaaaaaaaaaaaaaaaaaaaaaaaaa

SEQ ID NO: 28733 - RNA, 1767 nt, Artificial Sequence
  mRNA product Design a-2 (hSL-A100) comprising derived and/or modified sequence from LASV(G3010-SLE-2013;Clade IV)__AIT17344__GPCmut5 (opt1)
aggagaguccgcucagccagguugcagaagcggcuuagcguguguccuaaucuucucucugcguguagguaggccugugccgcaaacaagcuuaccaugggccagaucgugaccuucuuccaggaggucccccacgugaucgaggaggugaugaacaucguccugaucgcccucagcauccuggccgugcugaaggggcucuacaacuucgcgaccugcggccugguggggcuggucacguuccuccugcugugcggccgcuccugcaccaccagccucuacaaggggguguacgagcugcagacccuggagcucaacauggagacgcugaacaugaccaugccgcuguccugcaccaagaacaacagccaccacuacaucauggugggcaacgagaccggccucgagcugacgcugaccaacaccuccaucaucaaccacaaguucugcaaccucagcgacgcccacaagaagaaccuguacaaccacgcccugauguccaucaucagcaccuuccaccucuccauccccaacuucaaccaguacgaggccaugagcugcgacuucaacgggggcaagaucuccguccaguacaaccugagccacuccuacgccggggacgcggccagccacugcggcacgguggccaacggggugcugcagaccuucaugcggauggccuggggcggcuccuacaucgcgcucgacagcgggugcggcaagugggacugcaucaugaccuccuaccaguaccugaucauccagaacaccacgugggaggaccacugccaguucagccgccccucccccaucggguaccugggccuccugagccagcggacccgcgacaucuacaucagccggcgccugcucggcaccuucaccuggacgcuguccgacagcgaggggaaggacaccccgggcggguacugccugacccgguggaugcucaucgaggccgagcugaagugcuucggcaacaccgccgucgccaagugcaacgagaagcacgacgaggaguucugcgacaugcugcgccucuucgacuucaacaagcaggccauccagcggcugaagacgcccgcgcagauguccauccagcugaucaacaaggccgugaacgcccucaucaacgaccagcugaucaugaagaaccaccuccgcgacaucaugugcauccccuacugcaacuacagcaaguacugguaccugaaccacaccaccaccggcaagacgucccugcccaagugcuggcuggugagcaacggcuccuaccucaacgagacccacuucagcgacgacaucgagcagcaggccgacaacaugaucaccgagaugcugcagaaggaguacauggagcggcaggggaagacgccccugggccucgucgaccuguucguguucuccaccagcuucuaccugaucuccaucuuccugcaccucgugaagaucccgacccaccgccacaucgucggcaagagcugccccaagccccaccggcugaaccacauggggaucugcuccugcgggcuguacaagcagcccggcgugccggugcgcuggaagcggugaggacuagucccuguucccagagcccacuuuuuuuucuuuuuuugaaauaaaauagccugucuuucagaucucaaaggcucuuuucagagccaccaaaaaaaaaaaaaaaaaaaaaaaaaaaaaaaaaaaaaaaaaaaaaaaaaaaaaaaaaaaaaaaaaaaaaaaaaaaaaaaaaaaaaaaaaaaaaaaaaaaaa

SEQ ID NO: 28734 - RNA, 1767 nt, Artificial Sequence
  mRNA product Design a-2 (hSL-A100) comprising derived and/or modified sequence from LASV(G502-SLE-2009;Clade IV)__AIT17126__GPCmut5 (opt1)
aggagaguccgcucagccagguugcagaagcggcuuagcguguguccuaaucuucucucugcguguagguaggccugugccgcaaacaagcuuaccaugggccagaucgugaccuucuuccaggaggucccccacgugaucgaggaggugaugaacaucguccugaucgcccucagcauccuggccgugcugaaggggcucuacaacuucgcgaccugcggccugguggggcugcucacguuccugcugcucugcggccgcuccugcaccaccgggcuguacaagggcgucuacgagcugcagacccucgagcugaacauggagacgcugaacaugaccaugccgcucagcugcaccaagaacaacucccaccacuacaucauggugggcaacgagaccgggcuggagcugacgcucaccaacaccagcaucaucaaccacaaguucugcaaccuguccgacgcccacaagaagaaccuguacgaccacgcccucaugagcaucaucuccaccuuccaccugagcauccccaacuucaaccaguacgaggccauguccugcgacuucaacggcgggaagaucagcgugcaguacaaccugucccacagcuacgccggcgacgcggccgaccacugcgggacggucgccaacggcgugcuccagaccuucaugcggauggccuggggcggguccuacaucgcgcuggacagcggcugcgggcggugggacugcaucaugaccuccuaccaguaccugaucauccagaacaccacgugggaggaccacugccaguucagccgccccucccccaucggcuaccucggccugcugagccagcggacccgcgacaucuacaucucccggcgccuccuggggaccuucaccuggacgcugagcgacagcgagggcaaggacacccccgggggcuacugccucacccgguggaugcugaucgaggccgagcugaagugcuucgggaacaccgccguggccaagugcaacgagaagcacgacgaggaguucugcgacaugcuccgccuguucgacuucaacaagcaggccauccagcggcugaaggcgcccgcccagauguccauccagcucaucaacaaggccgucaacgcccugaucaacgaccagcuggugaugaagaaccaccuccgcgacaucaugugcauccccuacugcaacuacagccgguacugguaccugaaccacacgaccaccggccgcaccucccugcccaagugcuggcucgugagcaacggguccuaccugaacgagacgcacuucagcgacgacaucgagcagcaggccgacaacaugaucaccgagaugcugcagaaggaguacauggagcggcagggcaagaccccgcucgggcuggucgaccuguucguguucuccaccagcuucuaccugaucuccaucuuccuccaccuggugaagaucccgacgcaccgccacaucgucggcaagagcugccccaagccccaccggcugaaccacauggggaucugcuccugcggccucuacaagcagcccggcgugccggugaaguggaagcgcugaggacuagucccuguucccagagcccacuuuuuuuucuuuuuuugaaauaaaauagccugucuuucagaucucaaaggcucuuuucagagccaccaaaaaaaaaaaaaaaaaaaaaaaaaaaaaaaaaaaaaaaaaaaaaaaaaaaaaaaaaaaaaaaaaaaaaaaaaaaaaaaaaaaaaaaaaaaaaaaaaaaaa

SEQ ID NO: 28735 - RNA, 1767 nt, Artificial Sequence
  mRNA product Design a-2 (hSL-A100) comprising derived and/or modified sequence from LASV(G733-SLE-2010;Clade IV)__AIT17154__GPCmut5 (opt1)
aggagaguccgcucagccagguugcagaagcggcuuagcguguguccuaaucuucucucugcguguagguaggccugugccgcaaacaagcuuaccaugggccagaucgugaccuucuuccaggaggucccccacgugaucgaggaggugaugaacaucguccugaucgcccucagcauccuggccgugcugaaggggcucuacaacuucgcgaccugcggcaucguggggcuggucuccuuccugcuccugugcggccgcagcugcacgaccucccuguacaaggggguguacgagcuccagacccuggagcugaacauggagacccucaacaugacgaugccgcugagcugcaccaagaacaacucccaccacuacaucauggugggcaacgagaccggccuggagcucacccugacgaacaccagcaucaucaaccacaaguucugcaaccuguccgacgcccacaagaagaaccucuacgaccacgcccugaugagcaucaucuccaccuuccaccugagcauccccaacuucaaccaguacgaggccauguccugcgacuucaacgggggcaagaucagcguccaguacaaccucucccacagcuacgccggggacgcggccaaccacugcggcaccaucgccaacggggugcugcagacguucaugcggauggccuggggcggcuccuacaucgcgcuggacagcgggugcgaccggugggacugcaucaugaccuccuaccaguaccucaucauccagaacaccaccugggaggaccacugccaguucagccgccccucccccaucggcuaccuggggcugcucagccagcggacgcgcgacaucuacaucagccggcgccugcugggcaccuucaccuggacccucuccgacagcgagggcaaggacacgcccgggggcuacugccugacccgguggaugcugaucgaggccgagcucaagugcuucgggaacaccgccguggccaagugcaacgagaagcacgacgaggaguucugcgacaugcugcgccuguucgacuucaacaagcaggccauccagcggcucaaggcgcccgcccagauguccauccagcugaucaacaaggccgucaacgcccugaucaacgaccagcucaucaugaagaaccaccuccgcgacaucaugugcauccccuacugcaacuacagcaaguacugguaccugaaccacaccacgaccgggaagaccucccugcccaagugcuggcuggugagcaacggcuccuaccugaacgagacccacuucagcgacgacaucgagcagcaggccgacaacaugaucacggagaugcuccagaaggaguacauggagcggcagggcaagaccccgcuggggcugguggaccucuucgucuucuccaccagcuucuaccugaucuccaucuuccugcaccuggugaagaucccgacccaccgccacguggucggcaagagcugccccaagccccaccggcucaaccacauggggaucugcuccugcggccuguacgggcagcccggcgugccggugaaguggaagcgcugaggacuagucccuguucccagagcccacuuuuuuuucuuuuuuugaaauaaaauagccugucuuucagaucucaaaggcucuuuucagagccaccaaaaaaaaaaaaaaaaaaaaaaaaaaaaaaaaaaaaaaaaaaaaaaaaaaaaaaaaaaaaaaaaaaaaaaaaaaaaaaaaaaaaaaaaaaaaaaaaaaaaa

SEQ ID NO: 28736 - RNA, 1767 nt, Artificial Sequence
  mRNA product Design a-2 (hSL-A100) comprising derived and/or modified sequence from MOPV/LASV reassortant(IGS-1;Clade IV)__AFY05576__GPCmut5 (opt1)
aggagaguccgcucagccagguugcagaagcggcuuagcguguguccuaaucuucucucugcguguagguaggccugugccgcaaacaagcuuaccaugggccagaucgugaccuucuuccaggaggucccccacgugaucgaggaggugaugaacaucguccugaucgcccucagcgugcuggccgugcugaaggggcucuacaacuucgcgaccugcggccuggucgggcuggugacguuccuccugcugugcggccgcuccugcaccaccagccucuacaaggggguguacgagcugcagacccuggagcucaacauggagacgcugaacaugaccaugccgcuguccugcaccaagaacaacagccaccacuacaucauggucggcaacgagaccggccucgagcugacgcugaccaacaccuccaucaucaaccacaaguucugcaaccucagcgacgcccacaagaagaaccuguacgaccacgcccugauguccaucaucagcaccuuccaccucuccauccccaacuucaaccaguacgaggccaugagcugcgacuucaacgggggcaagaucuccgugcaguacaaccugagccacuccuacgccggggacgcggccaaccacugcggcacgguggccaacgggguccugcagaccuucaugcggauggccuggggcggcagcuacaucgcgcucgacuccgggugcggcaacugggacugcaucaugaccagcuaccaguaccugaucauccagaacaccacgugggaggaccacugccaguucucccggcccagccccaucggguaccugggccuccugucccagcgcacccgggacaucuacaucagccgccggcugcucggcaccuucaccuggacgcugagcgacuccgagggggaggacaccccgggcggguacugccugacccgcuggaugcucaucgaggccgagcugaagugcuucggcaacaccgccguggccaagugcaacgagaagcacgacgaggaguucugcgacaugcugcggcuguucgacuucaacaagcaggccauccagcgccugaaggcgcccgcccagaugagcauccagcugaucaacaaggccgugaacgcccucaucaacgaccagcugaucaugaagaaccaccuccgggacaucaugugcauccccuacugcaacuacuccaaguacugguaccucaaccacacgaccaccggccgcaccagccugcccaagugcuggcuggucuccaacggcagcuaccucaacgagacgcacuucuccgacgacaucgagcagcaggccgacaacaugaucaccgagaugcugcagaaggaguacauggagcggcaggggaagacgccccugggccucguggaccuguucguguucagcaccuccuucuaccugaucagcaucuuccugcaccucgucaagaucccgacccaccgccacaucguggggaaguccugccccaagccccaccggcugaaccacaugggcaucugcagcugcgggcuguacaagcagcccggcgugccggucaaguggaagcgcugaggacuagucccuguucccagagcccacuuuuuuuucuuuuuuugaaauaaaauagccugucuuucagaucucaaaggcucuuuucagagccaccaaaaaaaaaaaaaaaaaaaaaaaaaaaaaaaaaaaaaaaaaaaaaaaaaaaaaaaaaaaaaaaaaaaaaaaaaaaaaaaaaaaaaaaaaaaaaaaaaaaaa

SEQ ID NO: 28737 - RNA, 1767 nt, Artificial Sequence
  mRNA product Design a-2 (hSL-A100) comprising derived and/or modified sequence from LASV(LM765-SLE-2012;Clade IV)__AIT17814__GPCmut5 (opt1)
aggagaguccgcucagccagguugcagaagcggcuuagcguguguccuaaucuucucucugcguguagguaggccugugccgcaaacaagcuuaccaugggccagaucgugaccuucuuccaggaggucccccacgugaucgaggaggugaugaacaucguccugaucgcccucagcauccuggccgugcugaaggggcucuacaacuucgcgaccugcggccugguggggcuggucacguuccuccugcugugcggccgcuccugcaccaccagccucuacaaggggguguacgagcugcagacccuggagcucaacauggagacgcugaacaugaccaugccgcuguccugcaccaagaacaacagccaccacuacaucauggugggcaacgagaccggccucgagcugacgcugaccaacaccuccaucaucgaccacaaguucugcaaccucagcgacgcccaccggaagaaccuguacgaccacgcccugauguccaucaucagcaccuuccaccucuccauccccaacuucaaccaguacgaggccaugagcugcgacuucaacgggggcaagaucuccguccaguacaaccugagccacuccuacgccaaggacgcggccgaccacugcgggacgguggccaacggcgugcugcagaccuucaugcgcauggccuggggcgggagcuacaucgcgcucgacuccggcugcgggcgcugggacugcaucaugaccagcuaccaguaccugaucauccagaacaccacgugggaggaccacugccaguucucccggcccagccccaucggcuaccuggggcuccugucccagcgcacccgggacaucuacaucagccgccggcugcucggcaccuucaccuggacgcugagcgacuccgagggcaaggacacccccgggggcuacugccugacccgcuggaugcucaucgaggccgagcugaagugcuucgggaacaccgccgucgccaagugcaacgagaagcacgacgaggaguucugcgacaugcugcggcuguucgacuucaacaagcaggccauccagcgccugaaggcgcccgcccagaugagcauccagcugaucaacaaggccgugaacgcccucaucaacgaccagcugaucaugaagaaccaccuccgggacaucaugugcauccccuacugcaacuacuccaaguacugguaccucaaccacacgaccaccgggaagaccagccugcccaagugcuggcugguguccaacggcagcuaccucaacgagacgcacuucuccgacgacaucgagcagcaggccgacaacaugaucaccgagaugcugcagaaggaguacauggagcgccagggcaagaccccgcuggggcucgucgaccuguucguguucagcaccuccuucuaccugaucagcaucuuccugcaccucgugaagaucccgacgcaccggcacaucgucggcaagcccugccccaagccccaccgccugaaccacauggggaucugcuccugcggccuguacaagcagccgggggugcccgugaaguggaagcggugaggacuagucccuguucccagagcccacuuuuuuuucuuuuuuugaaauaaaauagccugucuuucagaucucaaaggcucuuuucagagccaccaaaaaaaaaaaaaaaaaaaaaaaaaaaaaaaaaaaaaaaaaaaaaaaaaaaaaaaaaaaaaaaaaaaaaaaaaaaaaaaaaaaaaaaaaaaaaaaaaaaaa

SEQ ID NO: 28738 - RNA, 1767 nt, Artificial Sequence
  mRNA product Design a-2 (hSL-A100) comprising derived and/or modified sequence from LASV(LM776-SLE-2012;Clade IV)__AIT17824__GPCmut5 (opt1)
aggagaguccgcucagccagguugcagaagcggcuuagcguguguccuaaucuucucucugcguguagguaggccugugccgcaaacaagcuuaccaugggccagaucgugaccuucuuccaggaggucccccacgugaucgaggaggugaugaacaucguccugaucgcccucagcauccuggccgugcugaaggggcucuacaacuucgcgaccugcggccugguggggcuggucacguuccuccugcugugcggccgcuccugcaccaccagcguguacaaggggguguacgagcuccagacccuggagcugaacauggagacgcucaacaugaccaugccgcuguccugcaccaagaacaacagccaccacuacaucauggucggcaacgagaccggccuggagcucacgcugaccaacaccuccaucaucaaccacaaguucugcaaccugagcgacgcccacaagaagaaccucuacgaccacgcccugauguccaucaucagcaccuuccaccuguccauccccaacuucaaccaguacgaggccaugagcugcgacuucaacgggggcaagaucuccgugcaguacaaccucagccacuccuacgccggggacgcggccaaccacugcggcacgguggccaacgggguccugcagaccuucaugcggauggccuggggcggcagcuacaucgcgcuggacuccgggugcggcaagugggacugcaucaugaccagcuaccaguaccucaucauccagaacaccacgugggaggaccacugccaguucucccgccccagccccaucggguaccugggccugcucucccagcggacccgcgacaucuacaucagccggcgccugcugggcaccuucaccuggacgcucagcgacuccgaggggaaggacaccccgggcggguacugccugacccgguggaugcugaucgaggccgagcucaagugcuucggcaacaccgccguggccaagugcaacgagaagcacgacgaggaguucugcgacaugcugcgccuguucgacuucaacaagcaggccauccagcggcucaaggcgcccgcccagaugagcauccagcugaucaacaaggccgugaacgcccugaucaacgaccagcucaucaugaagaaccaccuccgcgacaucaugugcauccccuacugcaacuacuccaaguacugguaccugaaccacacgaccaccggcaagaccagccugcccaagugcuggcuggucuccaacggcagcuaccugaacgagacgcacuucuccgacgacaucgagcagcaggccgacaacaugaucaccgagaugcuccagaaggaguacauggagcggcaggggaagacgccccugggccugguggaccucuucguguucagcaccuccuucuaccugaucagcaucuuccugcaccuggucaagaucccgacccaccgccacaucguggggaaguccugccccaagccccaccggcucaaccacaugggcaucugcagcugcgggcuguacaagcagcccggcgugccgguccgcuggaagcggugaggacuagucccuguucccagagcccacuuuuuuuucuuuuuuugaaauaaaauagccugucuuucagaucucaaaggcucuuuucagagccaccaaaaaaaaaaaaaaaaaaaaaaaaaaaaaaaaaaaaaaaaaaaaaaaaaaaaaaaaaaaaaaaaaaaaaaaaaaaaaaaaaaaaaaaaaaaaaaaaaaaaa

SEQ ID NO: 28739 - RNA, 1767 nt, Artificial Sequence
  mRNA product Design a-2 (hSL-A100) comprising derived and/or modified sequence from LASV(Mad39;Clade IV)__ANH09722__GPCmut5 (opt1)
aggagaguccgcucagccagguugcagaagcggcuuagcguguguccuaaucuucucucugcguguagguaggccugugccgcaaacaagcuuaccaugggccagaucgugaccuucuuccaggaggucccccacgugaucgaggaggugaugaacaucguccugaucgcccucagcauccuggccgugcugaaggggcucuacaacguggcgaccugcggccugaucgggcuggucacguuccuccugcugugcggccgcuccugcaccaccacccucuacaaggggguguacgagcugcaggcccuggagcucaacauggagacgcugaacaugaccaugccgcugagcugcaccaagaacaacucccaccacuacauccgggugggcaacgagaccggccucgagcugacgcugaccaacaccagccucaucaaccacaaguucugcaaccuguccgacgcccacaagaagaaccuguacgaccacgcccucaugagcaucaucuccaccuuccaccugagcauccccaacuucaaccaguacgaggccauguccugcgacuucaacgacgggaagaucagcguccaguacaaccugucccacacguacgcgggcgacaccgccaaccacugcgggaccguggccaacggcgugcuccagaccuucaugcgcauggccuggggcgggagcuacaucgcgcuggacuccggcugcgggggcugggacugcaucaugacgagcuaccaguaccugaucauccagaacaccaccugggaggaccacugccaguucucccggcccagccccaucggguaccucggccugcugucccagcggacccgcgacaucuacaucagccggcgccuccugggcacguucaccuggacccuguccgacagcgaggggaaggacaccccgggcggguacugccucacgcgguggaugcugaucgaggccgagcugaagugcuucggcaacaccgccgucgccaagugcaacgagaagcacgacgaggaguucugcgacaugcuccgccuguucgacuucaacaagcaggccauccagcggcugaaggcgcccgcccagaugagcauccagcucaucaacaaggccgugaacgcccugaucaacgaccagcugaucaugaagaaccaccuccgcgacaucaugugcauccccuacugcaacuacuccaaguacugguaccugaaccacaccgugaccggcaagacgagccugcccaagugcuggcucgucuccaacggcagcuaccugaacgagacccacuucuccgacgacaucgagcagcaggccgacaacaugaucaccgagaugcugcagaaggaguacauggagcggcaggggaagacgccccucggccugguggaccuguucguguucagcaccuccuucuaccugaucagcaucuuccuccaccuggucaagaucccgacccaccgccacgugguggggaagcccugccccaagccccaccggcugaaccacaugggcaucugcuccugcggguucuacaagcagccgggcguccccgugcgcuggaagcggugaggacuagucccuguucccagagcccacuuuuuuuucuuuuuuugaaauaaaauagccugucuuucagaucucaaaggcucuuuucagagccaccaaaaaaaaaaaaaaaaaaaaaaaaaaaaaaaaaaaaaaaaaaaaaaaaaaaaaaaaaaaaaaaaaaaaaaaaaaaaaaaaaaaaaaaaaaaaaaaaaaaaa

SEQ ID NO: 28740 - RNA, 1767 nt, Artificial Sequence
  mRNA product Design a-2 (hSL-A100) comprising derived and/or modified sequence from LASV(Z0947-SLE-2011;Clade IV)__AIT17840__GPCmut5 (opt1)
aggagaguccgcucagccagguugcagaagcggcuuagcguguguccuaaucuucucucugcguguagguaggccugugccgcaaacaagcuuaccaugggccagaucgugaccuucuuccaggaggucccccacgugaucgaggaggugaugaacaucguccugaucgcccucagcauccuggccgugcugaaggggcucuacaacuucgcgaccugcggccugguggggcuggucacguuccuccugcugugcggccgcuccugcaccaucagccucuacaaggggguguacgagcugcagacccuggagcucaacauggagacccugaacaugacgaugccgcuguccugcaccaagaacaacagccaccacuacaucauggugggcaacgagaccggccucgagcugacccugacgaacaccuccaucaucaaccacaaguucugcaaccucagcgacgcccacaagaagaaccuguacgaccacgcccugauguccaucaucagcaccuuccaccucuccauccccaacuucaaccaguacgaggccaugagcugcgacuucaacgggggcaagaucuccguccaguacaaccugagccacuccuacgccggggacgcggccaaccacugcggcaccguggccaacggggugcugcagacguucaugcggauggccuggggcggcagcuacaucgcgcucgacuccgggugcgaccggugggacugcaucaugaccagcuaccaguaccugaucauccagaacaccaccugggaggaccacugccaguucucccgccccagccccaucggcuaccuggggcuccugucccagcggacgcgcgacaucuacaucagccggcgccugcucggcaccuucaccuggacccugagcgacuccgagggcaaggacacgcccgggggcuacugccugacccgguggaugcucaucgaggccgagcugaagugcuucgggaacaccgccgucgccaagugcaacgagaagcacgacgaggaguucugcgacaugcugcgccucuucgacuucaacaagcaggccauccagcggcugaaggcgcccgcccagaugagcauccagcugaucaacaaggccgugaacgcccucaucaacgaccagcugaucaugaagaaccaccuccgcgacaucaugugcauccccuacugcaacuacuccaaguacugguaccugaaccacaccacgaccgggaagaccagccugcccaagugcuggcugguguccaacggcagcuaccucaacgagacccacuucuccgacgacaucgagcagcaggccgacaacaugaucacggagaugcugcagaaggaguacauggagcggcagggcaagaccccgcuggggcucgucgaccuguucguguucagcaccuccuucuaccugaucagcaucuuccugcaccucgugaagaucccgacccaccgccacaucgucggcaagcccugccccaagccccaccggcugaaccacauggggaucugcuccugcggccuguacaagcagccgggggugcccgugaaguggaagcgcugaggacuagucccuguucccagagcccacuuuuuuuucuuuuuuugaaauaaaauagccugucuuucagaucucaaaggcucuuuucagagccaccaaaaaaaaaaaaaaaaaaaaaaaaaaaaaaaaaaaaaaaaaaaaaaaaaaaaaaaaaaaaaaaaaaaaaaaaaaaaaaaaaaaaaaaaaaaaaaaaaaaaa

SEQ ID NO: 28741 - RNA, 1767 nt, Artificial Sequence
  mRNA product Design a-2 (hSL-A100) comprising derived and/or modified sequence from LASV(Josiah;Clade IV)__NP_694870__GPCmut5 (opt1)
aggagaguccgcucagccagguugcagaagcggcuuagcguguguccuaaucuucucucugcguguagguaggccugugccgcaaacaagcuuaccaugggccagaucgugaccuucuuccaggaggucccccacgugaucgaggaggugaugaacaucguccugaucgcccucagcgugcuggccgugcugaaggggcucuacaacuucgcgaccugcggccuggucgggcuggugacguuccuccugcugugcggccgcuccugcaccaccagccucuacaaggggguguacgagcugcagacccuggagcucaacauggagacgcugaacaugaccaugccgcuguccugcaccaagaacaacagccaccacuacaucauggucggcaacgagaccggccucgagcugacgcugaccaacaccuccaucaucaaccacaaguucugcaaccucagcgacgcccacaagaagaaccuguacgaccacgcccugauguccaucaucagcaccuuccaccucuccauccccaacuucaaccaguacgaggccaugagcugcgacuucaacgggggcaagaucuccgugcaguacaaccugagccacuccuacgccggggacgcggccaaccacugcggcacgguggccaacgggguccugcagaccuucaugcggauggccuggggcggcagcuacaucgcgcucgacuccgggugcggcaacugggacugcaucaugaccagcuaccaguaccugaucauccagaacaccacgugggaggaccacugccaguucucccgccccagccccaucggguaccugggccuccugucccagcggacccgcgacaucuacaucagccggcgccugcucggcaccuucaccuggacgcugagcgacuccgaggggaaggacaccccgggcggguacugccugacccgguggaugcucaucgaggccgagcugaagugcuucggcaacaccgccguggccaagugcaacgagaagcacgacgaggaguucugcgacaugcugcgccucuucgacuucaacaagcaggccauccagcggcugaaggcgcccgcccagaugagcauccagcugaucaacaaggccgugaacgcccucaucaacgaccagcugaucaugaagaaccaccuccgcgacaucaugugcauccccuacugcaacuacuccaaguacugguaccugaaccacacgaccaccgggcggaccagccugcccaagugcuggcuggucuccaacggcagcuaccucaacgagacgcacuucuccgacgacaucgagcagcaggccgacaacaugaucaccgagaugcugcagaaggaguacauggagcgccagggcaagaccccgcuggggcugguggaccucuucguguucagcaccuccuucuaccugaucagcaucuuccugcaccucgucaagauccccacgcaccggcacaucgugggcaaguccugccccaagccccaccgccugaaccacauggggaucugcagcugcggccuguacaagcagccgggggugcccgucaaguggaagcggugaggacuagucccuguucccagagcccacuuuuuuuucuuuuuuugaaauaaaauagccugucuuucagaucucaaaggcucuuuucagagccaccaaaaaaaaaaaaaaaaaaaaaaaaaaaaaaaaaaaaaaaaaaaaaaaaaaaaaaaaaaaaaaaaaaaaaaaaaaaaaaaaaaaaaaaaaaaaaaaaaaaaa

SEQ ID NO: 28742 - RNA, 1764 nt, Artificial Sequence
  mRNA product Design a-2 (hSL-A100) comprising derived and/or modified sequence from LASV(LP;Clade I)__AAF86701__GPCmut5 (opt1)
aggagaguccgcucagccagguugcagaagcggcuuagcguguguccuaaucuucucucugcguguagguaggccugugccgcaaacaagcuuaccaugggccagaucaucaccuucuuccaggaggugccccacgucaucgaggaggugaugaacaucgugcugaucgcccucagccugcuggccauccucaaggggcuguacaacaucgcgaccugcggcaucaucgggcuggucgccuuccucuuccugugcggcaaguccugcagccugacgcucaagggcggguacgagcugcagacccuggagcucaacauggagacccugaacaugaccaugccgcuguccugcacgaagaacagcucccaccacuacauccgcgugggcaacgagaccgggcucgagcugacccugaccaacacgagcaucaucaaccacaaguucugcaaccucuccgacgcccacaagaagaaccuguacgaccacgcccugaugagcaucaucuccaccuuccaccucagcauccccaacuucaaccaguacgaggccauguccugcgacuucaacggcgggaagaucagcgugcaguacaaccugucccacagcuacgcgggcgacgccgccgagcacugcgggaccgucgccaacggcgugcugcagaccuucaugcggauggcguggggcgggcgcuacaucgcccucgacuccggcugcgggaacugggacugcaucaugacgagcuaccaguaccugaucauccagaacaccaccugggaggaccacugccaguucucccggcccagccccaucggcuaccugggccuccugucccagcgcacccgggacaucuacaucagccgccggcugcucgggacguucaccuggacccugagcgacuccgagggcaacgagacccccgggggcuacugccugacgcgcuggaugcucaucgaggccgagcugaagugcuucgggaacaccgccguggccaagugcaacgagaagcacgacgaggaguucugcgacaugcugcggcuguucgacuucaacaagcaggcgauccgccggcugaaggccccggcccagaugagcauccagcugaucaacaaggccgucaacgcccucaucaacgaccagcugaucaugaagaaccaccuccgcgacaucaugugcauccccuacugcaacuacuccaaguacugguaccucaaccacaccagcuccggccggaccagccugcccaagugcuggcugaucuccaacggcagcuaccucaacgagacgcaguucuccgacgacaucgagcagcaggcggacaacaugaucaccgagaugcugcagaaggaguacaucgagcgccaggggaagaccccgcugggccugguggacaucuucaucuucagcaccuccuucuaccucaucagcaucuuccugcaccugaucaagauccccacgcaccggcacaucguggggaagcccugccccaagccgcaccgccucaaccacaugggcgucugcuccugcgggcuguacaagcaccccggcgugcccaccaaguggaagcggugaggacuagucccuguucccagagcccacuuuuuuuucuuuuuuugaaauaaaauagccugucuuucagaucucaaaggcucuuuucagagccaccaaaaaaaaaaaaaaaaaaaaaaaaaaaaaaaaaaaaaaaaaaaaaaaaaaaaaaaaaaaaaaaaaaaaaaaaaaaaaaaaaaaaaaaaaaaaaaaaaaaaa

SEQ ID NO: 28743 - RNA, 1764 nt, Artificial Sequence
  mRNA product Design a-2 (hSL-A100) comprising derived and/or modified sequence from LASV(803213;Clade II)__AAF86703__GPCmut5 (opt1)
aggagaguccgcucagccagguugcagaagcggcuuagcguguguccuaaucuucucucugcguguagguaggccugugccgcaaacaagcuuaccaugggccagaucaucaccuucuuccaggaggugccccacgucaucgaggaggugaugaacaucgugcugaucgcccucagccugcuggccauccucaaggggaucuacaacgucgcgaccugcggccuguucgggcugaucuccuuccuccugcugugcggccgcagcugcuccgugacguacaaggggguguacgagcuccagacccuggagcugaacauggccaaccucaacaugaccaugccgcugagcugcaccaagaacaacucccaccacuacaucauggucggcaacgagacgggccuggagcucacccugaccaacaccagcaucaucaaccacaaguucugcaaccuguccgacgcccacaagaagaaccucuacgaccacgcccugaugagcaucaucuccacguuccaccugagcauccccaacuucaaccaguacgaggccauguccugcgacuucaacgggggcaagaucagcgugcaguacaaccucucccacagcuucgcgguggacgccgccaaccacugcgggaccaucgccaacggcguccugcagaccuucaugcggauggcguggggcggguccuacaucgcccuggacagcggcugcgggaacugggacugcaucaugaccuccuaccaguaccucaucauccagaacacgaccugggaggaccacugccaguucagccgccccucccccaucggcuaccuggggcugcucagccagcggacccgcgacaucuacaucagccggcgccugcugggcaccuucacguggacccucuccgacagcgagggcaacgaggcccccgggggcuacugccugacccgguggaugcugaucgaggccgagcucaagugcuucgggaacaccgccguggcgaagugcaacgagaagcacgacgaggaguucugcgacaugcugcgccuguucgacuucaacaagcaggccaucaagcggcucaagacgccggcccagauguccauccagcugaucaacaaggccgugaacgcccugaucaacgaccagcucaucaugaagaaccaccuccgcgacaucaugugcauccccuacugcaacuacagccgguacugguaccugaaccacaccgucaccggcaagaccucccugccccgcugcuggcuggugagcaacggguccuaccugaacgagacgcacuucagcgacgacaucgagcagcaggcggacaacaugaucaccgagaugcuccagaaggaguacauggaccggcagggcaagaccccgcugggccugguggaccuguucgucuucuccaccagcuucuaccucaucuccaucuuccugcaccuggugaagauccccacgcaccgccacaucguggggaagcccugccccaagccgcaccggcucaaccacaugggcaucugcagcugcgggcuguacaagcaccccggcguccccgugaaguggaagcgcugaggacuagucccuguucccagagcccacuuuuuuuucuuuuuuugaaauaaaauagccugucuuucagaucucaaaggcucuuuucagagccaccaaaaaaaaaaaaaaaaaaaaaaaaaaaaaaaaaaaaaaaaaaaaaaaaaaaaaaaaaaaaaaaaaaaaaaaaaaaaaaaaaaaaaaaaaaaaaaaaaaaaa

SEQ ID NO: 28744 - RNA, 1764 nt, Artificial Sequence
  mRNA product Design a-2 (hSL-A100) comprising derived and/or modified sequence from LASV(GA391;Clade III)__CAA36645__GPCmut5 (opt1)
aggagaguccgcucagccagguugcagaagcggcuuagcguguguccuaaucuucucucugcguguagguaggccugugccgcaaacaagcuuaccaugggccagaucgugaccuucuuccaggaggucccccacgugaucgaggaggugaugaacaucguccugaucgcccucagcauccuggccauccugaaggggcucuacaacguggcgaccugcggccugaucgggcuggugacguuccuccugcuguccggccgcagcugcucccucaucuacaaggggaccuacgagcugcagacccuggagcucaacauggagacccugaacaugacgaugccgcugagcugcaccaagaacaacucccaccacuacauccgggucggcaacgagaccggccucgagcugacccugacgaacaccagcauccucaaccacaaguucugcaaccuguccgacgcccacaagcgcaaccuguacgaccacagccucauguccaucaucagcaccuuccaccuguccauccccaacuucaaccaguacgaggccaugagcugcgacuucaacgggggcaagaucaccgugcaguacaaccugucccacagcuucgccguggacgccgcggggcacugcggcacgcucgccaacgggguccugcagaccuucaugcggauggccuggggcggcuccuacaucgcccuggacagcgggugcggcaacugggacugcaucaugaccuccuaccaguaccucaucauccagaacaccacgugggacgaccacugccaguucagccgccccucccccaucggguaccugggccugcucagccagcggacccgcgacaucuacaucagccggcgccugcugggcaccuucaccuggacgcucuccgacagcgaggggaacgagaccccgggcggguacugccugacccgguggaugcugaucgaggcggagcucaagugcuucggcaacaccgccguggccaagugcaacgagaagcacgacgaggaguucugcgacaugcugcgccuguucgacuucaacaagcaggccauccggcgccucaagacgcccgcccagauguccauccagcugaucaacaaggcggugaacgcccugaucaacgaccagcucaucaugaagaaccaccuccgggacaucaugugcauccccuacugcaacuacagccgcuacugguaccugaaccacaccuccaccgggaagaccagccugccccggugcuggcugaucuccaacggcagcuaccugaacgagacgaaguucuccgacgacaucgagcagcaggccgacaacaugaucaccgagaugcugcagaaggaguacaucgaccgccagggcaagaccccgcucgggcuggucgaccuguucguguucagcaccuccuucuaccucaucagcaucuuccugcaccuggugaagauccccacgcaccggcacaucgucggcaagcccugccccaagccgcaccgccucaaccacauggggaucugcuccugcggccuguacaagcagcccggggugcccgugcgguggaagcgcugaggacuagucccuguucccagagcccacuuuuuuuucuuuuuuugaaauaaaauagccugucuuucagaucucaaaggcucuuuucagagccaccaaaaaaaaaaaaaaaaaaaaaaaaaaaaaaaaaaaaaaaaaaaaaaaaaaaaaaaaaaaaaaaaaaaaaaaaaaaaaaaaaaaaaaaaaaaaaaaaaaaaa

SEQ ID NO: 28745 - RNA, 1767 nt, Artificial Sequence
  mRNA product Design a-2 (hSL-A100) comprising derived and/or modified sequence from LASV(AV;Clade V)__CCA30314__GPCmut5 (opt1)
aggagaguccgcucagccagguugcagaagcggcuuagcguguguccuaaucuucucucugcguguagguaggccugugccgcaaacaagcuuaccaugggccagaucgugaccuucuuccaggaggucccccacgugaucgaggaggugaugaacaucguccugaucgcccucagcauccuggccgugcugaaggggcucuacaacaucgcgaccugcggccugaucgggcugaucacguuccuccugcugugcggccgcuccugcagcuccaaccucuacaaggggguguacgagcugcagagccuggaccucaacauggagacccugaacaugaccaugccgcuguccugcaccaagaacaacagccaccacuacauccgggucggcaacgacacgggccucgagcugacccugaccaacaccuccauccucaaccacaaguucugcaaccugagcgacgcccacaagaaggaccuguacgaccacgcccucauguccaucaucagcacguuccaccuguccauccccaacuucaaccaguacgaggccaugagcugcgacuucaacgggggcaagaucuccgugcaguacaaccugagccacuccuacgccaucgacgcggccaaccacugcgggaccguggccaacggcauccuccagaccuucaugcgcauggccuggggcgggagcuacaucgcgcuggacuccggcugcgggaacugggacugcaucaugaccagcuaccaguaccugaucauccagaacacgaccugggagaaccacugccaguucucccggcccagccccaucggcuaccucgggcugcugagccagcgcacccgggacaucuacaucucccgccggcuccugggcaccuucacguggacccugagcgacuccgagggcaacgccacccccgggggcuacugccucacccgcuggaugcugaucgaggccgagcugaagugcuucgggaacacggccgucgccaagugcaacgagaagcacgacgaggaguucugcgacaugcuccggcuguucgacuucaacaagcaggcgaucagccgccugaaguccccggcccagaugagcauccagcucaucaacaaggccgugaacgcccugaucaacgaccagcugaucaugaagaaccaccuccgggacaucaugugcauccccuacugcaacuacuccaaguacugguaccugaaccacaccaucaccggcaagaccagccugcccaagugcuggcucguguccaacgggagcuaccugaacgagacgcacuucuccgacgacaucgagcagcaggccgacaacaugaucaccgagaugcugcagaaggaguacauggagcgccagggcaagaccccgcugggccucgucgaccuguucguguucagcaccuccuucuaccugaucagcaucuuccuccggcuggugaagauccccacgcaccgccacaucgucgggaagcccugccccaagccgcaccggcugaaccacaugggcaucugcuccugcgggcucuacaagcagcccggcgugcccgugcgcuggaagcggugaggacuagucccuguucccagagcccacuuuuuuuucuuuuuuugaaauaaaauagccugucuuucagaucucaaaggcucuuuucagagccaccaaaaaaaaaaaaaaaaaaaaaaaaaaaaaaaaaaaaaaaaaaaaaaaaaaaaaaaaaaaaaaaaaaaaaaaaaaaaaaaaaaaaaaaaaaaaaaaaaaaaa

SEQ ID NO: 28746 - RNA, 1764 nt, Artificial Sequence
  mRNA product Design a-2 (hSL-A100) comprising derived and/or modified sequence from LASV(Togo/2016/7082;Clade VI)__AMR44577__GPCmut5 (opt1)
aggagaguccgcucagccagguugcagaagcggcuuagcguguguccuaaucuucucucugcguguagguaggccugugccgcaaacaagcuuaccaugggccagaucaucaccuucuuccaggaggugccccacgucaucgaggaggugaugaacaucgugcugaucgcccucagccugcuggccauccucaagggggucuacaacguggcgaccugcggcaucaucgggcuggugacguuccuguuccucugcggccgcuccugcagccugaucuacaagggguccuacgagcugcagacccucgagcugaacauggagacccugaacaugaccaugccgcucagcugcacgaagaacuccagccaccacuacauccgggucggcaacgagaccggccuggagcugacccucaccaacacguccaucaucaaccacaaguucugcaaccugagcgacgcccacaagcgcaaccuguacgaccacgcccucauguccauccugagcaccuuccaccuguccauccccaacuucaaccaguacgaggccaugagcugcgacuucaacgggggcaagaucuccgugcaguacaaccucagccacgccuacgcgguggacgccgccgagcacugcgggaccgucgccaacggcgugcugcagaccuucaugcggauggcguggggcggguccuacaucgcccuggacagcggcugcgggaacugggacugcaucaugacguccuaccaguaccucaucauccagaacaccaccugggaggaccacugccaguucagccgccccucccccaucggcuaccuggggcugcucagccagcggacccgcgacaucuacaucagccggcgccugcugggcacguucaccuggacccucuccgacagcgagggcaacgagacccccgggggcuacugccugacgcgguggaugcugaucgaggccgagcucaagugcuucgggaacaccgccguggccaagugcaacgagaagcacgacgaggaguucugcgacaugcugcgccuguucgacuucaacaagcaggcgauccagcggcucaaguccccggcccagaugagcauccagcugaucaacaaggccgucaacgcccugaucaacgaccagcucaucaugaagaaccaccuccgcgacaugaugugcauccccuacugcaacuacuccaaguacugguaccugaaccacaccagcuccggccggaccagccugcccaagugcuggcugguguccaacgggagcuaccugaacgagacgcacuucuccgacgacaucgagcagcaggccgacaacaugaucaccgagaugcuccagaaggaguacaucgaccgccagggcaagaccccgcugggccugguggaccuguucgucuucagcaccuccuucuaccucaucagcaucuuccugcaccugaucaagauccccacgcaccggcacaucguggggaagcccugccccaagccgcaccgccucaaccacaugggcaucugcuccugcgggcuguacaagcagcccggcgugcccacccgguggaagcgcugaggacuagucccuguucccagagcccacuuuuuuuucuuuuuuugaaauaaaauagccugucuuucagaucucaaaggcucuuuucagagccaccaaaaaaaaaaaaaaaaaaaaaaaaaaaaaaaaaaaaaaaaaaaaaaaaaaaaaaaaaaaaaaaaaaaaaaaaaaaaaaaaaaaaaaaaaaaaaaaaaaaaa

SEQ ID NO: 28747 - RNA, 1764 nt, Artificial Sequence
  mRNA product Design a-2 (hSL-A100) comprising derived and/or modified sequence from LASV(KAK-428;Clade n.d. (VII))__ANH09740__GPCmut5 (opt1)
aggagaguccgcucagccagguugcagaagcggcuuagcguguguccuaaucuucucucugcguguagguaggccugugccgcaaacaagcuuaccaugggccagaucgugaccuucuuccaggaggucccccacgugaucgaggaggugaugaacaucguccugaucgcccucagccugcuggccauccucaaggggcuguacaacuucgcgaccugcggcgugaucgggcugaucacguuccuccugcugugcggccgcuccugcagcgccaccuacaaggggcaguacgagcuccagacccuggagcugaacauggagucccucaacaugaccaugccgcugagcugcacgaagaacaacucccaccacuacauccgggccggcaacaacaccggccuggagcucacccugaccaacacgagcaucaucucccacaaguucugcaaccugagcgacgcccacaagaagaaccucuacgaccacacccugauguccaucaucaccaccuuccaccugagcauccccaacuucaaccaguacgaggccauguccugcgacuucaacgggggcaagaucagcauccaguacaaccucucccacagcuacgcgggggacgccgcccagcacugcggcacgguggccaacgggguccugcagaccuucaugcgcauggcguggggcggcuccuaccuggcccucgacagcgggugccggggcugggacugcaucaucuccagcuaccaguaccugaucauccagaacaccaccugggacgaccacugccaguucucccgccccagccccaucggguaccugggcuucgugagccagaagacgcgggacaucuacaucucccgccggcuccugggcaccuucaccuggacccugagcgacuccgaggggcacgacaugccgggcggguacugccucacgcgcuggaugcugaucgaggccgaccugaagugcuucggcaacaccgccguggccaagugcaacgagaagcacgacgaggaguucugcgacauguggcggcuguucgacuucaacaagcaggcgauccagcgccugaaggcccccgcccagaugaacauccagcugaucaacaaggccgucaacgcccucaucaacgaccagcugaugaugaagaaccaccuccgggacaucaugugcauccccuacugcaacuacagcaaguucugguaccucaacaacaccaccacggggcgcaccucccugccccggugcuggcugaucagcaacggcuccuaccucaacgagacccacuucagcgacgacaucgagcagcaggcggacaacaugaucaccgagaugcugcagaaggaguacauggaccgccagggcaagacgccgcuggggcucguggaccuguucguguucuccaccagcuucuaccugaucaccaucuuccugcaccucgucaagauccccacccaccggcacaucgugggcaagcccugccccaagccgcaccgccugaaccacauggggaucugcuccugcggccuguacaagcagcccggggugcccguccgguggaagcgcugaggacuagucccuguucccagagcccacuuuuuuuucuuuuuuugaaauaaaauagccugucuuucagaucucaaaggcucuuuucagagccaccaaaaaaaaaaaaaaaaaaaaaaaaaaaaaaaaaaaaaaaaaaaaaaaaaaaaaaaaaaaaaaaaaaaaaaaaaaaaaaaaaaaaaaaaaaaaaaaaaaaaa

SEQ ID NO: 28748 - RNA, 1764 nt, Artificial Sequence; identical to SEQ ID NO: 28742
  mRNA product Design a-2 (hSL-A100) comprising derived and/or modified sequence from LASV(Pinneo-NIG-1969;Clade I)__AIT17836__GPCmut5 (opt1)

SEQ ID NO: 28749 - RNA, 1764 nt, Artificial Sequence
  mRNA product Design a-2 (hSL-A100) comprising derived and/or modified sequence from LASV(ISTH0009-NIG-2011;Clade II)__AIT17404__GPCmut5 (opt1)
aggagaguccgcucagccagguugcagaagcggcuuagcguguguccuaaucuucucucugcguguagguaggccugugccgcaaacaagcuuaccaugggccagaucaucaccuucuuccaggaggugccccacgucaucgaggaggugaugaacaucgugcugaucgcccucagccugcuggccauccucaaggggaucuacaacgucgcgaccugcggccuguucgggcugguguccuuccuccugcugugcggccgcagcugcuccacgaccuacaaggggguguacgagcuccagacccuggagcuggacauggccagccucaacaugaccaugccgcuguccugcacgaagaacaacagccaccacuacaucauggucggcaacgagaccggccuggagcucacccugaccaacacguccaucaucaaccacaaguucugcaaccugagcgacgcccacaagaagaaccucuacgaccacgcccugauguccaucaucagcaccuuccaccuguccauccccaacuucaaccaguacgaggccaugagcugcgacuucaacgggggcaagaucuccgugcaguacaaccucagccacgcguacgccguggacgccgccaaccacugcgggaccaucgcgaacggcguccugcagaccuucaugcggauggccuggggcggguccuacaucgcccuggacagcggcugcggguccugggacugcaucaugacgagcuaccaguaccucaucauccagaacaccaccugggaggaccacugccaguucucccgccccagccccaucggcuaccuggggcugcucagccagcggacccgcgacaucuacaucucccggcgccugcugggcacguucaccuggacccucagcgacuccgagggcaacgagacccccgggggcuacugccugacgcgguggaugcugaucgaggccgagcucaagugcuucgggaacaccgccguggcgaagugcaacgagaagcacgacgaggaguucugcgacaugcugcgccuguucgacuucaacaagcaggccauccggcgccucaagaccccggcccagaugagcauccagcugaucaacaaggccgugaacgcccugaucaacgaccagcucaucaugaagaaccaccuccgggacaucaugugcauccccuacugcaacuacuccaaguacugguaccugaaccacaccgucacgggcaagaccagccugccccgcugcuggcugguguccaacgggagcuaccugaacgagacccacuucuccgacgacaucgagcagcaggcggacaacaugaucaccgagcuccugcagaaggaguacauggaccggcagggcaagacgccgcugggccugguggaccucuucgucuucagcaccuccuucuaccugaucagcaucuuccugcaccucaucaagauccccacccaccgccacaucaccgggaagcccugccccaagccgcaccggcugaaccacaugggcaucugcuccugcgggcuguacaagcaccccggcgugcccgugaaguggaagcgcugaggacuagucccuguucccagagcccacuuuuuuuucuuuuuuugaaauaaaauagccugucuuucagaucucaaaggcucuuuucagagccaccaaaaaaaaaaaaaaaaaaaaaaaaaaaaaaaaaaaaaaaaaaaaaaaaaaaaaaaaaaaaaaaaaaaaaaaaaaaaaaaaaaaaaaaaaaaaaaaaaaaaa

SEQ ID NO: 28750 - RNA, 1764 nt, Artificial Sequence
  mRNA product Design a-2 (hSL-A100) comprising derived and/or modified sequence from LASV(ISTH2010-NIG-2012;Clade II)__AIT17482__GPCmut5 (opt1)
aggagaguccgcucagccagguugcagaagcggcuuagcguguguccuaaucuucucucugcguguagguaggccugugccgcaaacaagcuuaccaugggccagaucaucaccuucuuccaggaggugccccacgucaucgaggaggugaugaacaucgugcugaucgcccucagccugcuggccauccucaaggggaucuacaacgucgcgaccugcggccuguucgggcugguguccuuccuccugcugugcggccgcagcugcuccacgaccuacaaggggguguacgagcuccagacccuggagcuggacauggccagccucaacaugaccaugccgcuguccugcacgaagaacaacagccaccacuacaucauggucggcaacgagaccggccuggagcucacccugaccaacacguccaucaucaaccacaaguucugcaaccugagcgacgcccacaagaagaaccucuacgaccacgcccugauguccaucaucagcaccuuccaccuguccauccccaacuucaaccaguacgaggccaugagcugcgacuucaacgggggcaagaucuccgugcaguacaaccucagccacgcguacgccguggacgccgccaaccacugcgggaccaucgcgaacggcguccugcagaccuucaugcggauggccuggggcggguccuacaucgcccuggacagcggcugcggguccugggacugcaucaugacgagcuaccaguaccucaucauccagaacaucaccugggaggaccacugccaguucucccgccccagccccaucggcuaccuggggcugcucagccagcggacccgcgacaucuacaucucccggcgccugcugggcaccuucacguggacccucagcgacuccgagggcaacgagacccccgggggcuacugccugacccgguggaugcugaucgaggccgagcucaagugcuucgggaacacggccguggcgaagugcaacgagaagcacgacgaggaguucugcgacaugcugcgccuguucgacuucaacaagcaggccauccggcgccucaagaccccggcccagaugagcauccagcugaucaacaaggccgugaacgcccugaucaacgaccagcucaucaugaagaaccaccuccgggacaucaugugcauccccuacugcaacuacuccaaguacugguaccugaaccacaccgucaccggcaagacgagccugccccgcugcuggcugguguccaacgggagcuaccugaacgagacccacuucuccgacgacaucgagcagcaggcggacaacaugaucaccgagcuccugcagaaggaguacaucgaccggcagggcaagaccccgcugggccugguggaccucuucgucuucagcacguccuucuaccugaucagcaucuuccugcaccucgugaagauccccacccaccgccacguggucgggaagcccugccccaagccgcaccggcugaaccacaugggcaucugcuccugcgggcuguacaagcaccccggcgugcccgugaaguggaagcgcugaggacuagucccuguucccagagcccacuuuuuuuucuuuuuuugaaauaaaauagccugucuuucagaucucaaaggcucuuuucagagccaccaaaaaaaaaaaaaaaaaaaaaaaaaaaaaaaaaaaaaaaaaaaaaaaaaaaaaaaaaaaaaaaaaaaaaaaaaaaaaaaaaaaaaaaaaaaaaaaaaaaaa

SEQ ID NO: 28751 - RNA, 1764 nt, Artificial Sequence
  mRNA product Design a-2 (hSL-A100) comprising derived and/or modified sequence from LASV(Lassa virus/H.sapiens-wt/NGA/2015/ISTH_0543;Clade II)__AVO03639__GPCmut5 (opt1)
aggagaguccgcucagccagguugcagaagcggcuuagcguguguccuaaucuucucucugcguguagguaggccugugccgcaaacaagcuuaccaugggccagaucaucaccuucuuccaggaggugccccacgucaucgaggaggugaugaacaucgugcugaucgcccucagccugcuggccauccucaaggggaucuacaacgucgcgaccugcggccuguucgggcugguguccuuccuccugcugugcggccgcagcugcuccacgaccuacaaggggguguacgagcuccagacccuggagcuggacauggccaaccucaacaugaccaugccgcugagcugcacgaagaacaacucccaccacuacaucauggucggcaacgagaccggccuggagcucacccugaccaacacgagcaucaucaaccacaaguucugcaaccuguccgacgcccacaagaagaaccucuacgaccacgcccugaugagcaucaucuccaccuuccaccugagcauccccaacuucaaccaguacgaggccauguccugcgacuucaacgggggcaagaucagcgugcaguacaaccucucccacaccuacgcgguggacgccgccaaccacugcgggaccaucgccaacggcguccugcagacguucaugcggauggcguggggcgggagcuacaucgcccuggacuccggcugcgggagcugggacugcaucaugaccuccuaccaguaccucgugauccagaacaccaccugggaggaccacugccaguucagccgccccucccccaucggcuaccuggggcugcucagccagcggacgcgcgacaucuacaucagccggcgccugcugggcaccuucaccuggacccucuccgacagcgagggcaacgagacgcccgggggcuacugccugacccgguggaugcugaucgaggccgagcucaagugcuucgggaacaccgccguggccaagugcaacgagaagcacgacgaggaguucugcgacaugcugcgccuguucgacuucaacaagcaggcgauccggcgccucaagaccccggcccagauguccauccagcugaucaacaaggccgucaacgcccugaucaacgaccagcucaucaugaagaaccaccuccgggacaucaugugcauccccuacugcaacuacagcaaguacugguaccugaaccacacggugaccggcaagaccucccugccccgcugcuggcuggugagcaacggguccuaccugaacgagacccacuucagcgacgacaucgagcagcaggccgacaacaugaucacggagcuccugcagaaggaguacaucgaccggcagggcaagaccccgcugggccuggucgaccucuucguguucuccaccagcuucuaccugaucuccaucuuccugcaccucgugaagauccccacccaccgccacaucacggggaagcccugccccaagccgcaccggcugaaccacaugggcaucugcagcugcgggcuguacaagcaccccggcguccccgugaaguggaagcgcugaggacuagucccuguucccagagcccacuuuuuuuucuuuuuuugaaauaaaauagccugucuuucagaucucaaaggcucuuuucagagccaccaaaaaaaaaaaaaaaaaaaaaaaaaaaaaaaaaaaaaaaaaaaaaaaaaaaaaaaaaaaaaaaaaaaaaaaaaaaaaaaaaaaaaaaaaaaaaaaaaaaaa

SEQ ID NO: 28752 - RNA, 1764 nt, Artificial Sequence
  mRNA product Design a-2 (hSL-A100) comprising derived and/or modified sequence from LASV(Lassa virus/H.sapiens-wt/NGA/2016/ISTH_0009;Clade II)__AVO03571__GPCmut5 (opt1)
aggagaguccgcucagccagguugcagaagcggcuuagcguguguccuaaucuucucucugcguguagguaggccugugccgcaaacaagcuuaccaugggccagaucaucaccuucuuccaggaggugccccacgucaucgaggaggugaugaacaucgugcugaucgcccucagccugcuggccauccucaaggggaucuacaacgucgcgaccugcggccugcuggggcucguguccuuccugcugcucugcggccgcagcugcuccacgaccuacaaggggguguacgagcugcagacccuggagcucgacauggccagccugaacaugaccaugccgcuguccugcacgaagaacaacagccaccacuacaucauggucggcaacgagaccggccucgagcugacccugaccaacacguccaucaucaaccacaaguucugcaaccucagcgacgcccacaagaagaaccuguacgaccacgcccugauguccaucaucagcaccuuccaccucuccauccccaacuucaaccaguacgaggccaugagcugcgacuucaacgggggccggaucuccgugcaguacaaccugagccacuccuacgcgguggacgccgccaaccacugcgggaccaucgccaacggcguccugcagaccuucaugcgcauggcguggggcgggagcuacaucgcccucgacuccggcugcgggagcugggacugcaucaugacguccuaccaguaccugaucauccagaacaccaccugggaggaccacugccaguucagccggcccagccccaucggcuaccuggggcuccugucccagcgcacccgggacaucuacaucagccgccggcugcucggcacguucaccuggacccuguccgacagcgagggcaacgagacccccgggggcuacugccugacgcgcuggaugcucaucgaggccgagcugaagugcuucgggaacaccgccguggccaagugcaacgagaagcacgacgaggaguucugcgacaugcugcggcuguucgacuucaacaagcaggcgauccgccggcugaagaccccggcccagauguccauccagcugaucaacaaggccgugaacgcccucaucaacgaccagcugaucaugaagaaccaccuccgcgacaucaugugcauccccuacugcaacuacagcaaguacugguaccucaaccacaccgucacgggcaagaccucccugccccggugcuggcuggugagcaacggguccuaccucaacgagacccacuucagcgacgacaucgagcagcaggccgacaacaugaucaccgagcugcugcagaaggaguacaucgaccgccagggcaagacgccgcugggccucguggaccuguucgucuucuccaccagcuucuaccugaucuccaucuuccuccaccuggugaagauccccacccaccggcacaucaccgggaagcccugccccaagccgcaccgccugaaccacaugggcaucugcagcugcgggcucuacaaccaccccggcgugcccgucaaguggaagcggugaggacuagucccuguucccagagcccacuuuuuuuucuuuuuuugaaauaaaauagccugucuuucagaucucaaaggcucuuuucagagccaccaaaaaaaaaaaaaaaaaaaaaaaaaaaaaaaaaaaaaaaaaaaaaaaaaaaaaaaaaaaaaaaaaaaaaaaaaaaaaaaaaaaaaaaaaaaaaaaaaaaaa

SEQ ID NO: 28753 - RNA, 1764 nt, Artificial Sequence
  mRNA product Design a-2 (hSL-A100) comprising derived and/or modified sequence from LASV(Lassa virus/H.sapiens-wt/NGA/2016/ISTH_0017;Clade II)__AVO03567__GPCmut5 (opt1)
aggagaguccgcucagccagguugcagaagcggcuuagcguguguccuaaucuucucucugcguguagguaggccugugccgcaaacaagcuuaccaugggccagaucaucaccuucuuccaggaggugccccacgucaucgaggaggugaugaacaucgugcugaucgcccucagccugcuggccauccucaaggggaucuacaacgucgcgaccugcggccuguucgggcugguguccuuccuccugcugugcggccgcagcugcuccacgaccuacaaggggguguacgagcuccagacccuggagcuggacauggccagccucaacaugaccaugccgcuguccugcacgaagaacaacagccaccacuacaucauggucggcaacgagaccggccuggagcucacccugaccaacacguccaucaucaaccacaaguucugcaaccugagcgacgcccacaagaagaaccucuacgaccacgcccugauguccaucaucagcaccuuccaccuguccauccccaacuucaaccaguacgaggccaugagcugcgacuucaacgggggcaagaucuccgugcaguacaaccucagccacaccuacgcgaucgacgccgccaaccacugcgggaccaucgccaacggcgugcugcagacguucaugcggauggcguggggcggguccuacaucgcccuggacagcggcugcggguccugggacugcaucaugaccagcuaccaguaccucaucauccagaacaccaccugggaggaccacugccaguucucccgccccagccccaucggcuaccuggggcugcucagccagcggacgcgcgacaucuacaucucccggcgccugcugggcaccuucaccuggacccucagcgacuccgagggcaacgagacgcccgggggcuacugccugacccgguggaugcugaucgaggccgagcucaagugcuucgggaacaccgccgucgccaagugcaacgagaagcacgacgaggaguucugcgacaugcugcgccuguucgacuucaacaagcaggcgauccggcgccucaagaccccggcccagaugagcauccagcugaucaacaaggccgugaacgcccugaucaacgaccagcucaucaugaagaaccaccuccgggacaucaugugcauccccuacugcaacuacuccaaguacugguaccugaaccacacggugaccggcaagaccagccugccccgcugcuggcuggucuccaacgggagcuaccugaacgagacccacuucuccgacgacaucgagcagcaggccgacaacaugaucacggagcuccugcagaaggaguacauggaccggcagggcaagaccccgcugggccugguggaccucuucguguucagcaccuccuucuaccugaucagcaucuuccugcaccucguccgcauccccacccaccggcacgugaucgggaagcccugccccaagccgcaccgccugaaccacaugggcaucugcuccugcgggcuguacaagcaccccggcgugcccgucaaguggaagcggugaggacuagucccuguucccagagcccacuuuuuuuucuuuuuuugaaauaaaauagccugucuuucagaucucaaaggcucuuuucagagccaccaaaaaaaaaaaaaaaaaaaaaaaaaaaaaaaaaaaaaaaaaaaaaaaaaaaaaaaaaaaaaaaaaaaaaaaaaaaaaaaaaaaaaaaaaaaaaaaaaaaaa

SEQ ID NO: 28754 - RNA, 1764 nt, Artificial Sequence
  mRNA product Design a-2 (hSL-A100) comprising derived and/or modified sequence from LASV(Lassa virus/H.sapiens-wt/NGA/2018/ISTH_0959;Clade II)__AVV65099__GPCmut5 (opt1)
aggagaguccgcucagccagguugcagaagcggcuuagcguguguccuaaucuucucucugcguguagguaggccugugccgcaaacaagcuuaccaugggccagaucaucaccuucuuccaggaggugccccacgucaucgaggaggugaugaacaucgugcugaucgcccucagccugcuggccauccucaaggggaucuacaacgucgugaccugcggccuguucgggcugguguccuuccuccugcugugcggccgcagcugcuccacgaccuacaagggggucuacgagcuccagacccuggagcuggacauggcgagccucaacaugaccaugccgcuguccugcacgaagaacaacagccaccacuacaucauggugggcaacgagaccggccuggagcucacccugaccaacacguccaucaucaaccacaaguucugcaaccugagcgacgcccacaagaagaaccucuacgaccacgcccugauguccaucaucagcaccuuccaccuguccauccccaacuucaaccaguacgaggccaugagcugcgacuucaacgggggcaagaucuccgugcaguacaaccucagccacgccuacgcgaucgacgccgccaaccacugcgggaccaucgccaacggcguccugcagaccuucaugcggauggcguggggcggguccuacaucgcccuggacagcggcugcggguccugggacugcaucaugacgagcuaccaguaccucaucauccagaacaccaccugggaggaccacugccaguucucccgccccagccccaucggcuaccuggggcugcucagccagcggacccgcgacaucuacaucucccggcgccugcugggcacguucaccuggacccucagcgacuccgagggcaacgagacccccgggggcuacugccugacgcgguggaugcugaucgaggccgagcucaagugcuucgggaacaccgccguggccaagugcaacgagaagcacgacgaggaguucugcgacaugcugcgccuguucgacuucaacaagcaggcgauccggcgccucaagaccccggcccagaugagcauccagcugaucaacaaggccgugaacgcccugaucaacgaccagcucaucaugaagaaccaccuccgggacaucaugugcauccccuacugcaacuacuccaaguacugguaccugaaccacaccgucacgggcaagaccagccugccccgcugcuggcugguguccaacgggagcuaccugaacgagacccacuucuccgacgacaucgagcagcaggccgacaacaugaucaccgagcuccugcagaaggaguacaucgaccggcagggcaagacgccgcugggccugguggaccucuucgucuucagcaccuccuucuaccugaucagcaucuuccugcaccucgugaagauccccacccaccgccacgugaucgggaagcccugccccaagccgcaccggcugaaccacaugggcaucugcuccugcgggcuguacaagcaccccggcguccccgugaaguggaagcgcugaggacuagucccuguucccagagcccacuuuuuuuucuuuuuuugaaauaaaauagccugucuuucagaucucaaaggcucuuuucagagccaccaaaaaaaaaaaaaaaaaaaaaaaaaaaaaaaaaaaaaaaaaaaaaaaaaaaaaaaaaaaaaaaaaaaaaaaaaaaaaaaaaaaaaaaaaaaaaaaaaaaaa

SEQ ID NO: 28755 - RNA, 1764 nt, Artificial Sequence
  mRNA product Design a-2 (hSL-A100) comprising derived and/or modified sequence from LASV(LASV003-NIG-2008;Clade II)__AIT17580__GPCmut5 (opt1)
aggagaguccgcucagccagguugcagaagcggcuuagcguguguccuaaucuucucucugcguguagguaggccugugccgcaaacaagcuuaccaugggccagaucaucaccuucuuccaggaggugccccacgucaucgaggaggugaugaacaucgugcugaucgcccucagccugcuggccauccucaaggggaucuacaacgucgcgaccugcggccuguucgggcugguguccuuccuccugcugugcggccgcagcugcuccacgaccuacaaggggguguacgagcuccagacccuggagcuggacauggccagccucaacaugaccaugccgcuguccugcacgaagaacaacagccaccacuacaucauggucggcaacgagaccggccuggagcucacccugaccaacacguccaucaucaaccacaaguucugcaaccugagcgacgcccacaagaagaaccucuacgaccacgcccugauguccaucaucagcaccuuccaccuguccauccccaacuucaaccaguacgaggccaugagcugcgacuucaacgggggcaagaucuccgugcaguacaaccucagccacaccuacgcgguggacgccgccaaccacugcgggaccaucgccaacggcguccugcagacguucaugcggauggcguggggcggguccuacaucgcccuggacagcggcugcggguccugggacugcaucaugaccagcuaccaguaccucaucauccagaacaccaccugggaggaccacugccaguucucccgccccagccccaucggcuaccuggggcugcucagccagcggacgcgcgacaucuacaucucccggcgccugcugggcaccuucaccuggacccucagcgacuccgagagcaacgagacgccgggcggguacugccugacccgguggaugcugaucgaggccgagcucaagugcuucggcaacaccgccguggccaagugcaacgagaagcacgacgaggaguucugcgacaugcugcgccuguucgacuucaacaagcaggcgauccggcgccucaaggcccccgcccagauguccauccagcugaucaacaaggccgugaacgcccugaucaacgaccagcucaucaugaagaaccaccuccgggacaucaugugcauccccuacugcaacuacagcaaguacugguaccugaaccacaccgucacggggcgcaccucccugccccggugcuggcuggugagcaacggcuccuaccugaacgagacccacuucagcgacgacaucgagcagcaggcggacaacaugaucaccgagcuccugcagaaggaguacauggaccgccaggggaagacgccgcugggccugguggaccucuucgucuucuccaccagcuucuaccugaucuccaucuuccugcaccucgugaagauccccacccaccggcacgugaucggcaagcccugccccaagccgcaccgccugaaccacauggggaucugcagcugcggccuguacaagcaccccgggguccccgugaaguggaagcggugaggacuagucccuguucccagagcccacuuuuuuuucuuuuuuugaaauaaaauagccugucuuucagaucucaaaggcucuuuucagagccaccaaaaaaaaaaaaaaaaaaaaaaaaaaaaaaaaaaaaaaaaaaaaaaaaaaaaaaaaaaaaaaaaaaaaaaaaaaaaaaaaaaaaaaaaaaaaaaaaaaaaa

SEQ ID NO: 28756 - RNA, 1764 nt, Artificial Sequence
  mRNA product Design a-2 (hSL-A100) comprising derived and/or modified sequence from LASV(LASV035-NIG-2009;Clade II)__AIT17588__GPCmut5 (opt1)
aggagaguccgcucagccagguugcagaagcggcuuagcguguguccuaaucuucucucugcguguagguaggccugugccgcaaacaagcuuaccaugggccagaucaucaccuucuuccaggaggugccccacgucaucgaggaggugaugaacaucgugcugaucgcccucagccugcuggccauccucaaggggaucuacaacgucgcgaccugcggccuguucgggcugguguccuuccuccugcugugcggccgcagcugcuccacgaccuacaaggggguguacgagcuccagacccuggagcuggacauggccagccucaacaugaccaugccgcuguccugcacgaagaacaacagccaccacuacaucauggucggcaacgagaccggccuggagcucacccugaccaacacguccaucaucaaccacaaguucugcaaccugagcgacgcccacaagaagaaccucuacgaccacgcccugauguccaucaucagcaccuuccaccuguccauccccaacuucaaccaguacgaggccaugagcugcgacuucaacgggggcaagaucuccgugcaguacaaccucagccacgcguacgccguggacgccgccaaccacugcgggaccaucgcgaacggcguccugcagaccuucaugcggauggccuggggcggguccuacaucgcccuggacagcggcugcggguccugggacugcaucaugacgagcuaccaguaccucaucauccagaacaccaccugggaggaccacugccaguucucccgccccagccccaucggcuaccuggggcugcucagccagcggacccgcgacaucuacaucucccggcgccugcugggcacguucaccuggacccucagcgacuccgagggcaacgagacccccgggggcuacugccugacgcgguggaugcugaucgaggccgagcucaagugcuucgggaacaccgccguggcgaagugcaacgagaagcacgacgaggaguucugcgacaugcugcgccuguucgacuucaacaagcaggccauccggcgccucaaggccccggcccagaugagcauccagcugaucaacaaggccgugaacgcgcugaucaacgaccagcucaucaugaagaaccaccuccgggacaucaugugcauccccuacugcaacuacuccaaguacugguaccugaaccacaccgucaccggcaagacgagccugccccgcugcuggcugguguccaacgggagcuaccugaacgagacccacuucuccgacgacaucgagcagcaggccgacaacaugaucaccgagcuccugcagaaggaguacaucgaccggcagggcaagaccccgcugggccugguggaccucuucgucuucagcacguccuucuaccugaucagcaucuuccugcaccucgugaagauccccacccaccgccacgugaucgggaagcccugccccaagccgcaccggcugaaccacaugggcaucugcuccugcgggcuguacaagcaccccggcguccccgugaaguggaagcgcugaggacuagucccuguucccagagcccacuuuuuuuucuuuuuuugaaauaaaauagccugucuuucagaucucaaaggcucuuuucagagccaccaaaaaaaaaaaaaaaaaaaaaaaaaaaaaaaaaaaaaaaaaaaaaaaaaaaaaaaaaaaaaaaaaaaaaaaaaaaaaaaaaaaaaaaaaaaaaaaaaaaaa

SEQ ID NO: 28757 - RNA, 1764 nt, Artificial Sequence
  mRNA product Design a-2 (hSL-A100) comprising derived and/or modified sequence from LASV(LASV1000-NIG-2009;Clade II)__AIT17782__GPCmut5 (opt1)
aggagaguccgcucagccagguugcagaagcggcuuagcguguguccuaaucuucucucugcguguagguaggccugugccgcaaacaagcuuaccaugggccagaucaucaccuucuuccaggaggugccccacgucaucgaggaggugaugaacaucgugcugaucgcccucagccugcuggccauccucaaggggaucuacaacgucgcgaccugcggccuguucgggcugguguccuuccuccugcugugcggccgcagcugcuccacgaccuacaaggggguguacgagcuccagacccuggagcuggacauggccagccucaacaugaccaugccgcuguccugcacgaagaacaacagccaccacuacaucauggucggcaacgagaccggccuggagcucacccugaccaacacguccaucaucaaccacaaguucugcaaccugagcgacgcccacaagaagaaccucuacgaccacgcccugauguccaucaucagcaccuuccaccuguccauccccaacuucaaccaguacgaggccaugagcugcgacuucaacgggggcaagaucuccgugcaguacaaccucagccacaccuacgcgguggacgccgccaaccacugcgggaccaucgccaacggcguccugcagacguucaugcggauggcguggggcggguccuacaucgcccuggacagcggcugcggguccugggacugcaucaugaccagcuaccaguaccucaucauccagaacaccaccugggaggaccacugccaguucucccgccccagccccaucggcuaccuggggcugcucagccagcggacgcgcgacaucuacaucucccggcgccugcugggcaccuucaccuggacccucagcgacuccgagggcaacgagacgcccgggggcuacugccugacccgguggaugcugaucgaggccgagcucaagugcuucgggaacaccgccguggccaagugcaacgagaagcacgacgaggaguucugcgacaugcugcgccuguucgacuucaacaagcaggcgaucaagcggcucaagaccccggcccagaugagcauccagcugaucaacaaggccgugaacgcccugaucaacgaccagcucaucaugaagaaccaccuccgcgacaucaugugcauccccuacugcaacuacuccaaguacugguaccugaaccacacggucaccggcaagaccagccugccccggugcuggcugguguccaacgggagcuaccugaacgagacccacuucuccgacgacaucgagcagcaggccgacaacaugaucacggagcuccugcagaaggaguacaucgaccgccagggcaagaccccgcugggccugguggaccucuucgucuucagcaccuccuucuaccugaucagcaucuuccugcaccucgugaagauccccacccaccggcacguggucgggaagcccugccccaagccgcaccgccugaaccacaugggcaucugcuccugcgggcuguacaagcaccccggcgugcccgugaaguggaagcggugaggacuagucccuguucccagagcccacuuuuuuuucuuuuuuugaaauaaaauagccugucuuucagaucucaaaggcucuuuucagagccaccaaaaaaaaaaaaaaaaaaaaaaaaaaaaaaaaaaaaaaaaaaaaaaaaaaaaaaaaaaaaaaaaaaaaaaaaaaaaaaaaaaaaaaaaaaaaaaaaaaaaa

SEQ ID NO: 28758 - RNA, 1764 nt, Artificial Sequence
  mRNA product Design a-2 (hSL-A100) comprising derived and/or modified sequence from LASV(LASV221-NIG-2010;Clade II)__AIT17624__GPCmut5 (opt1)
aggagaguccgcucagccagguugcagaagcggcuuagcguguguccuaaucuucucucugcguguagguaggccugugccgcaaacaagcuuaccaugggccagaucaucaccuucuuccaggaggugccccacgucaucgaggaggugaugaacaucgugcugaucgcccucagccugcuggccauccucaaggggaucuacaacgucgcgaccugcggccuguucgggcugguguccuuccuccugcugugcggccgcagcugcuccacgaccuacaaggggguguacgagcuccagacccuggagcuggacauggccagccucaacaugaccaugccgcuguccugcacgaagaacaacagccaccacuacaucauggucggcaacgagaccggccuggagcucacccugaccaacacguccaucaucaaccacaaguucugcaaccugagcgacgcccacaagaagaaccucuacgaccacgcccugauguccaucaucagcaccuuccaccuguccauccccaacuucaaccaguacgaggccaugagcugcgacuucaacgggggcaagaucuccgugcaguacaaccucagccacaccuacgcgaucgacgccgccaaccacugcgggaccaucgccaacggcgugcugcagacguucaugcggauggcguggggcggguccuacaucgcccuggacagcggcugcggguccugggacugcaucaugaccagcuaccaguaccucaucauccagaacaccaccugggaggaccacugccaguucucccgccccagccccaucggcuaccuggggcugcucagccagcggacgcgcgacaucuacaucucccggcgccugcugggcaccuucaccuggacccucagcgacuccgagggcaacgagacgcccgggggcuacugccugacccgguggaugcugaucgaggccgagcucaagugcuucgggaacaccgccgucgccaagugcaacgagaagcacgacgaggaguucugcgacaugcugcgccuguucgacuucaacaagcaggcgauccggcgccucaagaccccggcccagaugagcauccagcugaucaacaaggccgugaacgcccugaucaacgaccagcucaucaugaagaaccaccuccgggacaucaugugcauccccuacugcaacuacuccaaguacugguaccugaaccacacggugaccggcaagaccagccugccccgcugcuggcuggucuccaacgggagcuaccugaacgagacccacuucuccgacgacaucgagcagcaggccgacaacaugaucacggagaugcuccagaaggaguacauggaccggcagggcaagaccccgcugggccugguggaccuguucguguucagcaccuccuucuaccucaucagcaucuuccugcaccuggucaagauccccacccaccgccacgugaucgggaagcccugccccaagccgcaccggcucaaccacaugggcaucugcuccugcgggcuguacaagcaccccggcgugcccgucaaguggaagcgcugaggacuagucccuguucccagagcccacuuuuuuuucuuuuuuugaaauaaaauagccugucuuucagaucucaaaggcucuuuucagagccaccaaaaaaaaaaaaaaaaaaaaaaaaaaaaaaaaaaaaaaaaaaaaaaaaaaaaaaaaaaaaaaaaaaaaaaaaaaaaaaaaaaaaaaaaaaaaaaaaaaaaa

SEQ ID NO: 28759 - RNA, 1764 nt, Artificial Sequence
  mRNA product Design a-2 (hSL-A100) comprising derived and/or modified sequence from LASV(LASV237-NIG-2010;Clade II)__AIT17638__GPCmut5 (opt1)
aggagaguccgcucagccagguugcagaagcggcuuagcguguguccuaaucuucucucugcguguagguaggccugugccgcaaacaagcuuaccaugggccagaucaucaccuucuuccaggaggugccccacgucaucgaggaggugaugaacaucgugcugaucgcccucagccugcuggccauccucaaggggaucuacaacgucgcgaccugcggccuguucgggcugguguccuuccuccugcugugcggccgcagcugcuccacgaccuacaaggggguguacgagcuccagacccuggagcuggacauggccagccucaacaugaccaugccgcuguccugcacgaagaacaacagccaccacuacaucauggucggcaacgagaccggccuggagcucacccugaccaacacguccaucaucaaccacaaguucugcaaccugagcgacgcccacaagaaggaccucuacgaccacgcccugauguccaucaucagcaccuuccaccuguccauccccaacuucaaccaguacgaggccaugagcugcgacuucaacgggggcaagaucuccgugcaguacaaccucagccacaccuacgcgguggacgccgccaaccacugcgggaccaucgccaacggcguccugcagacguucaugcggauggcguggggcggguccuacaucgcccuggacagcggcugcggguccugggacugcaucaugaccagcuaccaguaccucaucauccagaacaccaccugggaggaccacugccaguucucccgccccagccccaucggcuaccuggggcugcucagccagcggacgcgcgacaucuacaucucccggcgccugcugggcaccuucaccuggacccucagcgacuccgagggcaacgagacgcccgggggcuacugccugacccgguggaugcugaucgaggccgagcucaagugcuucgggaacaccgccguggccaagugcaacgagaagcacgacgaggaguucugcgacaugcugcgccuguucgacuucaacaagcaggcgauccggcgccucaagaccccggcccagaugagcauccagcugaucaacaaggccgugaacgcccugaucaacgaccagcucaucaugaagaaccaccuccgggacaucaugugcauccccuacugcaacuacuccaaguacugguaccugaaccacacggucaccggcaagaccagccugccccgcugcuggcugguguccaacgggagcuaccugaacgagacccacuucuccgacgacaucgagcagcaggccgacaacaugaucacggagcuccugcagaaggaguacauggaccggcagggcaagaccccgcugggccugguggaccucuucgucuucagcaccuccuucuaccugaucagcaucuuccugcaccucaucaagauccccacccaccgccacaucacggggaagcccugccccaagccgcaccggcugaaccacaugggcaucugcuccugcgggcuguacaagcaccccggcgugcccgugaaguggaagcgcugaggacuagucccuguucccagagcccacuuuuuuuucuuuuuuugaaauaaaauagccugucuuucagaucucaaaggcucuuuucagagccaccaaaaaaaaaaaaaaaaaaaaaaaaaaaaaaaaaaaaaaaaaaaaaaaaaaaaaaaaaaaaaaaaaaaaaaaaaaaaaaaaaaaaaaaaaaaaaaaaaaaaa

SEQ ID NO: 28760 - RNA, 1764 nt, Artificial Sequence
  mRNA product Design a-2 (hSL-A100) comprising derived and/or modified sequence from LASV(LASV253-NIG-2011;Clade II)__AIT17670__GPCmut5 (opt1)
aggagaguccgcucagccagguugcagaagcggcuuagcguguguccuaaucuucucucugcguguagguaggccugugccgcaaacaagcuuaccaugggccagaucaucaccuucuuccaggaggugccccacgucaucgaggaggugaugaacaucgugcugaucgcccucagccugcuggccauccucaaggggaucuacaacgucgcgaccugcggccuguucgggcugguguccuuccuccugcugugcggccgcagcugcuccacgaccuacaaggggguguacgagcuccagacccuggagcuggacauggccagccucaacaugaccaugccgcuguccugcacgaagaacaacagccaccacuacaucauggucggcaacgagaccggccuggagcucacccugaccaacacguccaucaucaaccacaaguucugcaaccugagcgacgcccacaagaagaaccucuacgaccacgcccugauguccaucaucagcaccuuccaccuguccauccccaacuucaaccaguacgaggccaugagcugcgacuucaacgggggcaagaucuccgugcaguacaaccucagccacaccuacgcgguggacgccgccaaccacugcgggaccaucgccaacggcguccugcagacguucaugcggauggcguggggcggguccuacaucgcccuggacagcggcugcggguccugggacugcaucaugaccagcuaccaguaccucaucauccagaacaccaccugggaggaccacugccaguucucccgccccagccccaucggcuaccuggggcugcucagccagcggacgcgcgacaucuacaucucccggcgccugcugggcaccuucaccuggacccucagcgacuccgagggcaacgagacgcccgggggcuacugccugacccgguggaugcugaucgaggccgagcucaagugcuucgggaacaccgccguggccaagugcaacgagaagcacgacgaggaguucugcgacaugcugcgccuguucgacuucaacaagcaggcgauccggcgccucaaggccccggcccagaugagcauccagcugaucaacaaggccgugaacgcccugaucaacgaccagcucaucaugaagaaccaccuccgggacaucaugugcauccccuacugcaacuacuccaaguacugguaccugaaccacaccgucacgggccgcaccagccugccccggugcuggcugguguccaacgggagcuaccugaacgagacccacuucuccgacgacaucgagcagcaggcggacaacaugaucaccgagcuccugcagaaggaguacaucgaccgccagggcaagacgccgcugggccugguggaccucuucgucuucagcaccuccuucuaccugaucagcaucuuccugcaccucgugaagauccccacccaccggcacaucaucgggaagcccugccccaagccgcaccgccugaaccacaugggcaucugcuccugcgggcuguacaagcaccccggcgugcccgucaaguggaagcggugaggacuagucccuguucccagagcccacuuuuuuuucuuuuuuugaaauaaaauagccugucuuucagaucucaaaggcucuuuucagagccaccaaaaaaaaaaaaaaaaaaaaaaaaaaaaaaaaaaaaaaaaaaaaaaaaaaaaaaaaaaaaaaaaaaaaaaaaaaaaaaaaaaaaaaaaaaaaaaaaaaaaa

SEQ ID NO: 28761 - RNA, 1764 nt, Artificial Sequence
  mRNA product Design a-2 (hSL-A100) comprising derived and/or modified sequence from LASV(LASV254-NIG-2011;Clade II)__AIT17674__GPCmut5 (opt1)
aggagaguccgcucagccagguugcagaagcggcuuagcguguguccuaaucuucucucugcguguagguaggccugugccgcaaacaagcuuaccaugggccagaucaucaccuucuuccaggaggugccccacgucaucgaggaggugaugaacaucgugcugaucgcccucagccugcuggccauccucaaggggaucuacaacgucgcgaccugcggccuguucgggcugguguccuuccuccugcugugcggccgcagcugcuccacgaccuacaaggggguguacgagcuccagacccuggagcuggacaugaccaaccucaacaugacgaugccgcugagcugcaccaagaacaacucccaccacuacaucauggucggcaacgagaccggccuggagcucacccugacgaacaccagcaucaucaaccacaaguucugcaaccuguccgacgcccacaagaagaaccucuacaaccacgcccugaugagcaucaucuccaccuuccaccugagcauccccaacuucaaccaguacgaggccauguccugcgacuucaacgggggcaagaucagcgugcaguacaaccucucccacagcuacgccguggacgcggccaaccacugcgggaccaucgccaacggcguccugcagacguucaugcggauggccuggggcggguccuacaucgcgcuggacagcggcugcgggaacugggacugcaucaugaccuccuaccaguaccucaucauccagaacaccaccugggaggaccacugccaguucagccgccccucccccaucggcuaccuggggcugcucagccagcggacgcgcgacaucuacaucagccggcgccugcugggcaccuucaccuggacccucuccgacagcgagggcaacgagacgcccgggggcuacugccugacccgguggaugcugaucgaggccgagcucaagugcuucgggaacaccgccguggccaagugcaacgagaagcacgacgaggaguucugcgacaugcugcgccuguucgacuucaacaagcaggccauccggcgccucaagaccccggcgcaggccaacauccagcugaucaacaaggccgugaacgcccugaucaacgaccagcucaucaugaagaaccaccuccgggacaucaugugcauccccuacugcaacuacuccaaguacugguaccugaaccacacggucaccggcaagaccagccugccccgcugcuggcugguguccaacgggagcuaccugaacgagacccacuucuccgacgacaucgagcagcaggccgacaacaugaucacggagcuccugcagaaggaguacauggaccggcagggcaagaccccgcugggccugguggaccucuucgucuucagcaccuccuucuaccugaucagcaucuuccugcaccucgugaagauccccacccaccgccacgugaucgggaagcccugccccaagccgcaccggcugaaccacaugggcaucugcuccugcgggcuguacaagcaccccggcguccccgugaaguggaagcgcugaggacuagucccuguucccagagcccacuuuuuuuucuuuuuuugaaauaaaauagccugucuuucagaucucaaaggcucuuuucagagccaccaaaaaaaaaaaaaaaaaaaaaaaaaaaaaaaaaaaaaaaaaaaaaaaaaaaaaaaaaaaaaaaaaaaaaaaaaaaaaaaaaaaaaaaaaaaaaaaaaaaaa

SEQ ID NO: 28762 - RNA, 1764 nt, Artificial Sequence
  mRNA product Design a-2 (hSL-A100) comprising derived and/or modified sequence from LASV(Nig08-A19;Clade III)__ADU56618__GPCmut5 (opt1)
aggagaguccgcucagccagguugcagaagcggcuuagcguguguccuaaucuucucucugcguguagguaggccugugccgcaaacaagcuuaccaugggccagaucgugaccuucuuccaggaggucccccacgugaucgaggaggugaugaacaucguccugaucgcccucagcauccuggccauccugaaggggcucuacaacaucgcgaccugcggccugaucgggcuggugacguuccuccugcuguccggccgcagcugcuccaugaccuacaaggggguguacgagcuccagacccuggagcugaacaugaacacccucaacaugacgaugccgcugagcugcaccaagaacaacucccaccacuacaucauggucggcaacgagaccggccuggagcucacccugacgaacaccagccugcuccaccacaaguucugcaaccuguccgacgcccacaagaagaaccuguacgaccacacccucaugagcaucaucuccaccuuccaccugagcauccccaacuucaaccaguacgaggccauguccugcgacuucaacgggggcaagaucacggugcaguacaaccugagccacuccuacgccaucgacgccgcgaaccacugcgggaccguggccaacggcguccuccagaccuucaugcggauggccuggggcgggagcuacaucgcccuggacuccggcugcgggaagugggacugcaucaugaccagcuaccaguaccugaucauccagaacacgaccugggaggaccacugccaguucucccgccccagccccaucggcuaccucgggcugcugucccagcggacccgcgacaucuacaucagccggcgccuccugggcaccuucacguggacccugagcgacuccgagggcaacgagacccccgggggcuacugccucacccgguggaugcugaucgaggcggagcugaagugcuucgggaacacggccguggccaagugcaacgagaagcacgacgaggaguucugcgacaugcuccgccuguucgacuucaacaagcaggccauccggcgccugaaggccccggcgcagaugagcauccagcucaucaacaaggccgugaacgcccugaucaacgaccagcugaucaugaagaaccaccuccgggacaucaugugcauccccuacugcaacuacuccaaguacugguaccugaaccacaccagcaccggccgcaccucccugccccggugcuggcucgucagcaacggguccuaccugaacgagacgcacuucagcgacgacaucgagcagcaggccgacaacaugaucaccgagaugcugcagaaggaguaccuggaccgccagggcaagaccccgcucggccugguggaccuguucguguucuccaccagcuucuaccucaucuccaucuuccugcaccuggucaagauccccacgcaccggcacaucguggggaagcccugccccaagccgcaccgccucaaccacaugggcaucugcagcugcgggcuguacaagcagcccggcgugcccguccgguggaagcgcugaggacuagucccuguucccagagcccacuuuuuuuucuuuuuuugaaauaaaauagccugucuuucagaucucaaaggcucuuuucagagccaccaaaaaaaaaaaaaaaaaaaaaaaaaaaaaaaaaaaaaaaaaaaaaaaaaaaaaaaaaaaaaaaaaaaaaaaaaaaaaaaaaaaaaaaaaaaaaaaaaaaaa

SEQ ID NO: 28763 - RNA, 1767 nt, Artificial Sequence
  mRNA product Design a-2 (hSL-A100) comprising derived and/or modified sequence from LASV(G1180-SLE-2010;Clade IV)__AIT17168__GPCmut5 (opt1)
aggagaguccgcucagccagguugcagaagcggcuuagcguguguccuaaucuucucucugcguguagguaggccugugccgcaaacaagcuuaccaugggccagaucgugaccuucuuccaggaggucccccacgugaucgaggaggugaugaacaucguccugaucgcccucagcauccuggccgugcugaaggggcucuacaacuucgcgaccugcggccugguggggcugcucacguuccugcugcucugcggccgcuccugcaccgccagccgguacaagggggucuacgagcugcagacccuggagcucaacauggagacccugaacaugacgaugccgcuguccugcaccaagaacaacagccaccacuacaucauggugggcaacgagaccggccucgagcugacccugacgaacaccuccaucaucaaccacaaguucugcaaccucagcgacgcccacaagaagaaccuguacgaccacgcccugauguccaucaucagcaccuuccaccucuccauccccaacuucaaccaguacgaggccaugagcugcgacuucaacgggggcaagaucuccgugcaguacaaccugagccacuccuacgcgggggacgccgccaaccacugcggcaccgucgccaacggggugcugcagacguucaugcgcauggcguggggcggcagcuacaucgcccucgacuccgggugcggcagcugggacugcaucaugaccuccuaccaguaccugaucauccagaacaccaccugggaggaccacugccaguucagccggcccucccccaucggguaccugggccuccugagccagcgcacgcgggacaucuacaucagccgccggcugcucggcaccuucaccuggacccuguccgacagcgaggggaaggacacgccgggcggguacugccugacccgcuggaugcucaucgaggccgagcugaagugcuucggcaacaccgccguggccaagugcaacgagaagcacgacgaggaguucugcgacaugcugcggcuguucgacuucaacaagcaggcgauccagcgccugaaggcccccgcccagauguccauccagcugaucaacaaggccgucaacgcccucaucaacgaccagcugaucaugaagaaccaccuccgggacaucaugugcauccccuacugcaacuacagcaaguacugguaccucaaccacaccacgaccgggaagaccucccugcccaagugcuggcuggugagcaacggcuccuaccucaacgagacccacuucagcgacgacaucgagcagcaggcggacaacaugaucacggagaugcugcagaaggaguacauggagcgccagggcaagaccccgcuggggcugguggaccucuucgucuucuccaccagcuucuaccugaucuccaucuuccugcaccucgugaagauccccacccaccggcacaucgugggcaagagcugccccaagccccaccgccugaaccacauggggaucugcuccugcggccuguacaagcagccggggguccccgugaaguggaagcggugaggacuagucccuguucccagagcccacuuuuuuuucuuuuuuugaaauaaaauagccugucuuucagaucucaaaggcucuuuucagagccaccaaaaaaaaaaaaaaaaaaaaaaaaaaaaaaaaaaaaaaaaaaaaaaaaaaaaaaaaaaaaaaaaaaaaaaaaaaaaaaaaaaaaaaaaaaaaaaaaaaaaa

SEQ ID NO: 28764 - RNA, 1767 nt, Artificial Sequence
  mRNA product Design a-2 (hSL-A100) comprising derived and/or modified sequence from LASV(G1442-SLE-2011;Clade IV)__AIT17180__GPCmut5 (opt1)
aggagaguccgcucagccagguugcagaagcggcuuagcguguguccuaaucuucucucugcguguagguaggccugugccgcaaacaagcuuaccaugggccagaucgugaccuucuuccaggaggucccccacgugaucgaggaggugaugaacaucguccugaucgcccucagcauccuggccgugcugaaggggcucuacaacguggcgaccugcggccugaucgggcuggucacguuccuccugcugugcggccgcuccugcaccaccacccucuacaaggggguguacgagcugcagacgcuggagcucaacauggagacccugaacaugaccaugccgcugagcugcaccaagaacaacucccaccacuacauccgggugggcaacgagacgggccucgagcugacccugaccaacaccagcaucaucaaccacaaguucugcaaccucuccgacgcccacaagaagaaccuguacgaccacgcccugaugagcaucaucuccacguuccaccucagcauccccaacuucaaccaguacgaggccauguccugcgacuucaacgggggcaagaucagcguccaguacaaccugucccacagcuacgccggggacgcggccaaccacugcggcaccguggccaacggggugcugcagaccuucaugcgcauggccuggggcggcuccuacaucgcgcucgacagcgggugcggcaacugggacugcaucaugaccuccuaccaguaccugaucauccagaacacgaccugggacgaccacugccaguucagccggcccucccccaucggguaccugggccuccugagccagcgcacccgggacgucuacaucucccgccggcugcucggcaccuucacguggacccugagcgacagcgaggggaaggacaccccgggcggguacugccugacccgcuggaugcucaucgaggccgagcugaagugcuucggcaacacggccguggccaagugcaacgagaagcacgacgaggaguucugcgacaugcugcggcuguucgacuucaacaagcaggccauccagcgccugaaggcgcccgcccagauguccauccagcugaucaacaaggccgugaacgcccucaucaacgaccagcugaucaugaagaaccaccuccgggacaucaugugcauccccuacugcaacuacagcaaguacugguaccucaacaacaccgccaccgggaagaccucccugcccaagugcuggcugaucagcaacggcuccuaccucaacgagacgcacuucagcgacgacaucgagcaggaggcggacaacaugaucaccgagaugcugcagaaggaguacauggagcgccagggcaagaccccgcuggggcuggucgaccucuucguguucuccaccagcuucuaccugaucuccaucuuccugcaccucgugaagauccccacgcaccggcacaucgucggcaagagcugccccaagccccaccgccugaaccacauggggaucugcuccugcggccuguacaagcagccgggggugcccgugcgguggaagcgcugaggacuagucccuguucccagagcccacuuuuuuuucuuuuuuugaaauaaaauagccugucuuucagaucucaaaggcucuuuucagagccaccaaaaaaaaaaaaaaaaaaaaaaaaaaaaaaaaaaaaaaaaaaaaaaaaaaaaaaaaaaaaaaaaaaaaaaaaaaaaaaaaaaaaaaaaaaaaaaaaaaaaa

SEQ ID NO: 28765 - RNA, 1767 nt, Artificial Sequence
  mRNA product Design a-2 (hSL-A100) comprising derived and/or modified sequence from LASV(G3010-SLE-2013;Clade IV)__AIT17344__GPCmut5 (opt1)
aggagaguccgcucagccagguugcagaagcggcuuagcguguguccuaaucuucucucugcguguagguaggccugugccgcaaacaagcuuaccaugggccagaucgugaccuucuuccaggaggucccccacgugaucgaggaggugaugaacaucguccugaucgcccucagcauccuggccgugcugaaggggcucuacaacuucgcgaccugcggccugguggggcuggucacguuccuccugcugugcggccgcuccugcaccaccagccucuacaaggggguguacgagcugcagacccuggagcucaacauggagacgcugaacaugaccaugccgcuguccugcaccaagaacaacagccaccacuacaucauggugggcaacgagaccggccucgagcugacgcugaccaacaccuccaucaucaaccacaaguucugcaaccucagcgacgcccacaagaagaaccuguacaaccacgcccugauguccaucaucagcaccuuccaccucuccauccccaacuucaaccaguacgaggccaugagcugcgacuucaacgggggcaagaucuccguccaguacaaccugagccacuccuacgccggggacgcggccagccacugcggcacgguggccaacggggugcugcagaccuucaugcggauggccuggggcggcuccuacaucgcgcucgacagcgggugcggcaagugggacugcaucaugaccuccuaccaguaccugaucauccagaacaccacgugggaggaccacugccaguucagccgccccucccccaucggguaccugggccuccugagccagcggacccgcgacaucuacaucagccggcgccugcucggcaccuucaccuggacgcuguccgacagcgaggggaaggacaccccgggcggguacugccugacccgguggaugcucaucgaggccgagcugaagugcuucggcaacaccgccgucgccaagugcaacgagaagcacgacgaggaguucugcgacaugcugcgccucuucgacuucaacaagcaggccauccagcggcugaagacgcccgcgcagauguccauccagcugaucaacaaggccgugaacgcccucaucaacgaccagcugaucaugaagaaccaccuccgcgacaucaugugcauccccuacugcaacuacagcaaguacugguaccugaaccacaccaccaccgggaagacgucccugcccaagugcuggcuggugagcaacggcuccuaccucaacgagacccacuucagcgacgacaucgagcagcaggccgacaacaugaucaccgagaugcugcagaaggaguacauggagcggcagggcaagaccccgcuggggcuggucgaccucuucguguucuccacgagcuucuaccugaucuccaucuuccugcaccucgugaagauccccacccaccgccacaucgucggcaagagcugccccaagccccaccggcugaaccacauggggaucugcuccugcggccuguacaagcagccgggggugcccgugcgcuggaagcggugaggacuagucccuguucccagagcccacuuuuuuuucuuuuuuugaaauaaaauagccugucuuucagaucucaaaggcucuuuucagagccaccaaaaaaaaaaaaaaaaaaaaaaaaaaaaaaaaaaaaaaaaaaaaaaaaaaaaaaaaaaaaaaaaaaaaaaaaaaaaaaaaaaaaaaaaaaaaaaaaaaaaa

SEQ ID NO: 28766 - RNA, 1767 nt, Artificial Sequence
  mRNA product Design a-2 (hSL-A100) comprising derived and/or modified sequence from LASV(G502-SLE-2009;Clade IV)__AIT17126__GPCmut5 (opt1)
aggagaguccgcucagccagguugcagaagcggcuuagcguguguccuaaucuucucucugcguguagguaggccugugccgcaaacaagcuuaccaugggccagaucgugaccuucuuccaggaggucccccacgugaucgaggaggugaugaacaucguccugaucgcccucagcauccuggccgugcugaaggggcucuacaacuucgcgaccugcggccugguggggcugcucacguuccugcugcucugcggccgcuccugcaccaccgggcuguacaagggcgucuacgagcugcagacccucgagcugaacauggagacgcugaacaugaccaugccgcucagcugcaccaagaacaacucccaccacuacaucauggugggcaacgagaccgggcuggagcugacgcucaccaacaccagcaucaucaaccacaaguucugcaaccuguccgacgcccacaagaagaaccuguacgaccacgcccucaugagcaucaucuccaccuuccaccugagcauccccaacuucaaccaguacgaggccauguccugcgacuucaacggcgggaagaucagcgugcaguacaaccugucccacagcuacgccggcgacgcggccgaccacugcgggacggucgccaacggcgugcuccagaccuucaugcggauggccuggggcggguccuacaucgcgcuggacagcggcugcgggcgcugggacugcaucaugaccuccuaccaguaccugaucauccagaacaccacgugggaggaccacugccaguucagccggcccucccccaucggcuaccucggccugcugagccagcgcacccgggacaucuacaucucccgccggcuccuggggaccuucaccuggacgcugagcgacagcgagggcaaggacacccccgggggcuacugccucacccgcuggaugcugaucgaggccgagcugaagugcuucgggaacaccgccguggccaagugcaacgagaagcacgacgaggaguucugcgacaugcuccggcuguucgacuucaacaagcaggccauccagcgccugaaggcgccggcccagauguccauccagcucaucaacaaggccgucaacgcccugaucaacgaccagcuggugaugaagaaccaccuccgggacaucaugugcauccccuacugcaacuacagccgcuacugguaccugaaccacacgaccaccggccggaccucccugcccaagugcuggcucgugagcaacggcuccuaccugaacgagacgcacuucagcgacgacaucgagcagcaggccgacaacaugaucaccgagaugcugcagaaggaguacauggagcgccaggggaagaccccgcugggccucgucgaccuguucguguucuccaccagcuucuaccugaucuccaucuuccuccaccuggugaagauccccacgcaccggcacaucgucggcaagagcugccccaagccccaccgccugaaccacauggggaucugcuccugcgggcucuacaagcagccgggcgugcccgugaaguggaagcggugaggacuagucccuguucccagagcccacuuuuuuuucuuuuuuugaaauaaaauagccugucuuucagaucucaaaggcucuuuucagagccaccaaaaaaaaaaaaaaaaaaaaaaaaaaaaaaaaaaaaaaaaaaaaaaaaaaaaaaaaaaaaaaaaaaaaaaaaaaaaaaaaaaaaaaaaaaaaaaaaaaaaa

SEQ ID NO: 28767 - RNA, 1767 nt, Artificial Sequence
  mRNA product Design a-2 (hSL-A100) comprising derived and/or modified sequence from LASV(G733-SLE-2010;Clade IV)__AIT17154__GPCmut5 (opt1)
aggagaguccgcucagccagguugcagaagcggcuuagcguguguccuaaucuucucucugcguguagguaggccugugccgcaaacaagcuuaccaugggccagaucgugaccuucuuccaggaggucccccacgugaucgaggaggugaugaacaucguccugaucgcccucagcauccuggccgugcugaaggggcucuacaacuucgcgaccugcggcaucguggggcuggucuccuuccugcuccugugcggccgcagcugcacgaccucccuguacaaggggguguacgagcuccagacccuggagcugaacauggagacccucaacaugacgaugccgcugagcugcaccaagaacaacucccaccacuacaucauggugggcaacgagaccggccuggagcucacccugacgaacaccagcaucaucaaccacaaguucugcaaccuguccgacgcccacaagaagaaccucuacgaccacgcccugaugagcaucaucuccaccuuccaccugagcauccccaacuucaaccaguacgaggccauguccugcgacuucaacgggggcaagaucagcguccaguacaaccucucccacagcuacgccggggacgcggccaaccacugcggcaccaucgccaacggggugcugcagacguucaugcggauggccuggggcggcuccuacaucgcgcuggacagcgggugcgaccgcugggacugcaucaugaccuccuaccaguaccucaucauccagaacaccaccugggaggaccacugccaguucagccggcccucccccaucggcuaccuggggcugcucagccagcgcacgcgggacaucuacaucagccgccggcugcugggcaccuucaccuggacccucuccgacagcgagggcaaggacacgcccgggggcuacugccugacccgcuggaugcugaucgaggccgagcucaagugcuucgggaacaccgccguggccaagugcaacgagaagcacgacgaggaguucugcgacaugcugcggcuguucgacuucaacaagcaggccauccagcgccucaaggcgccggcccagauguccauccagcugaucaacaaggccgucaacgcccugaucaacgaccagcucaucaugaagaaccaccuccgggacaucaugugcauccccuacugcaacuacagcaaguacugguaccugaaccacaccacgaccggcaagaccucccugcccaagugcuggcuggugagcaacggguccuaccugaacgagacccacuucagcgacgacaucgagcagcaggccgacaacaugaucacggagaugcuccagaaggaguacauggagcgccagggcaagaccccgcugggccugguggaccuguucgucuucuccaccagcuucuaccucaucuccaucuuccugcaccuggugaagauccccacccaccggcacguggucggcaagagcugccccaagccccaccgccucaaccacauggggaucugcuccugcgggcuguacggccagccgggggugcccgugaaguggaagcggugaggacuagucccuguucccagagcccacuuuuuuuucuuuuuuugaaauaaaauagccugucuuucagaucucaaaggcucuuuucagagccaccaaaaaaaaaaaaaaaaaaaaaaaaaaaaaaaaaaaaaaaaaaaaaaaaaaaaaaaaaaaaaaaaaaaaaaaaaaaaaaaaaaaaaaaaaaaaaaaaaaaaa

SEQ ID NO: 28768 - RNA, 1767 nt, Artificial Sequence
  mRNA product Design a-2 (hSL-A100) comprising derived and/or modified sequence from MOPV/LASV reassortant(IGS-1;Clade IV)__AFY05576__GPCmut5 (opt1)
aggagaguccgcucagccagguugcagaagcggcuuagcguguguccuaaucuucucucugcguguagguaggccugugccgcaaacaagcuuaccaugggccagaucgugaccuucuuccaggaggucccccacgugaucgaggaggugaugaacaucguccugaucgcccucagcgugcuggccgugcugaaggggcucuacaacuucgcgaccugcggccuggucgggcuggugacguuccuccugcugugcggccgcuccugcaccaccagccucuacaaggggguguacgagcugcagacccuggagcucaacauggagacgcugaacaugaccaugccgcuguccugcaccaagaacaacagccaccacuacaucauggucggcaacgagaccggccucgagcugacgcugaccaacaccuccaucaucaaccacaaguucugcaaccucagcgacgcccacaagaagaaccuguacgaccacgcccugauguccaucaucagcaccuuccaccucuccauccccaacuucaaccaguacgaggccaugagcugcgacuucaacgggggcaagaucuccgugcaguacaaccugagccacuccuacgccggggacgcggccaaccacugcggcacgguggccaacgggguccugcagaccuucaugcggauggccuggggcggcagcuacaucgcgcucgacuccgggugcggcaacugggacugcaucaugaccagcuaccaguaccugaucauccagaacaccacgugggaggaccacugccaguucucccgccccagccccaucggguaccugggccuccugucccagcggacccgcgacaucuacaucagccggcgccugcucggcaccuucaccuggacgcugagcgacuccgagggggaggacaccccgggcggguacugccugacccgguggaugcucaucgaggccgagcugaagugcuucggcaacaccgccguggccaagugcaacgagaagcacgacgaggaguucugcgacaugcugcgccucuucgacuucaacaagcaggccauccagcggcugaaggcgcccgcccagaugagcauccagcugaucaacaaggccgugaacgcccucaucaacgaccagcugaucaugaagaaccaccuccgcgacaucaugugcauccccuacugcaacuacuccaaguacugguaccugaaccacacgaccaccgggcggaccagccugcccaagugcuggcuggucuccaacggcagcuaccucaacgagacgcacuucuccgacgacaucgagcagcaggccgacaacaugaucaccgagaugcugcagaaggaguacauggagcgccagggcaagaccccgcuggggcugguggaccucuucguguucagcaccuccuucuaccugaucagcaucuuccugcaccucgucaagauccccacgcaccggcacaucgugggcaaguccugccccaagccccaccgccugaaccacauggggaucugcagcugcggccuguacaagcagccgggggugcccgucaaguggaagcggugaggacuagucccuguucccagagcccacuuuuuuuucuuuuuuugaaauaaaauagccugucuuucagaucucaaaggcucuuuucagagccaccaaaaaaaaaaaaaaaaaaaaaaaaaaaaaaaaaaaaaaaaaaaaaaaaaaaaaaaaaaaaaaaaaaaaaaaaaaaaaaaaaaaaaaaaaaaaaaaaaaaaa

SEQ ID NO: 28769 - RNA, 1767 nt, Artificial Sequence
  mRNA product Design a-2 (hSL-A100) comprising derived and/or modified sequence from LASV(LM765-SLE-2012;Clade IV)__AIT17814__GPCmut5 (opt1)
aggagaguccgcucagccagguugcagaagcggcuuagcguguguccuaaucuucucucugcguguagguaggccugugccgcaaacaagcuuaccaugggccagaucgugaccuucuuccaggaggucccccacgugaucgaggaggugaugaacaucguccugaucgcccucagcauccuggccgugcugaaggggcucuacaacuucgcgaccugcggccugguggggcuggucacguuccuccugcugugcggccgcuccugcaccaccagccucuacaaggggguguacgagcugcagacccuggagcucaacauggagacgcugaacaugaccaugccgcuguccugcaccaagaacaacagccaccacuacaucauggugggcaacgagaccggccucgagcugacgcugaccaacaccuccaucaucgaccacaaguucugcaaccucagcgacgcccaccggaagaaccuguacgaccacgcccugauguccaucaucagcaccuuccaccucuccauccccaacuucaaccaguacgaggccaugagcugcgacuucaacgggggcaagaucuccguccaguacaaccugagccacuccuacgccaaggacgcggccgaccacugcgggacgguggccaacggcgugcugcagaccuucaugcgcauggccuggggcgggagcuacaucgcgcucgacuccggcugcgggcggugggacugcaucaugaccagcuaccaguaccugaucauccagaacaccacgugggaggaccacugccaguucucccgccccagccccaucggcuaccuggggcuccugucccagcggacccgcgacaucuacaucagccggcgccugcucggcaccuucaccuggacgcugagcgacuccgagggcaaggacacccccgggggcuacugccugacccgguggaugcucaucgaggccgagcugaagugcuucgggaacaccgccgucgccaagugcaacgagaagcacgacgaggaguucugcgacaugcugcgccucuucgacuucaacaagcaggccauccagcggcugaaggcgccggcccagaugagcauccagcugaucaacaaggccgugaacgcccucaucaacgaccagcugaucaugaagaaccaccuccgcgacaucaugugcauccccuacugcaacuacuccaaguacugguaccugaaccacacgaccaccggcaagaccagccugcccaagugcuggcugguguccaacgggagcuaccucaacgagacgcacuucuccgacgacaucgagcagcaggccgacaacaugaucaccgagaugcugcagaaggaguacauggagcggcagggcaagaccccgcugggccuggucgaccucuucguguucagcaccuccuucuaccugaucagcaucuuccugcaccucgugaagauccccacgcaccgccacaucgucgggaagcccugccccaagccgcaccggcugaaccacaugggcaucugcuccugcgggcuguacaagcagcccggcgugcccgugaaguggaagcgcugaggacuagucccuguucccagagcccacuuuuuuuucuuuuuuugaaauaaaauagccugucuuucagaucucaaaggcucuuuucagagccaccaaaaaaaaaaaaaaaaaaaaaaaaaaaaaaaaaaaaaaaaaaaaaaaaaaaaaaaaaaaaaaaaaaaaaaaaaaaaaaaaaaaaaaaaaaaaaaaaaaaaa

SEQ ID NO: 28770 - RNA, 1767 nt, Artificial Sequence
  mRNA product Design a-2 (hSL-A100) comprising derived and/or modified sequence from LASV(LM776-SLE-2012;Clade IV)__AIT17824__GPCmut5 (opt1)
aggagaguccgcucagccagguugcagaagcggcuuagcguguguccuaaucuucucucugcguguagguaggccugugccgcaaacaagcuuaccaugggccagaucgugaccuucuuccaggaggucccccacgugaucgaggaggugaugaacaucguccugaucgcccucagcauccuggccgugcugaaggggcucuacaacuucgcgaccugcggccugguggggcuggucacguuccuccugcugugcggccgcuccugcaccaccagcguguacaaggggguguacgagcuccagacccuggagcugaacauggagacgcucaacaugaccaugccgcuguccugcaccaagaacaacagccaccacuacaucauggucggcaacgagaccggccuggagcucacgcugaccaacaccuccaucaucaaccacaaguucugcaaccugagcgacgcccacaagaagaaccucuacgaccacgcccugauguccaucaucagcaccuuccaccuguccauccccaacuucaaccaguacgaggccaugagcugcgacuucaacgggggcaagaucuccgugcaguacaaccucagccacuccuacgccggggacgcggccaaccacugcggcacgguggccaacgggguccugcagaccuucaugcggauggccuggggcggcagcuacaucgcgcuggacuccgggugcggcaagugggacugcaucaugaccagcuaccaguaccucaucauccagaacaccacgugggaggaccacugccaguucucccgccccagccccaucggguaccugggccugcucucccagcggacccgcgacaucuacaucagccggcgccugcugggcaccuucaccuggacgcucagcgacuccgaggggaaggacaccccgggcggguacugccugacccgguggaugcugaucgaggccgagcucaagugcuucggcaacaccgccguggccaagugcaacgagaagcacgacgaggaguucugcgacaugcugcgccuguucgacuucaacaagcaggccauccagcggcucaaggcgcccgcccagaugagcauccagcugaucaacaaggccgugaacgcccugaucaacgaccagcucaucaugaagaaccaccuccgcgacaucaugugcauccccuacugcaacuacuccaaguacugguaccugaaccacacgaccaccgggaagaccagccugcccaagugcuggcuggucuccaacggcagcuaccugaacgagacgcacuucuccgacgacaucgagcagcaggccgacaacaugaucaccgagaugcuccagaaggaguacauggagcggcagggcaagaccccgcuggggcugguggaccuguucguguucagcaccuccuucuaccucaucagcaucuuccugcaccuggucaagauccccacgcaccgccacaucgugggcaaguccugccccaagccccaccggcucaaccacauggggaucugcagcugcggccuguacaagcagccgggggugcccguccgcuggaagcggugaggacuagucccuguucccagagcccacuuuuuuuucuuuuuuugaaauaaaauagccugucuuucagaucucaaaggcucuuuucagagccaccaaaaaaaaaaaaaaaaaaaaaaaaaaaaaaaaaaaaaaaaaaaaaaaaaaaaaaaaaaaaaaaaaaaaaaaaaaaaaaaaaaaaaaaaaaaaaaaaaaaaa

SEQ ID NO: 28771 - RNA, 1767 nt, Artificial Sequence
  mRNA product Design a-2 (hSL-A100) comprising derived and/or modified sequence from LASV(Mad39;Clade IV)__ANH09722__GPCmut5 (opt1)
aggagaguccgcucagccagguugcagaagcggcuuagcguguguccuaaucuucucucugcguguagguaggccugugccgcaaacaagcuuaccaugggccagaucgugaccuucuuccaggaggucccccacgugaucgaggaggugaugaacaucguccugaucgcccucagcauccuggccgugcugaaggggcucuacaacguggcgaccugcggccugaucgggcuggucacguuccuccugcugugcggccgcuccugcaccaccacccucuacaaggggguguacgagcugcaggcccuggagcucaacauggagacgcugaacaugaccaugccgcugagcugcaccaagaacaacucccaccacuacauccgggugggcaacgagaccggccucgagcugacgcugaccaacaccagccucaucaaccacaaguucugcaaccuguccgacgcccacaagaagaaccuguacgaccacgcccucaugagcaucaucuccaccuuccaccugagcauccccaacuucaaccaguacgaggccauguccugcgacuucaacgacgggaagaucagcguccaguacaaccugucccacacguacgcgggcgacaccgccaaccacugcgggaccguggccaacggcgugcuccagaccuucaugcgcauggccuggggcgggagcuacaucgcgcuggacuccggcugcgggggcugggacugcaucaugacgagcuaccaguaccugaucauccagaacaccaccugggaggaccacugccaguucucccggcccagccccaucggguaccucggccugcugucccagcgcacccgggacaucuacaucagccgccggcuccugggcacguucaccuggacccuguccgacagcgaggggaaggacaccccgggcggguacugccucacgcgcuggaugcugaucgaggccgagcugaagugcuucggcaacaccgccgucgccaagugcaacgagaagcacgacgaggaguucugcgacaugcuccggcuguucgacuucaacaagcaggccauccagcgccugaaggcgcccgcccagaugagcauccagcucaucaacaaggccgugaacgcccugaucaacgaccagcugaucaugaagaaccaccuccgggacaucaugugcauccccuacugcaacuacuccaaguacugguaccugaaccacaccgugaccgggaagacgagccugcccaagugcuggcucgucuccaacggcagcuaccugaacgagacccacuucuccgacgacaucgagcagcaggccgacaacaugaucaccgagaugcugcagaaggaguacauggagcgccagggcaagaccccgcuggggcucguggaccuguucguguucagcacguccuucuaccugaucagcaucuuccuccaccuggucaagauccccacccaccggcacguggugggcaagcccugccccaagccgcaccgccugaaccacauggggaucugcuccugcggcuucuacaagcagcccgggguccccgugcgguggaagcgcugaggacuagucccuguucccagagcccacuuuuuuuucuuuuuuugaaauaaaauagccugucuuucagaucucaaaggcucuuuucagagccaccaaaaaaaaaaaaaaaaaaaaaaaaaaaaaaaaaaaaaaaaaaaaaaaaaaaaaaaaaaaaaaaaaaaaaaaaaaaaaaaaaaaaaaaaaaaaaaaaaaaaa

SEQ ID NO: 28772 - RNA, 1767 nt, Artificial Sequence
  mRNA product Design a-2 (hSL-A100) comprising derived and/or modified sequence from LASV(Z0947-SLE-2011;Clade IV)__AIT17840__GPCmut5 (opt1)
aggagaguccgcucagccagguugcagaagcggcuuagcguguguccuaaucuucucucugcguguagguaggccugugccgcaaacaagcuuaccaugggccagaucgugaccuucuuccaggaggucccccacgugaucgaggaggugaugaacaucguccugaucgcccucagcauccuggccgugcugaaggggcucuacaacuucgcgaccugcggccugguggggcuggucacguuccuccugcugugcggccgcuccugcaccaucagccucuacaaggggguguacgagcugcagacccuggagcucaacauggagacccugaacaugacgaugccgcuguccugcaccaagaacaacagccaccacuacaucauggugggcaacgagaccggccucgagcugacccugacgaacaccuccaucaucaaccacaaguucugcaaccucagcgacgcccacaagaagaaccuguacgaccacgcccugauguccaucaucagcaccuuccaccucuccauccccaacuucaaccaguacgaggccaugagcugcgacuucaacgggggcaagaucuccguccaguacaaccugagccacuccuacgccggggacgcggccaaccacugcggcaccguggccaacggggugcugcagacguucaugcggauggccuggggcggcagcuacaucgcgcucgacuccgggugcgaccgcugggacugcaucaugaccagcuaccaguaccugaucauccagaacaccaccugggaggaccacugccaguucucccggcccagccccaucggcuaccuggggcuccugucccagcgcacgcgggacaucuacaucagccgccggcugcucggcaccuucaccuggacccugagcgacuccgagggcaaggacacgcccgggggcuacugccugacccgcuggaugcucaucgaggccgagcugaagugcuucgggaacaccgccgucgccaagugcaacgagaagcacgacgaggaguucugcgacaugcugcggcuguucgacuucaacaagcaggccauccagcgccugaaggcgccggcccagaugagcauccagcugaucaacaaggccgugaacgcccucaucaacgaccagcugaucaugaagaaccaccuccgggacaucaugugcauccccuacugcaacuacuccaaguacugguaccucaaccacaccacgaccggcaagaccagccugcccaagugcuggcugguguccaacgggagcuaccucaacgagacccacuucuccgacgacaucgagcagcaggccgacaacaugaucacggagaugcugcagaaggaguacauggagcgccagggcaagaccccgcugggccuggucgaccucuucguguucagcaccuccuucuaccugaucagcaucuuccugcaccucgugaagauccccacccaccggcacaucgucgggaagcccugccccaagccgcaccgccugaaccacaugggcaucugcuccugcgggcuguacaagcagcccggcgugcccgugaaguggaagcggugaggacuagucccuguucccagagcccacuuuuuuuucuuuuuuugaaauaaaauagccugucuuucagaucucaaaggcucuuuucagagccaccaaaaaaaaaaaaaaaaaaaaaaaaaaaaaaaaaaaaaaaaaaaaaaaaaaaaaaaaaaaaaaaaaaaaaaaaaaaaaaaaaaaaaaaaaaaaaaaaaaaaa

SEQ ID NO: 28773 - RNA, 1767 nt, Artificial Sequence
  mRNA product Design a-2 (hSL-A100) comprising derived and/or modified sequence from LASV(Josiah;Clade IV)__NP_694870__GPCmut5 (opt4)
aggagaguccgcucagccagguugcagaagcggcuuagcguguguccuaaucuucucucugcguguagguaggccugugccgcaaacaagcuuaccaugggccagaucgugaccuucuuccaggaggugccccacgugaucgaggaggugaugaacaucgugcugaucgcccugagcgugcuggccgugcugaagggccuguacaacuucgccaccugcggccuggugggccuggugaccuuccugcugcugugcggcagaagcugcaccaccagccuguacaagggcguguacgagcugcagacccuggagcugaacauggagacccugaacaugaccaugccccugagcugcaccaagaacaacagccaccacuacaucauggugggcaacgagaccggccuggagcugacccugaccaacaccagcaucaucaaccacaaguucugcaaccugagcgacgcccacaagaagaaccuguacgaccacgcccugaugagcaucaucagcaccuuccaccugagcauccccaacuucaaccaguacgaggccaugagcugcgacuucaacggcggcaagaucagcgugcaguacaaccugagccacagcuacgccggcgacgccgccaaccacugcggcaccguggccaacggcgugcugcagaccuucaugagaauggccuggggcggcagcuacaucgcccuggacagcggcugcggcaacugggacugcaucaugaccagcuaccaguaccugaucauccagaacaccaccugggaggaccacugccaguucagcagacccagccccaucggcuaccugggccugcugagccagagaaccagagacaucuacaucagcagaagacugcugggcaccuucaccuggacccugagcgacagcgagggcaaggacacccccggcggcuacugccugaccagauggaugcugaucgaggccgagcugaagugcuucggcaacaccgccguggccaagugcaacgagaagcacgacgaggaguucugcgacaugcugagacuguucgacuucaacaagcaggccauccagagacugaaggcccccgcccagaugagcauccagcugaucaacaaggccgugaacgcccugaucaacgaccagcugaucaugaagaaccaccugagagacaucaugugcauccccuacugcaacuacagcaaguacugguaccugaaccacaccaccaccggcagaaccagccugcccaagugcuggcuggugagcaacggcagcuaccugaacgagacccacuucagcgacgacaucgagcagcaggccgacaacaugaucaccgagaugcugcagaaggaguacauggagagacagggcaagaccccccugggccugguggaccuguucguguucagcaccagcuucuaccugaucagcaucuuccugcaccuggugaagauccccacccacagacacaucgugggcaagagcugccccaagccccacagacugaaccacaugggcaucugcagcugcggccuguacaagcagcccggcgugcccgugaaguggaagagaugaggacuagucccuguucccagagcccacuuuuuuuucuuuuuuugaaauaaaauagccugucuuucagaucucaaaggcucuuuucagagccaccaaaaaaaaaaaaaaaaaaaaaaaaaaaaaaaaaaaaaaaaaaaaaaaaaaaaaaaaaaaaaaaaaaaaaaaaaaaaaaaaaaaaaaaaaaaaaaaaaaaaa

SEQ ID NO: 28774 - RNA, 1764 nt, Artificial Sequence
  mRNA product Design a-2 (hSL-A100) comprising derived and/or modified sequence from LASV(LP;Clade I)__AAF86701__GPCmut5 (opt4)
aggagaguccgcucagccagguugcagaagcggcuuagcguguguccuaaucuucucucugcguguagguaggccugugccgcaaacaagcuuaccaugggccagaucaucaccuucuuccaggaggugccccacgugaucgaggaggugaugaacaucgugcugaucgcccugagccugcuggccauccugaagggccuguacaacaucgccaccugcggcaucaucggccugguggccuuccuguuccugugcggcaagagcugcagccugacccugaagggcggcuacgagcugcagacccuggagcugaacauggagacccugaacaugaccaugccccugagcugcaccaagaacagcagccaccacuacaucagagugggcaacgagaccggccuggagcugacccugaccaacaccagcaucaucaaccacaaguucugcaaccugagcgacgcccacaagaagaaccuguacgaccacgcccugaugagcaucaucagcaccuuccaccugagcauccccaacuucaaccaguacgaggccaugagcugcgacuucaacggcggcaagaucagcgugcaguacaaccugagccacagcuacgccggcgacgccgccgagcacugcggcaccguggccaacggcgugcugcagaccuucaugagaauggccuggggcggcagauacaucgcccuggacagcggcugcggcaacugggacugcaucaugaccagcuaccaguaccugaucauccagaacaccaccugggaggaccacugccaguucagcagacccagccccaucggcuaccugggccugcugagccagagaaccagagacaucuacaucagcagaagacugcugggcaccuucaccuggacccugagcgacagcgagggcaacgagacccccggcggcuacugccugaccagauggaugcugaucgaggccgagcugaagugcuucggcaacaccgccguggccaagugcaacgagaagcacgacgaggaguucugcgacaugcugagacuguucgacuucaacaagcaggccaucagaagacugaaggcccccgcccagaugagcauccagcugaucaacaaggccgugaacgcccugaucaacgaccagcugaucaugaagaaccaccugagagacaucaugugcauccccuacugcaacuacagcaaguacugguaccugaaccacaccagcagcggcagaaccagccugcccaagugcuggcugaucagcaacggcagcuaccugaacgagacccaguucagcgacgacaucgagcagcaggccgacaacaugaucaccgagaugcugcagaaggaguacaucgagagacagggcaagaccccccugggccugguggacaucuucaucuucagcaccagcuucuaccugaucagcaucuuccugcaccugaucaagauccccacccacagacacaucgugggcaagcccugccccaagccccacagacugaaccacaugggcgugugcagcugcggccuguacaagcaccccggcgugcccaccaaguggaagagaugaggacuagucccuguucccagagcccacuuuuuuuucuuuuuuugaaauaaaauagccugucuuucagaucucaaaggcucuuuucagagccaccaaaaaaaaaaaaaaaaaaaaaaaaaaaaaaaaaaaaaaaaaaaaaaaaaaaaaaaaaaaaaaaaaaaaaaaaaaaaaaaaaaaaaaaaaaaaaaaaaaaaa

SEQ ID NO: 28775 - RNA, 1764 nt, Artificial Sequence
  mRNA product Design a-2 (hSL-A100) comprising derived and/or modified sequence from LASV(803213;Clade II)__AAF86703__GPCmut5 (opt4)
aggagaguccgcucagccagguugcagaagcggcuuagcguguguccuaaucuucucucugcguguagguaggccugugccgcaaacaagcuuaccaugggccagaucaucaccuucuuccaggaggugccccacgugaucgaggaggugaugaacaucgugcugaucgcccugagccugcuggccauccugaagggcaucuacaacguggccaccugcggccuguucggccugaucagcuuccugcugcugugcggcagaagcugcagcgugaccuacaagggcguguacgagcugcagacccuggagcugaacauggccaaccugaacaugaccaugccccugagcugcaccaagaacaacagccaccacuacaucauggugggcaacgagaccggccuggagcugacccugaccaacaccagcaucaucaaccacaaguucugcaaccugagcgacgcccacaagaagaaccuguacgaccacgcccugaugagcaucaucagcaccuuccaccugagcauccccaacuucaaccaguacgaggccaugagcugcgacuucaacggcggcaagaucagcgugcaguacaaccugagccacagcuucgccguggacgccgccaaccacugcggcaccaucgccaacggcgugcugcagaccuucaugagaauggccuggggcggcagcuacaucgcccuggacagcggcugcggcaacugggacugcaucaugaccagcuaccaguaccugaucauccagaacaccaccugggaggaccacugccaguucagcagacccagccccaucggcuaccugggccugcugagccagagaaccagagacaucuacaucagcagaagacugcugggcaccuucaccuggacccugagcgacagcgagggcaacgaggcccccggcggcuacugccugaccagauggaugcugaucgaggccgagcugaagugcuucggcaacaccgccguggccaagugcaacgagaagcacgacgaggaguucugcgacaugcugagacuguucgacuucaacaagcaggccaucaagagacugaagacccccgcccagaugagcauccagcugaucaacaaggccgugaacgcccugaucaacgaccagcugaucaugaagaaccaccugagagacaucaugugcauccccuacugcaacuacagcagauacugguaccugaaccacaccgugaccggcaagaccagccugcccagaugcuggcuggugagcaacggcagcuaccugaacgagacccacuucagcgacgacaucgagcagcaggccgacaacaugaucaccgagaugcugcagaaggaguacauggacagacagggcaagaccccccugggccugguggaccuguucguguucagcaccagcuucuaccugaucagcaucuuccugcaccuggugaagauccccacccacagacacaucgugggcaagcccugccccaagccccacagacugaaccacaugggcaucugcagcugcggccuguacaagcaccccggcgugcccgugaaguggaagagaugaggacuagucccuguucccagagcccacuuuuuuuucuuuuuuugaaauaaaauagccugucuuucagaucucaaaggcucuuuucagagccaccaaaaaaaaaaaaaaaaaaaaaaaaaaaaaaaaaaaaaaaaaaaaaaaaaaaaaaaaaaaaaaaaaaaaaaaaaaaaaaaaaaaaaaaaaaaaaaaaaaaaa

SEQ ID NO: 28776 - RNA, 1764 nt, Artificial Sequence
  mRNA product Design a-2 (hSL-A100) comprising derived and/or modified sequence from LASV(GA391;Clade III)__CAA36645__GPCmut5 (opt4)
aggagaguccgcucagccagguugcagaagcggcuuagcguguguccuaaucuucucucugcguguagguaggccugugccgcaaacaagcuuaccaugggccagaucgugaccuucuuccaggaggugccccacgugaucgaggaggugaugaacaucgugcugaucgcccugagcauccuggccauccugaagggccuguacaacguggccaccugcggccugaucggccuggugaccuuccugcugcugagcggcagaagcugcagccugaucuacaagggcaccuacgagcugcagacccuggagcugaacauggagacccugaacaugaccaugccccugagcugcaccaagaacaacagccaccacuacaucagagugggcaacgagaccggccuggagcugacccugaccaacaccagcauccugaaccacaaguucugcaaccugagcgacgcccacaagagaaaccuguacgaccacagccugaugagcaucaucagcaccuuccaccugagcauccccaacuucaaccaguacgaggccaugagcugcgacuucaacggcggcaagaucaccgugcaguacaaccugagccacagcuucgccguggacgccgccggccacugcggcacccuggccaacggcgugcugcagaccuucaugagaauggccuggggcggcagcuacaucgcccuggacagcggcugcggcaacugggacugcaucaugaccagcuaccaguaccugaucauccagaacaccaccugggacgaccacugccaguucagcagacccagccccaucggcuaccugggccugcugagccagagaaccagagacaucuacaucagcagaagacugcugggcaccuucaccuggacccugagcgacagcgagggcaacgagacccccggcggcuacugccugaccagauggaugcugaucgaggccgagcugaagugcuucggcaacaccgccguggccaagugcaacgagaagcacgacgaggaguucugcgacaugcugagacuguucgacuucaacaagcaggccaucagaagacugaagacccccgcccagaugagcauccagcugaucaacaaggccgugaacgcccugaucaacgaccagcugaucaugaagaaccaccugagagacaucaugugcauccccuacugcaacuacagcagauacugguaccugaaccacaccagcaccggcaagaccagccugcccagaugcuggcugaucagcaacggcagcuaccugaacgagaccaaguucagcgacgacaucgagcagcaggccgacaacaugaucaccgagaugcugcagaaggaguacaucgacagacagggcaagaccccccugggccugguggaccuguucguguucagcaccagcuucuaccugaucagcaucuuccugcaccuggugaagauccccacccacagacacaucgugggcaagcccugccccaagccccacagacugaaccacaugggcaucugcagcugcggccuguacaagcagcccggcgugcccgugagauggaagagaugaggacuagucccuguucccagagcccacuuuuuuuucuuuuuuugaaauaaaauagccugucuuucagaucucaaaggcucuuuucagagccaccaaaaaaaaaaaaaaaaaaaaaaaaaaaaaaaaaaaaaaaaaaaaaaaaaaaaaaaaaaaaaaaaaaaaaaaaaaaaaaaaaaaaaaaaaaaaaaaaaaaaa

SEQ ID NO: 28777 - RNA, 1767 nt, Artificial Sequence
  mRNA product Design a-2 (hSL-A100) comprising derived and/or modified sequence from LASV(AV;Clade V)__CCA30314__GPCmut5 (opt4)
aggagaguccgcucagccagguugcagaagcggcuuagcguguguccuaaucuucucucugcguguagguaggccugugccgcaaacaagcuuaccaugggccagaucgugaccuucuuccaggaggugccccacgugaucgaggaggugaugaacaucgugcugaucgcccugagcauccuggccgugcugaagggccuguacaacaucgccaccugcggccugaucggccugaucaccuuccugcugcugugcggcagaagcugcagcagcaaccuguacaagggcguguacgagcugcagagccuggaccugaacauggagacccugaacaugaccaugccccugagcugcaccaagaacaacagccaccacuacaucagagugggcaacgacaccggccuggagcugacccugaccaacaccagcauccugaaccacaaguucugcaaccugagcgacgcccacaagaaggaccuguacgaccacgcccugaugagcaucaucagcaccuuccaccugagcauccccaacuucaaccaguacgaggccaugagcugcgacuucaacggcggcaagaucagcgugcaguacaaccugagccacagcuacgccaucgacgccgccaaccacugcggcaccguggccaacggcauccugcagaccuucaugagaauggccuggggcggcagcuacaucgcccuggacagcggcugcggcaacugggacugcaucaugaccagcuaccaguaccugaucauccagaacaccaccugggagaaccacugccaguucagcagacccagccccaucggcuaccugggccugcugagccagagaaccagagacaucuacaucagcagaagacugcugggcaccuucaccuggacccugagcgacagcgagggcaacgccacccccggcggcuacugccugaccagauggaugcugaucgaggccgagcugaagugcuucggcaacaccgccguggccaagugcaacgagaagcacgacgaggaguucugcgacaugcugagacuguucgacuucaacaagcaggccaucagcagacugaagagccccgcccagaugagcauccagcugaucaacaaggccgugaacgcccugaucaacgaccagcugaucaugaagaaccaccugagagacaucaugugcauccccuacugcaacuacagcaaguacugguaccugaaccacaccaucaccggcaagaccagccugcccaagugcuggcuggugagcaacggcagcuaccugaacgagacccacuucagcgacgacaucgagcagcaggccgacaacaugaucaccgagaugcugcagaaggaguacauggagagacagggcaagaccccccugggccugguggaccuguucguguucagcaccagcuucuaccugaucagcaucuuccugagacuggugaagauccccacccacagacacaucgugggcaagcccugccccaagccccacagacugaaccacaugggcaucugcagcugcggccuguacaagcagcccggcgugcccgugagauggaagagaugaggacuagucccuguucccagagcccacuuuuuuuucuuuuuuugaaauaaaauagccugucuuucagaucucaaaggcucuuuucagagccaccaaaaaaaaaaaaaaaaaaaaaaaaaaaaaaaaaaaaaaaaaaaaaaaaaaaaaaaaaaaaaaaaaaaaaaaaaaaaaaaaaaaaaaaaaaaaaaaaaaaaa

SEQ ID NO: 28778 - RNA, 1764 nt, Artificial Sequence
  mRNA product Design a-2 (hSL-A100) comprising derived and/or modified sequence from LASV(Togo/2016/7082;Clade VI)__AMR44577__GPCmut5 (opt4)
aggagaguccgcucagccagguugcagaagcggcuuagcguguguccuaaucuucucucugcguguagguaggccugugccgcaaacaagcuuaccaugggccagaucaucaccuucuuccaggaggugccccacgugaucgaggaggugaugaacaucgugcugaucgcccugagccugcuggccauccugaagggcguguacaacguggccaccugcggcaucaucggccuggugaccuuccuguuccugugcggcagaagcugcagccugaucuacaagggcagcuacgagcugcagacccuggagcugaacauggagacccugaacaugaccaugccccugagcugcaccaagaacagcagccaccacuacaucagagugggcaacgagaccggccuggagcugacccugaccaacaccagcaucaucaaccacaaguucugcaaccugagcgacgcccacaagagaaaccuguacgaccacgcccugaugagcauccugagcaccuuccaccugagcauccccaacuucaaccaguacgaggccaugagcugcgacuucaacggcggcaagaucagcgugcaguacaaccugagccacgccuacgccguggacgccgccgagcacugcggcaccguggccaacggcgugcugcagaccuucaugagaauggccuggggcggcagcuacaucgcccuggacagcggcugcggcaacugggacugcaucaugaccagcuaccaguaccugaucauccagaacaccaccugggaggaccacugccaguucagcagacccagccccaucggcuaccugggccugcugagccagagaaccagagacaucuacaucagcagaagacugcugggcaccuucaccuggacccugagcgacagcgagggcaacgagacccccggcggcuacugccugaccagauggaugcugaucgaggccgagcugaagugcuucggcaacaccgccguggccaagugcaacgagaagcacgacgaggaguucugcgacaugcugagacuguucgacuucaacaagcaggccauccagagacugaagagccccgcccagaugagcauccagcugaucaacaaggccgugaacgcccugaucaacgaccagcugaucaugaagaaccaccugagagacaugaugugcauccccuacugcaacuacagcaaguacugguaccugaaccacaccagcagcggcagaaccagccugcccaagugcuggcuggugagcaacggcagcuaccugaacgagacccacuucagcgacgacaucgagcagcaggccgacaacaugaucaccgagaugcugcagaaggaguacaucgacagacagggcaagaccccccugggccugguggaccuguucguguucagcaccagcuucuaccugaucagcaucuuccugcaccugaucaagauccccacccacagacacaucgugggcaagcccugccccaagccccacagacugaaccacaugggcaucugcagcugcggccuguacaagcagcccggcgugcccaccagauggaagagaugaggacuagucccuguucccagagcccacuuuuuuuucuuuuuuugaaauaaaauagccugucuuucagaucucaaaggcucuuuucagagccaccaaaaaaaaaaaaaaaaaaaaaaaaaaaaaaaaaaaaaaaaaaaaaaaaaaaaaaaaaaaaaaaaaaaaaaaaaaaaaaaaaaaaaaaaaaaaaaaaaaaaa

SEQ ID NO: 28779 - RNA, 1764 nt, Artificial Sequence
  mRNA product Design a-2 (hSL-A100) comprising derived and/or modified sequence from LASV(KAK-428;Clade n.d. (VII))__ANH09740__GPCmut5 (opt4)
aggagaguccgcucagccagguugcagaagcggcuuagcguguguccuaaucuucucucugcguguagguaggccugugccgcaaacaagcuuaccaugggccagaucgugaccuucuuccaggaggugccccacgugaucgaggaggugaugaacaucgugcugaucgcccugagccugcuggccauccugaagggccuguacaacuucgccaccugcggcgugaucggccugaucaccuuccugcugcugugcggcagaagcugcagcgccaccuacaagggccaguacgagcugcagacccuggagcugaacauggagagccugaacaugaccaugccccugagcugcaccaagaacaacagccaccacuacaucagagccggcaacaacaccggccuggagcugacccugaccaacaccagcaucaucagccacaaguucugcaaccugagcgacgcccacaagaagaaccuguacgaccacacccugaugagcaucaucaccaccuuccaccugagcauccccaacuucaaccaguacgaggccaugagcugcgacuucaacggcggcaagaucagcauccaguacaaccugagccacagcuacgccggcgacgccgcccagcacugcggcaccguggccaacggcgugcugcagaccuucaugagaauggccuggggcggcagcuaccuggcccuggacagcggcugcagaggcugggacugcaucaucagcagcuaccaguaccugaucauccagaacaccaccugggacgaccacugccaguucagcagacccagccccaucggcuaccugggcuucgugagccagaagaccagagacaucuacaucagcagaagacugcugggcaccuucaccuggacccugagcgacagcgagggccacgacaugcccggcggcuacugccugaccagauggaugcugaucgaggccgaccugaagugcuucggcaacaccgccguggccaagugcaacgagaagcacgacgaggaguucugcgacauguggagacuguucgacuucaacaagcaggccauccagagacugaaggcccccgcccagaugaacauccagcugaucaacaaggccgugaacgcccugaucaacgaccagcugaugaugaagaaccaccugagagacaucaugugcauccccuacugcaacuacagcaaguucugguaccugaacaacaccaccaccggcagaaccagccugcccagaugcuggcugaucagcaacggcagcuaccugaacgagacccacuucagcgacgacaucgagcagcaggccgacaacaugaucaccgagaugcugcagaaggaguacauggacagacagggcaagaccccccugggccugguggaccuguucguguucagcaccagcuucuaccugaucaccaucuuccugcaccuggugaagauccccacccacagacacaucgugggcaagcccugccccaagccccacagacugaaccacaugggcaucugcagcugcggccuguacaagcagcccggcgugcccgugagauggaagagaugaggacuagucccuguucccagagcccacuuuuuuuucuuuuuuugaaauaaaauagccugucuuucagaucucaaaggcucuuuucagagccaccaaaaaaaaaaaaaaaaaaaaaaaaaaaaaaaaaaaaaaaaaaaaaaaaaaaaaaaaaaaaaaaaaaaaaaaaaaaaaaaaaaaaaaaaaaaaaaaaaaaaa

SEQ ID NO: 28780 - RNA, 1764 nt, Artificial Sequence; identical to SEQ ID NO: 28774
  mRNA product Design a-2 (hSL-A100) comprising derived and/or modified sequence from LASV(Pinneo-NIG-1969;Clade I)__AIT17836__GPCmut5 (opt4)

SEQ ID NO: 28781 - RNA, 1764 nt, Artificial Sequence
  mRNA product Design a-2 (hSL-A100) comprising derived and/or modified sequence from LASV(ISTH0009-NIG-2011;Clade II)__AIT17404__GPCmut5 (opt4)
aggagaguccgcucagccagguugcagaagcggcuuagcguguguccuaaucuucucucugcguguagguaggccugugccgcaaacaagcuuaccaugggccagaucaucaccuucuuccaggaggugccccacgugaucgaggaggugaugaacaucgugcugaucgcccugagccugcuggccauccugaagggcaucuacaacguggccaccugcggccuguucggccuggugagcuuccugcugcugugcggcagaagcugcagcaccaccuacaagggcguguacgagcugcagacccuggagcuggacauggccagccugaacaugaccaugccccugagcugcaccaagaacaacagccaccacuacaucauggugggcaacgagaccggccuggagcugacccugaccaacaccagcaucaucaaccacaaguucugcaaccugagcgacgcccacaagaagaaccuguacgaccacgcccugaugagcaucaucagcaccuuccaccugagcauccccaacuucaaccaguacgaggccaugagcugcgacuucaacggcggcaagaucagcgugcaguacaaccugagccacgccuacgccguggacgccgccaaccacugcggcaccaucgccaacggcgugcugcagaccuucaugagaauggccuggggcggcagcuacaucgcccuggacagcggcugcggcagcugggacugcaucaugaccagcuaccaguaccugaucauccagaacaccaccugggaggaccacugccaguucagcagacccagccccaucggcuaccugggccugcugagccagagaaccagagacaucuacaucagcagaagacugcugggcaccuucaccuggacccugagcgacagcgagggcaacgagacccccggcggcuacugccugaccagauggaugcugaucgaggccgagcugaagugcuucggcaacaccgccguggccaagugcaacgagaagcacgacgaggaguucugcgacaugcugagacuguucgacuucaacaagcaggccaucagaagacugaagacccccgcccagaugagcauccagcugaucaacaaggccgugaacgcccugaucaacgaccagcugaucaugaagaaccaccugagagacaucaugugcauccccuacugcaacuacagcaaguacugguaccugaaccacaccgugaccggcaagaccagccugcccagaugcuggcuggugagcaacggcagcuaccugaacgagacccacuucagcgacgacaucgagcagcaggccgacaacaugaucaccgagcugcugcagaaggaguacauggacagacagggcaagaccccccugggccugguggaccuguucguguucagcaccagcuucuaccugaucagcaucuuccugcaccugaucaagauccccacccacagacacaucaccggcaagcccugccccaagccccacagacugaaccacaugggcaucugcagcugcggccuguacaagcaccccggcgugcccgugaaguggaagagaugaggacuagucccuguucccagagcccacuuuuuuuucuuuuuuugaaauaaaauagccugucuuucagaucucaaaggcucuuuucagagccaccaaaaaaaaaaaaaaaaaaaaaaaaaaaaaaaaaaaaaaaaaaaaaaaaaaaaaaaaaaaaaaaaaaaaaaaaaaaaaaaaaaaaaaaaaaaaaaaaaaaaa

SEQ ID NO: 28782 - RNA, 1764 nt, Artificial Sequence
  mRNA product Design a-2 (hSL-A100) comprising derived and/or modified sequence from LASV(ISTH2010-NIG-2012;Clade II)__AIT17482__GPCmut5 (opt4)
aggagaguccgcucagccagguugcagaagcggcuuagcguguguccuaaucuucucucugcguguagguaggccugugccgcaaacaagcuuaccaugggccagaucaucaccuucuuccaggaggugccccacgugaucgaggaggugaugaacaucgugcugaucgcccugagccugcuggccauccugaagggcaucuacaacguggccaccugcggccuguucggccuggugagcuuccugcugcugugcggcagaagcugcagcaccaccuacaagggcguguacgagcugcagacccuggagcuggacauggccagccugaacaugaccaugccccugagcugcaccaagaacaacagccaccacuacaucauggugggcaacgagaccggccuggagcugacccugaccaacaccagcaucaucaaccacaaguucugcaaccugagcgacgcccacaagaagaaccuguacgaccacgcccugaugagcaucaucagcaccuuccaccugagcauccccaacuucaaccaguacgaggccaugagcugcgacuucaacggcggcaagaucagcgugcaguacaaccugagccacgccuacgccguggacgccgccaaccacugcggcaccaucgccaacggcgugcugcagaccuucaugagaauggccuggggcggcagcuacaucgcccuggacagcggcugcggcagcugggacugcaucaugaccagcuaccaguaccugaucauccagaacaucaccugggaggaccacugccaguucagcagacccagccccaucggcuaccugggccugcugagccagagaaccagagacaucuacaucagcagaagacugcugggcaccuucaccuggacccugagcgacagcgagggcaacgagacccccggcggcuacugccugaccagauggaugcugaucgaggccgagcugaagugcuucggcaacaccgccguggccaagugcaacgagaagcacgacgaggaguucugcgacaugcugagacuguucgacuucaacaagcaggccaucagaagacugaagacccccgcccagaugagcauccagcugaucaacaaggccgugaacgcccugaucaacgaccagcugaucaugaagaaccaccugagagacaucaugugcauccccuacugcaacuacagcaaguacugguaccugaaccacaccgugaccggcaagaccagccugcccagaugcuggcuggugagcaacggcagcuaccugaacgagacccacuucagcgacgacaucgagcagcaggccgacaacaugaucaccgagcugcugcagaaggaguacaucgacagacagggcaagaccccccugggccugguggaccuguucguguucagcaccagcuucuaccugaucagcaucuuccugcaccuggugaagauccccacccacagacacguggugggcaagcccugccccaagccccacagacugaaccacaugggcaucugcagcugcggccuguacaagcaccccggcgugcccgugaaguggaagagaugaggacuagucccuguucccagagcccacuuuuuuuucuuuuuuugaaauaaaauagccugucuuucagaucucaaaggcucuuuucagagccaccaaaaaaaaaaaaaaaaaaaaaaaaaaaaaaaaaaaaaaaaaaaaaaaaaaaaaaaaaaaaaaaaaaaaaaaaaaaaaaaaaaaaaaaaaaaaaaaaaaaaa

SEQ ID NO: 28783 - RNA, 1764 nt, Artificial Sequence
  mRNA product Design a-2 (hSL-A100) comprising derived and/or modified sequence from LASV(Lassa virus/H.sapiens-wt/NGA/2015/ISTH_0543;Clade II)__AVO03639__GPCmut5 (opt4)
aggagaguccgcucagccagguugcagaagcggcuuagcguguguccuaaucuucucucugcguguagguaggccugugccgcaaacaagcuuaccaugggccagaucaucaccuucuuccaggaggugccccacgugaucgaggaggugaugaacaucgugcugaucgcccugagccugcuggccauccugaagggcaucuacaacguggccaccugcggccuguucggccuggugagcuuccugcugcugugcggcagaagcugcagcaccaccuacaagggcguguacgagcugcagacccuggagcuggacauggccaaccugaacaugaccaugccccugagcugcaccaagaacaacagccaccacuacaucauggugggcaacgagaccggccuggagcugacccugaccaacaccagcaucaucaaccacaaguucugcaaccugagcgacgcccacaagaagaaccuguacgaccacgcccugaugagcaucaucagcaccuuccaccugagcauccccaacuucaaccaguacgaggccaugagcugcgacuucaacggcggcaagaucagcgugcaguacaaccugagccacaccuacgccguggacgccgccaaccacugcggcaccaucgccaacggcgugcugcagaccuucaugagaauggccuggggcggcagcuacaucgcccuggacagcggcugcggcagcugggacugcaucaugaccagcuaccaguaccuggugauccagaacaccaccugggaggaccacugccaguucagcagacccagccccaucggcuaccugggccugcugagccagagaaccagagacaucuacaucagcagaagacugcugggcaccuucaccuggacccugagcgacagcgagggcaacgagacccccggcggcuacugccugaccagauggaugcugaucgaggccgagcugaagugcuucggcaacaccgccguggccaagugcaacgagaagcacgacgaggaguucugcgacaugcugagacuguucgacuucaacaagcaggccaucagaagacugaagacccccgcccagaugagcauccagcugaucaacaaggccgugaacgcccugaucaacgaccagcugaucaugaagaaccaccugagagacaucaugugcauccccuacugcaacuacagcaaguacugguaccugaaccacaccgugaccggcaagaccagccugcccagaugcuggcuggugagcaacggcagcuaccugaacgagacccacuucagcgacgacaucgagcagcaggccgacaacaugaucaccgagcugcugcagaaggaguacaucgacagacagggcaagaccccccugggccugguggaccuguucguguucagcaccagcuucuaccugaucagcaucuuccugcaccuggugaagauccccacccacagacacaucaccggcaagcccugccccaagccccacagacugaaccacaugggcaucugcagcugcggccuguacaagcaccccggcgugcccgugaaguggaagagaugaggacuagucccuguucccagagcccacuuuuuuuucuuuuuuugaaauaaaauagccugucuuucagaucucaaaggcucuuuucagagccaccaaaaaaaaaaaaaaaaaaaaaaaaaaaaaaaaaaaaaaaaaaaaaaaaaaaaaaaaaaaaaaaaaaaaaaaaaaaaaaaaaaaaaaaaaaaaaaaaaaaaa

SEQ ID NO: 28784 - RNA, 1764 nt, Artificial Sequence
  mRNA product Design a-2 (hSL-A100) comprising derived and/or modified sequence from LASV(Lassa virus/H.sapiens-wt/NGA/2016/ISTH_0009;Clade II)__AVO03571__GPCmut5 (opt4)
aggagaguccgcucagccagguugcagaagcggcuuagcguguguccuaaucuucucucugcguguagguaggccugugccgcaaacaagcuuaccaugggccagaucaucaccuucuuccaggaggugccccacgugaucgaggaggugaugaacaucgugcugaucgcccugagccugcuggccauccugaagggcaucuacaacguggccaccugcggccugcugggccuggugagcuuccugcugcugugcggcagaagcugcagcaccaccuacaagggcguguacgagcugcagacccuggagcuggacauggccagccugaacaugaccaugccccugagcugcaccaagaacaacagccaccacuacaucauggugggcaacgagaccggccuggagcugacccugaccaacaccagcaucaucaaccacaaguucugcaaccugagcgacgcccacaagaagaaccuguacgaccacgcccugaugagcaucaucagcaccuuccaccugagcauccccaacuucaaccaguacgaggccaugagcugcgacuucaacggcggcagaaucagcgugcaguacaaccugagccacagcuacgccguggacgccgccaaccacugcggcaccaucgccaacggcgugcugcagaccuucaugagaauggccuggggcggcagcuacaucgcccuggacagcggcugcggcagcugggacugcaucaugaccagcuaccaguaccugaucauccagaacaccaccugggaggaccacugccaguucagcagacccagccccaucggcuaccugggccugcugagccagagaaccagagacaucuacaucagcagaagacugcugggcaccuucaccuggacccugagcgacagcgagggcaacgagacccccggcggcuacugccugaccagauggaugcugaucgaggccgagcugaagugcuucggcaacaccgccguggccaagugcaacgagaagcacgacgaggaguucugcgacaugcugagacuguucgacuucaacaagcaggccaucagaagacugaagacccccgcccagaugagcauccagcugaucaacaaggccgugaacgcccugaucaacgaccagcugaucaugaagaaccaccugagagacaucaugugcauccccuacugcaacuacagcaaguacugguaccugaaccacaccgugaccggcaagaccagccugcccagaugcuggcuggugagcaacggcagcuaccugaacgagacccacuucagcgacgacaucgagcagcaggccgacaacaugaucaccgagcugcugcagaaggaguacaucgacagacagggcaagaccccccugggccugguggaccuguucguguucagcaccagcuucuaccugaucagcaucuuccugcaccuggugaagauccccacccacagacacaucaccggcaagcccugccccaagccccacagacugaaccacaugggcaucugcagcugcggccuguacaaccaccccggcgugcccgugaaguggaagagaugaggacuagucccuguucccagagcccacuuuuuuuucuuuuuuugaaauaaaauagccugucuuucagaucucaaaggcucuuuucagagccaccaaaaaaaaaaaaaaaaaaaaaaaaaaaaaaaaaaaaaaaaaaaaaaaaaaaaaaaaaaaaaaaaaaaaaaaaaaaaaaaaaaaaaaaaaaaaaaaaaaaaa

SEQ ID NO: 28785 - RNA, 1764 nt, Artificial Sequence
  mRNA product Design a-2 (hSL-A100) comprising derived and/or modified sequence from LASV(Lassa virus/H.sapiens-wt/NGA/2016/ISTH_0017;Clade II)__AVO03567__GPCmut5 (opt4)
aggagaguccgcucagccagguugcagaagcggcuuagcguguguccuaaucuucucucugcguguagguaggccugugccgcaaacaagcuuaccaugggccagaucaucaccuucuuccaggaggugccccacgugaucgaggaggugaugaacaucgugcugaucgcccugagccugcuggccauccugaagggcaucuacaacguggccaccugcggccuguucggccuggugagcuuccugcugcugugcggcagaagcugcagcaccaccuacaagggcguguacgagcugcagacccuggagcuggacauggccagccugaacaugaccaugccccugagcugcaccaagaacaacagccaccacuacaucauggugggcaacgagaccggccuggagcugacccugaccaacaccagcaucaucaaccacaaguucugcaaccugagcgacgcccacaagaagaaccuguacgaccacgcccugaugagcaucaucagcaccuuccaccugagcauccccaacuucaaccaguacgaggccaugagcugcgacuucaacggcggcaagaucagcgugcaguacaaccugagccacaccuacgccaucgacgccgccaaccacugcggcaccaucgccaacggcgugcugcagaccuucaugagaauggccuggggcggcagcuacaucgcccuggacagcggcugcggcagcugggacugcaucaugaccagcuaccaguaccugaucauccagaacaccaccugggaggaccacugccaguucagcagacccagccccaucggcuaccugggccugcugagccagagaaccagagacaucuacaucagcagaagacugcugggcaccuucaccuggacccugagcgacagcgagggcaacgagacccccggcggcuacugccugaccagauggaugcugaucgaggccgagcugaagugcuucggcaacaccgccguggccaagugcaacgagaagcacgacgaggaguucugcgacaugcugagacuguucgacuucaacaagcaggccaucagaagacugaagacccccgcccagaugagcauccagcugaucaacaaggccgugaacgcccugaucaacgaccagcugaucaugaagaaccaccugagagacaucaugugcauccccuacugcaacuacagcaaguacugguaccugaaccacaccgugaccggcaagaccagccugcccagaugcuggcuggugagcaacggcagcuaccugaacgagacccacuucagcgacgacaucgagcagcaggccgacaacaugaucaccgagcugcugcagaaggaguacauggacagacagggcaagaccccccugggccugguggaccuguucguguucagcaccagcuucuaccugaucagcaucuuccugcaccuggugagaauccccacccacagacacgugaucggcaagcccugccccaagccccacagacugaaccacaugggcaucugcagcugcggccuguacaagcaccccggcgugcccgugaaguggaagagaugaggacuagucccuguucccagagcccacuuuuuuuucuuuuuuugaaauaaaauagccugucuuucagaucucaaaggcucuuuucagagccaccaaaaaaaaaaaaaaaaaaaaaaaaaaaaaaaaaaaaaaaaaaaaaaaaaaaaaaaaaaaaaaaaaaaaaaaaaaaaaaaaaaaaaaaaaaaaaaaaaaaaa

SEQ ID NO: 28786 - RNA, 1764 nt, Artificial Sequence
  mRNA product Design a-2 (hSL-A100) comprising derived and/or modified sequence from LASV(Lassa virus/H.sapiens-wt/NGA/2018/ISTH_0959;Clade II)__AVV65099__GPCmut5 (opt4)
aggagaguccgcucagccagguugcagaagcggcuuagcguguguccuaaucuucucucugcguguagguaggccugugccgcaaacaagcuuaccaugggccagaucaucaccuucuuccaggaggugccccacgugaucgaggaggugaugaacaucgugcugaucgcccugagccugcuggccauccugaagggcaucuacaacguggugaccugcggccuguucggccuggugagcuuccugcugcugugcggcagaagcugcagcaccaccuacaagggcguguacgagcugcagacccuggagcuggacauggccagccugaacaugaccaugccccugagcugcaccaagaacaacagccaccacuacaucauggugggcaacgagaccggccuggagcugacccugaccaacaccagcaucaucaaccacaaguucugcaaccugagcgacgcccacaagaagaaccuguacgaccacgcccugaugagcaucaucagcaccuuccaccugagcauccccaacuucaaccaguacgaggccaugagcugcgacuucaacggcggcaagaucagcgugcaguacaaccugagccacgccuacgccaucgacgccgccaaccacugcggcaccaucgccaacggcgugcugcagaccuucaugagaauggccuggggcggcagcuacaucgcccuggacagcggcugcggcagcugggacugcaucaugaccagcuaccaguaccugaucauccagaacaccaccugggaggaccacugccaguucagcagacccagccccaucggcuaccugggccugcugagccagagaaccagagacaucuacaucagcagaagacugcugggcaccuucaccuggacccugagcgacagcgagggcaacgagacccccggcggcuacugccugaccagauggaugcugaucgaggccgagcugaagugcuucggcaacaccgccguggccaagugcaacgagaagcacgacgaggaguucugcgacaugcugagacuguucgacuucaacaagcaggccaucagaagacugaagacccccgcccagaugagcauccagcugaucaacaaggccgugaacgcccugaucaacgaccagcugaucaugaagaaccaccugagagacaucaugugcauccccuacugcaacuacagcaaguacugguaccugaaccacaccgugaccggcaagaccagccugcccagaugcuggcuggugagcaacggcagcuaccugaacgagacccacuucagcgacgacaucgagcagcaggccgacaacaugaucaccgagcugcugcagaaggaguacaucgacagacagggcaagaccccccugggccugguggaccuguucguguucagcaccagcuucuaccugaucagcaucuuccugcaccuggugaagauccccacccacagacacgugaucggcaagcccugccccaagccccacagacugaaccacaugggcaucugcagcugcggccuguacaagcaccccggcgugcccgugaaguggaagagaugaggacuagucccuguucccagagcccacuuuuuuuucuuuuuuugaaauaaaauagccugucuuucagaucucaaaggcucuuuucagagccaccaaaaaaaaaaaaaaaaaaaaaaaaaaaaaaaaaaaaaaaaaaaaaaaaaaaaaaaaaaaaaaaaaaaaaaaaaaaaaaaaaaaaaaaaaaaaaaaaaaaaa

SEQ ID NO: 28787 - RNA, 1764 nt, Artificial Sequence
  mRNA product Design a-2 (hSL-A100) comprising derived and/or modified sequence from LASV(LASV003-NIG-2008;Clade II)__AIT17580__GPCmut5 (opt4)
aggagaguccgcucagccagguugcagaagcggcuuagcguguguccuaaucuucucucugcguguagguaggccugugccgcaaacaagcuuaccaugggccagaucaucaccuucuuccaggaggugccccacgugaucgaggaggugaugaacaucgugcugaucgcccugagccugcuggccauccugaagggcaucuacaacguggccaccugcggccuguucggccuggugagcuuccugcugcugugcggcagaagcugcagcaccaccuacaagggcguguacgagcugcagacccuggagcuggacauggccagccugaacaugaccaugccccugagcugcaccaagaacaacagccaccacuacaucauggugggcaacgagaccggccuggagcugacccugaccaacaccagcaucaucaaccacaaguucugcaaccugagcgacgcccacaagaagaaccuguacgaccacgcccugaugagcaucaucagcaccuuccaccugagcauccccaacuucaaccaguacgaggccaugagcugcgacuucaacggcggcaagaucagcgugcaguacaaccugagccacaccuacgccguggacgccgccaaccacugcggcaccaucgccaacggcgugcugcagaccuucaugagaauggccuggggcggcagcuacaucgcccuggacagcggcugcggcagcugggacugcaucaugaccagcuaccaguaccugaucauccagaacaccaccugggaggaccacugccaguucagcagacccagccccaucggcuaccugggccugcugagccagagaaccagagacaucuacaucagcagaagacugcugggcaccuucaccuggacccugagcgacagcgagagcaacgagacccccggcggcuacugccugaccagauggaugcugaucgaggccgagcugaagugcuucggcaacaccgccguggccaagugcaacgagaagcacgacgaggaguucugcgacaugcugagacuguucgacuucaacaagcaggccaucagaagacugaaggcccccgcccagaugagcauccagcugaucaacaaggccgugaacgcccugaucaacgaccagcugaucaugaagaaccaccugagagacaucaugugcauccccuacugcaacuacagcaaguacugguaccugaaccacaccgugaccggcagaaccagccugcccagaugcuggcuggugagcaacggcagcuaccugaacgagacccacuucagcgacgacaucgagcagcaggccgacaacaugaucaccgagcugcugcagaaggaguacauggacagacagggcaagaccccccugggccugguggaccuguucguguucagcaccagcuucuaccugaucagcaucuuccugcaccuggugaagauccccacccacagacacgugaucggcaagcccugccccaagccccacagacugaaccacaugggcaucugcagcugcggccuguacaagcaccccggcgugcccgugaaguggaagagaugaggacuagucccuguucccagagcccacuuuuuuuucuuuuuuugaaauaaaauagccugucuuucagaucucaaaggcucuuuucagagccaccaaaaaaaaaaaaaaaaaaaaaaaaaaaaaaaaaaaaaaaaaaaaaaaaaaaaaaaaaaaaaaaaaaaaaaaaaaaaaaaaaaaaaaaaaaaaaaaaaaaaa

SEQ ID NO: 28788 - RNA, 1764 nt, Artificial Sequence
  mRNA product Design a-2 (hSL-A100) comprising derived and/or modified sequence from LASV(LASV035-NIG-2009;Clade II)__AIT17588__GPCmut5 (opt4)
aggagaguccgcucagccagguugcagaagcggcuuagcguguguccuaaucuucucucugcguguagguaggccugugccgcaaacaagcuuaccaugggccagaucaucaccuucuuccaggaggugccccacgugaucgaggaggugaugaacaucgugcugaucgcccugagccugcuggccauccugaagggcaucuacaacguggccaccugcggccuguucggccuggugagcuuccugcugcugugcggcagaagcugcagcaccaccuacaagggcguguacgagcugcagacccuggagcuggacauggccagccugaacaugaccaugccccugagcugcaccaagaacaacagccaccacuacaucauggugggcaacgagaccggccuggagcugacccugaccaacaccagcaucaucaaccacaaguucugcaaccugagcgacgcccacaagaagaaccuguacgaccacgcccugaugagcaucaucagcaccuuccaccugagcauccccaacuucaaccaguacgaggccaugagcugcgacuucaacggcggcaagaucagcgugcaguacaaccugagccacgccuacgccguggacgccgccaaccacugcggcaccaucgccaacggcgugcugcagaccuucaugagaauggccuggggcggcagcuacaucgcccuggacagcggcugcggcagcugggacugcaucaugaccagcuaccaguaccugaucauccagaacaccaccugggaggaccacugccaguucagcagacccagccccaucggcuaccugggccugcugagccagagaaccagagacaucuacaucagcagaagacugcugggcaccuucaccuggacccugagcgacagcgagggcaacgagacccccggcggcuacugccugaccagauggaugcugaucgaggccgagcugaagugcuucggcaacaccgccguggccaagugcaacgagaagcacgacgaggaguucugcgacaugcugagacuguucgacuucaacaagcaggccaucagaagacugaaggcccccgcccagaugagcauccagcugaucaacaaggccgugaacgcccugaucaacgaccagcugaucaugaagaaccaccugagagacaucaugugcauccccuacugcaacuacagcaaguacugguaccugaaccacaccgugaccggcaagaccagccugcccagaugcuggcuggugagcaacggcagcuaccugaacgagacccacuucagcgacgacaucgagcagcaggccgacaacaugaucaccgagcugcugcagaaggaguacaucgacagacagggcaagaccccccugggccugguggaccuguucguguucagcaccagcuucuaccugaucagcaucuuccugcaccuggugaagauccccacccacagacacgugaucggcaagcccugccccaagccccacagacugaaccacaugggcaucugcagcugcggccuguacaagcaccccggcgugcccgugaaguggaagagaugaggacuagucccuguucccagagcccacuuuuuuuucuuuuuuugaaauaaaauagccugucuuucagaucucaaaggcucuuuucagagccaccaaaaaaaaaaaaaaaaaaaaaaaaaaaaaaaaaaaaaaaaaaaaaaaaaaaaaaaaaaaaaaaaaaaaaaaaaaaaaaaaaaaaaaaaaaaaaaaaaaaaa

SEQ ID NO: 28789 - RNA, 1764 nt, Artificial Sequence
  mRNA product Design a-2 (hSL-A100) comprising derived and/or modified sequence from LASV(LASV1000-NIG-2009;Clade II)__AIT17782__GPCmut5 (opt4)
aggagaguccgcucagccagguugcagaagcggcuuagcguguguccuaaucuucucucugcguguagguaggccugugccgcaaacaagcuuaccaugggccagaucaucaccuucuuccaggaggugccccacgugaucgaggaggugaugaacaucgugcugaucgcccugagccugcuggccauccugaagggcaucuacaacguggccaccugcggccuguucggccuggugagcuuccugcugcugugcggcagaagcugcagcaccaccuacaagggcguguacgagcugcagacccuggagcuggacauggccagccugaacaugaccaugccccugagcugcaccaagaacaacagccaccacuacaucauggugggcaacgagaccggccuggagcugacccugaccaacaccagcaucaucaaccacaaguucugcaaccugagcgacgcccacaagaagaaccuguacgaccacgcccugaugagcaucaucagcaccuuccaccugagcauccccaacuucaaccaguacgaggccaugagcugcgacuucaacggcggcaagaucagcgugcaguacaaccugagccacaccuacgccguggacgccgccaaccacugcggcaccaucgccaacggcgugcugcagaccuucaugagaauggccuggggcggcagcuacaucgcccuggacagcggcugcggcagcugggacugcaucaugaccagcuaccaguaccugaucauccagaacaccaccugggaggaccacugccaguucagcagacccagccccaucggcuaccugggccugcugagccagagaaccagagacaucuacaucagcagaagacugcugggcaccuucaccuggacccugagcgacagcgagggcaacgagacccccggcggcuacugccugaccagauggaugcugaucgaggccgagcugaagugcuucggcaacaccgccguggccaagugcaacgagaagcacgacgaggaguucugcgacaugcugagacuguucgacuucaacaagcaggccaucaagagacugaagacccccgcccagaugagcauccagcugaucaacaaggccgugaacgcccugaucaacgaccagcugaucaugaagaaccaccugagagacaucaugugcauccccuacugcaacuacagcaaguacugguaccugaaccacaccgugaccggcaagaccagccugcccagaugcuggcuggugagcaacggcagcuaccugaacgagacccacuucagcgacgacaucgagcagcaggccgacaacaugaucaccgagcugcugcagaaggaguacaucgacagacagggcaagaccccccugggccugguggaccuguucguguucagcaccagcuucuaccugaucagcaucuuccugcaccuggugaagauccccacccacagacacguggugggcaagcccugccccaagccccacagacugaaccacaugggcaucugcagcugcggccuguacaagcaccccggcgugcccgugaaguggaagagaugaggacuagucccuguucccagagcccacuuuuuuuucuuuuuuugaaauaaaauagccugucuuucagaucucaaaggcucuuuucagagccaccaaaaaaaaaaaaaaaaaaaaaaaaaaaaaaaaaaaaaaaaaaaaaaaaaaaaaaaaaaaaaaaaaaaaaaaaaaaaaaaaaaaaaaaaaaaaaaaaaaaaa

SEQ ID NO: 28790 - RNA, 1764 nt, Artificial Sequence
  mRNA product Design a-2 (hSL-A100) comprising derived and/or modified sequence from LASV(LASV221-NIG-2010;Clade II)__AIT17624__GPCmut5 (opt4)
aggagaguccgcucagccagguugcagaagcggcuuagcguguguccuaaucuucucucugcguguagguaggccugugccgcaaacaagcuuaccaugggccagaucaucaccuucuuccaggaggugccccacgugaucgaggaggugaugaacaucgugcugaucgcccugagccugcuggccauccugaagggcaucuacaacguggccaccugcggccuguucggccuggugagcuuccugcugcugugcggcagaagcugcagcaccaccuacaagggcguguacgagcugcagacccuggagcuggacauggccagccugaacaugaccaugccccugagcugcaccaagaacaacagccaccacuacaucauggugggcaacgagaccggccuggagcugacccugaccaacaccagcaucaucaaccacaaguucugcaaccugagcgacgcccacaagaagaaccuguacgaccacgcccugaugagcaucaucagcaccuuccaccugagcauccccaacuucaaccaguacgaggccaugagcugcgacuucaacggcggcaagaucagcgugcaguacaaccugagccacaccuacgccaucgacgccgccaaccacugcggcaccaucgccaacggcgugcugcagaccuucaugagaauggccuggggcggcagcuacaucgcccuggacagcggcugcggcagcugggacugcaucaugaccagcuaccaguaccugaucauccagaacaccaccugggaggaccacugccaguucagcagacccagccccaucggcuaccugggccugcugagccagagaaccagagacaucuacaucagcagaagacugcugggcaccuucaccuggacccugagcgacagcgagggcaacgagacccccggcggcuacugccugaccagauggaugcugaucgaggccgagcugaagugcuucggcaacaccgccguggccaagugcaacgagaagcacgacgaggaguucugcgacaugcugagacuguucgacuucaacaagcaggccaucagaagacugaagacccccgcccagaugagcauccagcugaucaacaaggccgugaacgcccugaucaacgaccagcugaucaugaagaaccaccugagagacaucaugugcauccccuacugcaacuacagcaaguacugguaccugaaccacaccgugaccggcaagaccagccugcccagaugcuggcuggugagcaacggcagcuaccugaacgagacccacuucagcgacgacaucgagcagcaggccgacaacaugaucaccgagaugcugcagaaggaguacauggacagacagggcaagaccccccugggccugguggaccuguucguguucagcaccagcuucuaccugaucagcaucuuccugcaccuggugaagauccccacccacagacacgugaucggcaagcccugccccaagccccacagacugaaccacaugggcaucugcagcugcggccuguacaagcaccccggcgugcccgugaaguggaagagaugaggacuagucccuguucccagagcccacuuuuuuuucuuuuuuugaaauaaaauagccugucuuucagaucucaaaggcucuuuucagagccaccaaaaaaaaaaaaaaaaaaaaaaaaaaaaaaaaaaaaaaaaaaaaaaaaaaaaaaaaaaaaaaaaaaaaaaaaaaaaaaaaaaaaaaaaaaaaaaaaaaaaa

SEQ ID NO: 28791 - RNA, 1764 nt, Artificial Sequence
  mRNA product Design a-2 (hSL-A100) comprising derived and/or modified sequence from LASV(LASV237-NIG-2010;Clade II)__AIT17638__GPCmut5 (opt4)
aggagaguccgcucagccagguugcagaagcggcuuagcguguguccuaaucuucucucugcguguagguaggccugugccgcaaacaagcuuaccaugggccagaucaucaccuucuuccaggaggugccccacgugaucgaggaggugaugaacaucgugcugaucgcccugagccugcuggccauccugaagggcaucuacaacguggccaccugcggccuguucggccuggugagcuuccugcugcugugcggcagaagcugcagcaccaccuacaagggcguguacgagcugcagacccuggagcuggacauggccagccugaacaugaccaugccccugagcugcaccaagaacaacagccaccacuacaucauggugggcaacgagaccggccuggagcugacccugaccaacaccagcaucaucaaccacaaguucugcaaccugagcgacgcccacaagaaggaccuguacgaccacgcccugaugagcaucaucagcaccuuccaccugagcauccccaacuucaaccaguacgaggccaugagcugcgacuucaacggcggcaagaucagcgugcaguacaaccugagccacaccuacgccguggacgccgccaaccacugcggcaccaucgccaacggcgugcugcagaccuucaugagaauggccuggggcggcagcuacaucgcccuggacagcggcugcggcagcugggacugcaucaugaccagcuaccaguaccugaucauccagaacaccaccugggaggaccacugccaguucagcagacccagccccaucggcuaccugggccugcugagccagagaaccagagacaucuacaucagcagaagacugcugggcaccuucaccuggacccugagcgacagcgagggcaacgagacccccggcggcuacugccugaccagauggaugcugaucgaggccgagcugaagugcuucggcaacaccgccguggccaagugcaacgagaagcacgacgaggaguucugcgacaugcugagacuguucgacuucaacaagcaggccaucagaagacugaagacccccgcccagaugagcauccagcugaucaacaaggccgugaacgcccugaucaacgaccagcugaucaugaagaaccaccugagagacaucaugugcauccccuacugcaacuacagcaaguacugguaccugaaccacaccgugaccggcaagaccagccugcccagaugcuggcuggugagcaacggcagcuaccugaacgagacccacuucagcgacgacaucgagcagcaggccgacaacaugaucaccgagcugcugcagaaggaguacauggacagacagggcaagaccccccugggccugguggaccuguucguguucagcaccagcuucuaccugaucagcaucuuccugcaccugaucaagauccccacccacagacacaucaccggcaagcccugccccaagccccacagacugaaccacaugggcaucugcagcugcggccuguacaagcaccccggcgugcccgugaaguggaagagaugaggacuagucccuguucccagagcccacuuuuuuuucuuuuuuugaaauaaaauagccugucuuucagaucucaaaggcucuuuucagagccaccaaaaaaaaaaaaaaaaaaaaaaaaaaaaaaaaaaaaaaaaaaaaaaaaaaaaaaaaaaaaaaaaaaaaaaaaaaaaaaaaaaaaaaaaaaaaaaaaaaaaa

SEQ ID NO: 28792 - RNA, 1764 nt, Artificial Sequence
  mRNA product Design a-2 (hSL-A100) comprising derived and/or modified sequence from LASV(LASV253-NIG-2011;Clade II)__AIT17670__GPCmut5 (opt4)
aggagaguccgcucagccagguugcagaagcggcuuagcguguguccuaaucuucucucugcguguagguaggccugugccgcaaacaagcuuaccaugggccagaucaucaccuucuuccaggaggugccccacgugaucgaggaggugaugaacaucgugcugaucgcccugagccugcuggccauccugaagggcaucuacaacguggccaccugcggccuguucggccuggugagcuuccugcugcugugcggcagaagcugcagcaccaccuacaagggcguguacgagcugcagacccuggagcuggacauggccagccugaacaugaccaugccccugagcugcaccaagaacaacagccaccacuacaucauggugggcaacgagaccggccuggagcugacccugaccaacaccagcaucaucaaccacaaguucugcaaccugagcgacgcccacaagaagaaccuguacgaccacgcccugaugagcaucaucagcaccuuccaccugagcauccccaacuucaaccaguacgaggccaugagcugcgacuucaacggcggcaagaucagcgugcaguacaaccugagccacaccuacgccguggacgccgccaaccacugcggcaccaucgccaacggcgugcugcagaccuucaugagaauggccuggggcggcagcuacaucgcccuggacagcggcugcggcagcugggacugcaucaugaccagcuaccaguaccugaucauccagaacaccaccugggaggaccacugccaguucagcagacccagccccaucggcuaccugggccugcugagccagagaaccagagacaucuacaucagcagaagacugcugggcaccuucaccuggacccugagcgacagcgagggcaacgagacccccggcggcuacugccugaccagauggaugcugaucgaggccgagcugaagugcuucggcaacaccgccguggccaagugcaacgagaagcacgacgaggaguucugcgacaugcugagacuguucgacuucaacaagcaggccaucagaagacugaaggcccccgcccagaugagcauccagcugaucaacaaggccgugaacgcccugaucaacgaccagcugaucaugaagaaccaccugagagacaucaugugcauccccuacugcaacuacagcaaguacugguaccugaaccacaccgugaccggcagaaccagccugcccagaugcuggcuggugagcaacggcagcuaccugaacgagacccacuucagcgacgacaucgagcagcaggccgacaacaugaucaccgagcugcugcagaaggaguacaucgacagacagggcaagaccccccugggccugguggaccuguucguguucagcaccagcuucuaccugaucagcaucuuccugcaccuggugaagauccccacccacagacacaucaucggcaagcccugccccaagccccacagacugaaccacaugggcaucugcagcugcggccuguacaagcaccccggcgugcccgugaaguggaagagaugaggacuagucccuguucccagagcccacuuuuuuuucuuuuuuugaaauaaaauagccugucuuucagaucucaaaggcucuuuucagagccaccaaaaaaaaaaaaaaaaaaaaaaaaaaaaaaaaaaaaaaaaaaaaaaaaaaaaaaaaaaaaaaaaaaaaaaaaaaaaaaaaaaaaaaaaaaaaaaaaaaaaa

SEQ ID NO: 28793 - RNA, 1764 nt, Artificial Sequence
  mRNA product Design a-2 (hSL-A100) comprising derived and/or modified sequence from LASV(LASV254-NIG-2011;Clade II)__AIT17674__GPCmut5 (opt4)
aggagaguccgcucagccagguugcagaagcggcuuagcguguguccuaaucuucucucugcguguagguaggccugugccgcaaacaagcuuaccaugggccagaucaucaccuucuuccaggaggugccccacgugaucgaggaggugaugaacaucgugcugaucgcccugagccugcuggccauccugaagggcaucuacaacguggccaccugcggccuguucggccuggugagcuuccugcugcugugcggcagaagcugcagcaccaccuacaagggcguguacgagcugcagacccuggagcuggacaugaccaaccugaacaugaccaugccccugagcugcaccaagaacaacagccaccacuacaucauggugggcaacgagaccggccuggagcugacccugaccaacaccagcaucaucaaccacaaguucugcaaccugagcgacgcccacaagaagaaccuguacaaccacgcccugaugagcaucaucagcaccuuccaccugagcauccccaacuucaaccaguacgaggccaugagcugcgacuucaacggcggcaagaucagcgugcaguacaaccugagccacagcuacgccguggacgccgccaaccacugcggcaccaucgccaacggcgugcugcagaccuucaugagaauggccuggggcggcagcuacaucgcccuggacagcggcugcggcaacugggacugcaucaugaccagcuaccaguaccugaucauccagaacaccaccugggaggaccacugccaguucagcagacccagccccaucggcuaccugggccugcugagccagagaaccagagacaucuacaucagcagaagacugcugggcaccuucaccuggacccugagcgacagcgagggcaacgagacccccggcggcuacugccugaccagauggaugcugaucgaggccgagcugaagugcuucggcaacaccgccguggccaagugcaacgagaagcacgacgaggaguucugcgacaugcugagacuguucgacuucaacaagcaggccaucagaagacugaagacccccgcccaggccaacauccagcugaucaacaaggccgugaacgcccugaucaacgaccagcugaucaugaagaaccaccugagagacaucaugugcauccccuacugcaacuacagcaaguacugguaccugaaccacaccgugaccggcaagaccagccugcccagaugcuggcuggugagcaacggcagcuaccugaacgagacccacuucagcgacgacaucgagcagcaggccgacaacaugaucaccgagcugcugcagaaggaguacauggacagacagggcaagaccccccugggccugguggaccuguucguguucagcaccagcuucuaccugaucagcaucuuccugcaccuggugaagauccccacccacagacacgugaucggcaagcccugccccaagccccacagacugaaccacaugggcaucugcagcugcggccuguacaagcaccccggcgugcccgugaaguggaagagaugaggacuagucccuguucccagagcccacuuuuuuuucuuuuuuugaaauaaaauagccugucuuucagaucucaaaggcucuuuucagagccaccaaaaaaaaaaaaaaaaaaaaaaaaaaaaaaaaaaaaaaaaaaaaaaaaaaaaaaaaaaaaaaaaaaaaaaaaaaaaaaaaaaaaaaaaaaaaaaaaaaaaa

SEQ ID NO: 28794 - RNA, 1764 nt, Artificial Sequence
  mRNA product Design a-2 (hSL-A100) comprising derived and/or modified sequence from LASV(Nig08-A19;Clade III)__ADU56618__GPCmut5 (opt4)
aggagaguccgcucagccagguugcagaagcggcuuagcguguguccuaaucuucucucugcguguagguaggccugugccgcaaacaagcuuaccaugggccagaucgugaccuucuuccaggaggugccccacgugaucgaggaggugaugaacaucgugcugaucgcccugagcauccuggccauccugaagggccuguacaacaucgccaccugcggccugaucggccuggugaccuuccugcugcugagcggcagaagcugcagcaugaccuacaagggcguguacgagcugcagacccuggagcugaacaugaacacccugaacaugaccaugccccugagcugcaccaagaacaacagccaccacuacaucauggugggcaacgagaccggccuggagcugacccugaccaacaccagccugcugcaccacaaguucugcaaccugagcgacgcccacaagaagaaccuguacgaccacacccugaugagcaucaucagcaccuuccaccugagcauccccaacuucaaccaguacgaggccaugagcugcgacuucaacggcggcaagaucaccgugcaguacaaccugagccacagcuacgccaucgacgccgccaaccacugcggcaccguggccaacggcgugcugcagaccuucaugagaauggccuggggcggcagcuacaucgcccuggacagcggcugcggcaagugggacugcaucaugaccagcuaccaguaccugaucauccagaacaccaccugggaggaccacugccaguucagcagacccagccccaucggcuaccugggccugcugagccagagaaccagagacaucuacaucagcagaagacugcugggcaccuucaccuggacccugagcgacagcgagggcaacgagacccccggcggcuacugccugaccagauggaugcugaucgaggccgagcugaagugcuucggcaacaccgccguggccaagugcaacgagaagcacgacgaggaguucugcgacaugcugagacuguucgacuucaacaagcaggccaucagaagacugaaggcccccgcccagaugagcauccagcugaucaacaaggccgugaacgcccugaucaacgaccagcugaucaugaagaaccaccugagagacaucaugugcauccccuacugcaacuacagcaaguacugguaccugaaccacaccagcaccggcagaaccagccugcccagaugcuggcuggugagcaacggcagcuaccugaacgagacccacuucagcgacgacaucgagcagcaggccgacaacaugaucaccgagaugcugcagaaggaguaccuggacagacagggcaagaccccccugggccugguggaccuguucguguucagcaccagcuucuaccugaucagcaucuuccugcaccuggugaagauccccacccacagacacaucgugggcaagcccugccccaagccccacagacugaaccacaugggcaucugcagcugcggccuguacaagcagcccggcgugcccgugagauggaagagaugaggacuagucccuguucccagagcccacuuuuuuuucuuuuuuugaaauaaaauagccugucuuucagaucucaaaggcucuuuucagagccaccaaaaaaaaaaaaaaaaaaaaaaaaaaaaaaaaaaaaaaaaaaaaaaaaaaaaaaaaaaaaaaaaaaaaaaaaaaaaaaaaaaaaaaaaaaaaaaaaaaaaa

SEQ ID NO: 28795 - RNA, 1767 nt, Artificial Sequence
  mRNA product Design a-2 (hSL-A100) comprising derived and/or modified sequence from LASV(G1180-SLE-2010;Clade IV)__AIT17168__GPCmut5 (opt4)
aggagaguccgcucagccagguugcagaagcggcuuagcguguguccuaaucuucucucugcguguagguaggccugugccgcaaacaagcuuaccaugggccagaucgugaccuucuuccaggaggugccccacgugaucgaggaggugaugaacaucgugcugaucgcccugagcauccuggccgugcugaagggccuguacaacuucgccaccugcggccuggugggccugcugaccuuccugcugcugugcggcagaagcugcaccgccagcagauacaagggcguguacgagcugcagacccuggagcugaacauggagacccugaacaugaccaugccccugagcugcaccaagaacaacagccaccacuacaucauggugggcaacgagaccggccuggagcugacccugaccaacaccagcaucaucaaccacaaguucugcaaccugagcgacgcccacaagaagaaccuguacgaccacgcccugaugagcaucaucagcaccuuccaccugagcauccccaacuucaaccaguacgaggccaugagcugcgacuucaacggcggcaagaucagcgugcaguacaaccugagccacagcuacgccggcgacgccgccaaccacugcggcaccguggccaacggcgugcugcagaccuucaugagaauggccuggggcggcagcuacaucgcccuggacagcggcugcggcagcugggacugcaucaugaccagcuaccaguaccugaucauccagaacaccaccugggaggaccacugccaguucagcagacccagccccaucggcuaccugggccugcugagccagagaaccagagacaucuacaucagcagaagacugcugggcaccuucaccuggacccugagcgacagcgagggcaaggacacccccggcggcuacugccugaccagauggaugcugaucgaggccgagcugaagugcuucggcaacaccgccguggccaagugcaacgagaagcacgacgaggaguucugcgacaugcugagacuguucgacuucaacaagcaggccauccagagacugaaggcccccgcccagaugagcauccagcugaucaacaaggccgugaacgcccugaucaacgaccagcugaucaugaagaaccaccugagagacaucaugugcauccccuacugcaacuacagcaaguacugguaccugaaccacaccaccaccggcaagaccagccugcccaagugcuggcuggugagcaacggcagcuaccugaacgagacccacuucagcgacgacaucgagcagcaggccgacaacaugaucaccgagaugcugcagaaggaguacauggagagacagggcaagaccccccugggccugguggaccuguucguguucagcaccagcuucuaccugaucagcaucuuccugcaccuggugaagauccccacccacagacacaucgugggcaagagcugccccaagccccacagacugaaccacaugggcaucugcagcugcggccuguacaagcagcccggcgugcccgugaaguggaagagaugaggacuagucccuguucccagagcccacuuuuuuuucuuuuuuugaaauaaaauagccugucuuucagaucucaaaggcucuuuucagagccaccaaaaaaaaaaaaaaaaaaaaaaaaaaaaaaaaaaaaaaaaaaaaaaaaaaaaaaaaaaaaaaaaaaaaaaaaaaaaaaaaaaaaaaaaaaaaaaaaaaaaa

SEQ ID NO: 28796 - RNA, 1767 nt, Artificial Sequence
  mRNA product Design a-2 (hSL-A100) comprising derived and/or modified sequence from LASV(G1442-SLE-2011;Clade IV)__AIT17180__GPCmut5 (opt4)
aggagaguccgcucagccagguugcagaagcggcuuagcguguguccuaaucuucucucugcguguagguaggccugugccgcaaacaagcuuaccaugggccagaucgugaccuucuuccaggaggugccccacgugaucgaggaggugaugaacaucgugcugaucgcccugagcauccuggccgugcugaagggccuguacaacguggccaccugcggccugaucggccuggugaccuuccugcugcugugcggcagaagcugcaccaccacccuguacaagggcguguacgagcugcagacccuggagcugaacauggagacccugaacaugaccaugccccugagcugcaccaagaacaacagccaccacuacaucagagugggcaacgagaccggccuggagcugacccugaccaacaccagcaucaucaaccacaaguucugcaaccugagcgacgcccacaagaagaaccuguacgaccacgcccugaugagcaucaucagcaccuuccaccugagcauccccaacuucaaccaguacgaggccaugagcugcgacuucaacggcggcaagaucagcgugcaguacaaccugagccacagcuacgccggcgacgccgccaaccacugcggcaccguggccaacggcgugcugcagaccuucaugagaauggccuggggcggcagcuacaucgcccuggacagcggcugcggcaacugggacugcaucaugaccagcuaccaguaccugaucauccagaacaccaccugggacgaccacugccaguucagcagacccagccccaucggcuaccugggccugcugagccagagaaccagagacguguacaucagcagaagacugcugggcaccuucaccuggacccugagcgacagcgagggcaaggacacccccggcggcuacugccugaccagauggaugcugaucgaggccgagcugaagugcuucggcaacaccgccguggccaagugcaacgagaagcacgacgaggaguucugcgacaugcugagacuguucgacuucaacaagcaggccauccagagacugaaggcccccgcccagaugagcauccagcugaucaacaaggccgugaacgcccugaucaacgaccagcugaucaugaagaaccaccugagagacaucaugugcauccccuacugcaacuacagcaaguacugguaccugaacaacaccgccaccggcaagaccagccugcccaagugcuggcugaucagcaacggcagcuaccugaacgagacccacuucagcgacgacaucgagcaggaggccgacaacaugaucaccgagaugcugcagaaggaguacauggagagacagggcaagaccccccugggccugguggaccuguucguguucagcaccagcuucuaccugaucagcaucuuccugcaccuggugaagauccccacccacagacacaucgugggcaagagcugccccaagccccacagacugaaccacaugggcaucugcagcugcggccuguacaagcagcccggcgugcccgugagauggaagagaugaggacuagucccuguucccagagcccacuuuuuuuucuuuuuuugaaauaaaauagccugucuuucagaucucaaaggcucuuuucagagccaccaaaaaaaaaaaaaaaaaaaaaaaaaaaaaaaaaaaaaaaaaaaaaaaaaaaaaaaaaaaaaaaaaaaaaaaaaaaaaaaaaaaaaaaaaaaaaaaaaaaaa

SEQ ID NO: 28797 - RNA, 1767 nt, Artificial Sequence
  mRNA product Design a-2 (hSL-A100) comprising derived and/or modified sequence from LASV(G3010-SLE-2013;Clade IV)__AIT17344__GPCmut5 (opt4)
aggagaguccgcucagccagguugcagaagcggcuuagcguguguccuaaucuucucucugcguguagguaggccugugccgcaaacaagcuuaccaugggccagaucgugaccuucuuccaggaggugccccacgugaucgaggaggugaugaacaucgugcugaucgcccugagcauccuggccgugcugaagggccuguacaacuucgccaccugcggccuggugggccuggugaccuuccugcugcugugcggcagaagcugcaccaccagccuguacaagggcguguacgagcugcagacccuggagcugaacauggagacccugaacaugaccaugccccugagcugcaccaagaacaacagccaccacuacaucauggugggcaacgagaccggccuggagcugacccugaccaacaccagcaucaucaaccacaaguucugcaaccugagcgacgcccacaagaagaaccuguacaaccacgcccugaugagcaucaucagcaccuuccaccugagcauccccaacuucaaccaguacgaggccaugagcugcgacuucaacggcggcaagaucagcgugcaguacaaccugagccacagcuacgccggcgacgccgccagccacugcggcaccguggccaacggcgugcugcagaccuucaugagaauggccuggggcggcagcuacaucgcccuggacagcggcugcggcaagugggacugcaucaugaccagcuaccaguaccugaucauccagaacaccaccugggaggaccacugccaguucagcagacccagccccaucggcuaccugggccugcugagccagagaaccagagacaucuacaucagcagaagacugcugggcaccuucaccuggacccugagcgacagcgagggcaaggacacccccggcggcuacugccugaccagauggaugcugaucgaggccgagcugaagugcuucggcaacaccgccguggccaagugcaacgagaagcacgacgaggaguucugcgacaugcugagacuguucgacuucaacaagcaggccauccagagacugaagacccccgcccagaugagcauccagcugaucaacaaggccgugaacgcccugaucaacgaccagcugaucaugaagaaccaccugagagacaucaugugcauccccuacugcaacuacagcaaguacugguaccugaaccacaccaccaccggcaagaccagccugcccaagugcuggcuggugagcaacggcagcuaccugaacgagacccacuucagcgacgacaucgagcagcaggccgacaacaugaucaccgagaugcugcagaaggaguacauggagagacagggcaagaccccccugggccugguggaccuguucguguucagcaccagcuucuaccugaucagcaucuuccugcaccuggugaagauccccacccacagacacaucgugggcaagagcugccccaagccccacagacugaaccacaugggcaucugcagcugcggccuguacaagcagcccggcgugcccgugagauggaagagaugaggacuagucccuguucccagagcccacuuuuuuuucuuuuuuugaaauaaaauagccugucuuucagaucucaaaggcucuuuucagagccaccaaaaaaaaaaaaaaaaaaaaaaaaaaaaaaaaaaaaaaaaaaaaaaaaaaaaaaaaaaaaaaaaaaaaaaaaaaaaaaaaaaaaaaaaaaaaaaaaaaaaa

SEQ ID NO: 28798 - RNA, 1767 nt, Artificial Sequence
  mRNA product Design a-2 (hSL-A100) comprising derived and/or modified sequence from LASV(G502-SLE-2009;Clade IV)__AIT17126__GPCmut5 (opt4)
aggagaguccgcucagccagguugcagaagcggcuuagcguguguccuaaucuucucucugcguguagguaggccugugccgcaaacaagcuuaccaugggccagaucgugaccuucuuccaggaggugccccacgugaucgaggaggugaugaacaucgugcugaucgcccugagcauccuggccgugcugaagggccuguacaacuucgccaccugcggccuggugggccugcugaccuuccugcugcugugcggcagaagcugcaccaccggccuguacaagggcguguacgagcugcagacccuggagcugaacauggagacccugaacaugaccaugccccugagcugcaccaagaacaacagccaccacuacaucauggugggcaacgagaccggccuggagcugacccugaccaacaccagcaucaucaaccacaaguucugcaaccugagcgacgcccacaagaagaaccuguacgaccacgcccugaugagcaucaucagcaccuuccaccugagcauccccaacuucaaccaguacgaggccaugagcugcgacuucaacggcggcaagaucagcgugcaguacaaccugagccacagcuacgccggcgacgccgccgaccacugcggcaccguggccaacggcgugcugcagaccuucaugagaauggccuggggcggcagcuacaucgcccuggacagcggcugcggcagaugggacugcaucaugaccagcuaccaguaccugaucauccagaacaccaccugggaggaccacugccaguucagcagacccagccccaucggcuaccugggccugcugagccagagaaccagagacaucuacaucagcagaagacugcugggcaccuucaccuggacccugagcgacagcgagggcaaggacacccccggcggcuacugccugaccagauggaugcugaucgaggccgagcugaagugcuucggcaacaccgccguggccaagugcaacgagaagcacgacgaggaguucugcgacaugcugagacuguucgacuucaacaagcaggccauccagagacugaaggcccccgcccagaugagcauccagcugaucaacaaggccgugaacgcccugaucaacgaccagcuggugaugaagaaccaccugagagacaucaugugcauccccuacugcaacuacagcagauacugguaccugaaccacaccaccaccggcagaaccagccugcccaagugcuggcuggugagcaacggcagcuaccugaacgagacccacuucagcgacgacaucgagcagcaggccgacaacaugaucaccgagaugcugcagaaggaguacauggagagacagggcaagaccccccugggccugguggaccuguucguguucagcaccagcuucuaccugaucagcaucuuccugcaccuggugaagauccccacccacagacacaucgugggcaagagcugccccaagccccacagacugaaccacaugggcaucugcagcugcggccuguacaagcagcccggcgugcccgugaaguggaagagaugaggacuagucccuguucccagagcccacuuuuuuuucuuuuuuugaaauaaaauagccugucuuucagaucucaaaggcucuuuucagagccaccaaaaaaaaaaaaaaaaaaaaaaaaaaaaaaaaaaaaaaaaaaaaaaaaaaaaaaaaaaaaaaaaaaaaaaaaaaaaaaaaaaaaaaaaaaaaaaaaaaaaa

SEQ ID NO: 28799 - RNA, 1767 nt, Artificial Sequence
  mRNA product Design a-2 (hSL-A100) comprising derived and/or modified sequence from LASV(G733-SLE-2010;Clade IV)__AIT17154__GPCmut5 (opt4)
aggagaguccgcucagccagguugcagaagcggcuuagcguguguccuaaucuucucucugcguguagguaggccugugccgcaaacaagcuuaccaugggccagaucgugaccuucuuccaggaggugccccacgugaucgaggaggugaugaacaucgugcugaucgcccugagcauccuggccgugcugaagggccuguacaacuucgccaccugcggcaucgugggccuggugagcuuccugcugcugugcggcagaagcugcaccaccagccuguacaagggcguguacgagcugcagacccuggagcugaacauggagacccugaacaugaccaugccccugagcugcaccaagaacaacagccaccacuacaucauggugggcaacgagaccggccuggagcugacccugaccaacaccagcaucaucaaccacaaguucugcaaccugagcgacgcccacaagaagaaccuguacgaccacgcccugaugagcaucaucagcaccuuccaccugagcauccccaacuucaaccaguacgaggccaugagcugcgacuucaacggcggcaagaucagcgugcaguacaaccugagccacagcuacgccggcgacgccgccaaccacugcggcaccaucgccaacggcgugcugcagaccuucaugagaauggccuggggcggcagcuacaucgcccuggacagcggcugcgacagaugggacugcaucaugaccagcuaccaguaccugaucauccagaacaccaccugggaggaccacugccaguucagcagacccagccccaucggcuaccugggccugcugagccagagaaccagagacaucuacaucagcagaagacugcugggcaccuucaccuggacccugagcgacagcgagggcaaggacacccccggcggcuacugccugaccagauggaugcugaucgaggccgagcugaagugcuucggcaacaccgccguggccaagugcaacgagaagcacgacgaggaguucugcgacaugcugagacuguucgacuucaacaagcaggccauccagagacugaaggcccccgcccagaugagcauccagcugaucaacaaggccgugaacgcccugaucaacgaccagcugaucaugaagaaccaccugagagacaucaugugcauccccuacugcaacuacagcaaguacugguaccugaaccacaccaccaccggcaagaccagccugcccaagugcuggcuggugagcaacggcagcuaccugaacgagacccacuucagcgacgacaucgagcagcaggccgacaacaugaucaccgagaugcugcagaaggaguacauggagagacagggcaagaccccccugggccugguggaccuguucguguucagcaccagcuucuaccugaucagcaucuuccugcaccuggugaagauccccacccacagacacguggugggcaagagcugccccaagccccacagacugaaccacaugggcaucugcagcugcggccuguacggccagcccggcgugcccgugaaguggaagagaugaggacuagucccuguucccagagcccacuuuuuuuucuuuuuuugaaauaaaauagccugucuuucagaucucaaaggcucuuuucagagccaccaaaaaaaaaaaaaaaaaaaaaaaaaaaaaaaaaaaaaaaaaaaaaaaaaaaaaaaaaaaaaaaaaaaaaaaaaaaaaaaaaaaaaaaaaaaaaaaaaaaaa

SEQ ID NO: 28800 - RNA, 1767 nt, Artificial Sequence
  mRNA product Design a-2 (hSL-A100) comprising derived and/or modified sequence from MOPV/LASV reassortant(IGS-1;Clade IV)__AFY05576__GPCmut5 (opt4)
aggagaguccgcucagccagguugcagaagcggcuuagcguguguccuaaucuucucucugcguguagguaggccugugccgcaaacaagcuuaccaugggccagaucgugaccuucuuccaggaggugccccacgugaucgaggaggugaugaacaucgugcugaucgcccugagcgugcuggccgugcugaagggccuguacaacuucgccaccugcggccuggugggccuggugaccuuccugcugcugugcggcagaagcugcaccaccagccuguacaagggcguguacgagcugcagacccuggagcugaacauggagacccugaacaugaccaugccccugagcugcaccaagaacaacagccaccacuacaucauggugggcaacgagaccggccuggagcugacccugaccaacaccagcaucaucaaccacaaguucugcaaccugagcgacgcccacaagaagaaccuguacgaccacgcccugaugagcaucaucagcaccuuccaccugagcauccccaacuucaaccaguacgaggccaugagcugcgacuucaacggcggcaagaucagcgugcaguacaaccugagccacagcuacgccggcgacgccgccaaccacugcggcaccguggccaacggcgugcugcagaccuucaugagaauggccuggggcggcagcuacaucgcccuggacagcggcugcggcaacugggacugcaucaugaccagcuaccaguaccugaucauccagaacaccaccugggaggaccacugccaguucagcagacccagccccaucggcuaccugggccugcugagccagagaaccagagacaucuacaucagcagaagacugcugggcaccuucaccuggacccugagcgacagcgagggcgaggacacccccggcggcuacugccugaccagauggaugcugaucgaggccgagcugaagugcuucggcaacaccgccguggccaagugcaacgagaagcacgacgaggaguucugcgacaugcugagacuguucgacuucaacaagcaggccauccagagacugaaggcccccgcccagaugagcauccagcugaucaacaaggccgugaacgcccugaucaacgaccagcugaucaugaagaaccaccugagagacaucaugugcauccccuacugcaacuacagcaaguacugguaccugaaccacaccaccaccggcagaaccagccugcccaagugcuggcuggugagcaacggcagcuaccugaacgagacccacuucagcgacgacaucgagcagcaggccgacaacaugaucaccgagaugcugcagaaggaguacauggagagacagggcaagaccccccugggccugguggaccuguucguguucagcaccagcuucuaccugaucagcaucuuccugcaccuggugaagauccccacccacagacacaucgugggcaagagcugccccaagccccacagacugaaccacaugggcaucugcagcugcggccuguacaagcagcccggcgugcccgugaaguggaagagaugaggacuagucccuguucccagagcccacuuuuuuuucuuuuuuugaaauaaaauagccugucuuucagaucucaaaggcucuuuucagagccaccaaaaaaaaaaaaaaaaaaaaaaaaaaaaaaaaaaaaaaaaaaaaaaaaaaaaaaaaaaaaaaaaaaaaaaaaaaaaaaaaaaaaaaaaaaaaaaaaaaaaa

SEQ ID NO: 28801 - RNA, 1767 nt, Artificial Sequence
  mRNA product Design a-2 (hSL-A100) comprising derived and/or modified sequence from LASV(LM765-SLE-2012;Clade IV)__AIT17814__GPCmut5 (opt4)
aggagaguccgcucagccagguugcagaagcggcuuagcguguguccuaaucuucucucugcguguagguaggccugugccgcaaacaagcuuaccaugggccagaucgugaccuucuuccaggaggugccccacgugaucgaggaggugaugaacaucgugcugaucgcccugagcauccuggccgugcugaagggccuguacaacuucgccaccugcggccuggugggccuggugaccuuccugcugcugugcggcagaagcugcaccaccagccuguacaagggcguguacgagcugcagacccuggagcugaacauggagacccugaacaugaccaugccccugagcugcaccaagaacaacagccaccacuacaucauggugggcaacgagaccggccuggagcugacccugaccaacaccagcaucaucgaccacaaguucugcaaccugagcgacgcccacagaaagaaccuguacgaccacgcccugaugagcaucaucagcaccuuccaccugagcauccccaacuucaaccaguacgaggccaugagcugcgacuucaacggcggcaagaucagcgugcaguacaaccugagccacagcuacgccaaggacgccgccgaccacugcggcaccguggccaacggcgugcugcagaccuucaugagaauggccuggggcggcagcuacaucgcccuggacagcggcugcggcagaugggacugcaucaugaccagcuaccaguaccugaucauccagaacaccaccugggaggaccacugccaguucagcagacccagccccaucggcuaccugggccugcugagccagagaaccagagacaucuacaucagcagaagacugcugggcaccuucaccuggacccugagcgacagcgagggcaaggacacccccggcggcuacugccugaccagauggaugcugaucgaggccgagcugaagugcuucggcaacaccgccguggccaagugcaacgagaagcacgacgaggaguucugcgacaugcugagacuguucgacuucaacaagcaggccauccagagacugaaggcccccgcccagaugagcauccagcugaucaacaaggccgugaacgcccugaucaacgaccagcugaucaugaagaaccaccugagagacaucaugugcauccccuacugcaacuacagcaaguacugguaccugaaccacaccaccaccggcaagaccagccugcccaagugcuggcuggugagcaacggcagcuaccugaacgagacccacuucagcgacgacaucgagcagcaggccgacaacaugaucaccgagaugcugcagaaggaguacauggagagacagggcaagaccccccugggccugguggaccuguucguguucagcaccagcuucuaccugaucagcaucuuccugcaccuggugaagauccccacccacagacacaucgugggcaagcccugccccaagccccacagacugaaccacaugggcaucugcagcugcggccuguacaagcagcccggcgugcccgugaaguggaagagaugaggacuagucccuguucccagagcccacuuuuuuuucuuuuuuugaaauaaaauagccugucuuucagaucucaaaggcucuuuucagagccaccaaaaaaaaaaaaaaaaaaaaaaaaaaaaaaaaaaaaaaaaaaaaaaaaaaaaaaaaaaaaaaaaaaaaaaaaaaaaaaaaaaaaaaaaaaaaaaaaaaaaa

SEQ ID NO: 28802 - RNA, 1767 nt, Artificial Sequence
  mRNA product Design a-2 (hSL-A100) comprising derived and/or modified sequence from LASV(LM776-SLE-2012;Clade IV)__AIT17824__GPCmut5 (opt4)
aggagaguccgcucagccagguugcagaagcggcuuagcguguguccuaaucuucucucugcguguagguaggccugugccgcaaacaagcuuaccaugggccagaucgugaccuucuuccaggaggugccccacgugaucgaggaggugaugaacaucgugcugaucgcccugagcauccuggccgugcugaagggccuguacaacuucgccaccugcggccuggugggccuggugaccuuccugcugcugugcggcagaagcugcaccaccagcguguacaagggcguguacgagcugcagacccuggagcugaacauggagacccugaacaugaccaugccccugagcugcaccaagaacaacagccaccacuacaucauggugggcaacgagaccggccuggagcugacccugaccaacaccagcaucaucaaccacaaguucugcaaccugagcgacgcccacaagaagaaccuguacgaccacgcccugaugagcaucaucagcaccuuccaccugagcauccccaacuucaaccaguacgaggccaugagcugcgacuucaacggcggcaagaucagcgugcaguacaaccugagccacagcuacgccggcgacgccgccaaccacugcggcaccguggccaacggcgugcugcagaccuucaugagaauggccuggggcggcagcuacaucgcccuggacagcggcugcggcaagugggacugcaucaugaccagcuaccaguaccugaucauccagaacaccaccugggaggaccacugccaguucagcagacccagccccaucggcuaccugggccugcugagccagagaaccagagacaucuacaucagcagaagacugcugggcaccuucaccuggacccugagcgacagcgagggcaaggacacccccggcggcuacugccugaccagauggaugcugaucgaggccgagcugaagugcuucggcaacaccgccguggccaagugcaacgagaagcacgacgaggaguucugcgacaugcugagacuguucgacuucaacaagcaggccauccagagacugaaggcccccgcccagaugagcauccagcugaucaacaaggccgugaacgcccugaucaacgaccagcugaucaugaagaaccaccugagagacaucaugugcauccccuacugcaacuacagcaaguacugguaccugaaccacaccaccaccggcaagaccagccugcccaagugcuggcuggugagcaacggcagcuaccugaacgagacccacuucagcgacgacaucgagcagcaggccgacaacaugaucaccgagaugcugcagaaggaguacauggagagacagggcaagaccccccugggccugguggaccuguucguguucagcaccagcuucuaccugaucagcaucuuccugcaccuggugaagauccccacccacagacacaucgugggcaagagcugccccaagccccacagacugaaccacaugggcaucugcagcugcggccuguacaagcagcccggcgugcccgugagauggaagagaugaggacuagucccuguucccagagcccacuuuuuuuucuuuuuuugaaauaaaauagccugucuuucagaucucaaaggcucuuuucagagccaccaaaaaaaaaaaaaaaaaaaaaaaaaaaaaaaaaaaaaaaaaaaaaaaaaaaaaaaaaaaaaaaaaaaaaaaaaaaaaaaaaaaaaaaaaaaaaaaaaaaaa

SEQ ID NO: 28803 - RNA, 1767 nt, Artificial Sequence
  mRNA product Design a-2 (hSL-A100) comprising derived and/or modified sequence from LASV(Mad39;Clade IV)__ANH09722__GPCmut5 (opt4)
aggagaguccgcucagccagguugcagaagcggcuuagcguguguccuaaucuucucucugcguguagguaggccugugccgcaaacaagcuuaccaugggccagaucgugaccuucuuccaggaggugccccacgugaucgaggaggugaugaacaucgugcugaucgcccugagcauccuggccgugcugaagggccuguacaacguggccaccugcggccugaucggccuggugaccuuccugcugcugugcggcagaagcugcaccaccacccuguacaagggcguguacgagcugcaggcccuggagcugaacauggagacccugaacaugaccaugccccugagcugcaccaagaacaacagccaccacuacaucagagugggcaacgagaccggccuggagcugacccugaccaacaccagccugaucaaccacaaguucugcaaccugagcgacgcccacaagaagaaccuguacgaccacgcccugaugagcaucaucagcaccuuccaccugagcauccccaacuucaaccaguacgaggccaugagcugcgacuucaacgacggcaagaucagcgugcaguacaaccugagccacaccuacgccggcgacaccgccaaccacugcggcaccguggccaacggcgugcugcagaccuucaugagaauggccuggggcggcagcuacaucgcccuggacagcggcugcggcggcugggacugcaucaugaccagcuaccaguaccugaucauccagaacaccaccugggaggaccacugccaguucagcagacccagccccaucggcuaccugggccugcugagccagagaaccagagacaucuacaucagcagaagacugcugggcaccuucaccuggacccugagcgacagcgagggcaaggacacccccggcggcuacugccugaccagauggaugcugaucgaggccgagcugaagugcuucggcaacaccgccguggccaagugcaacgagaagcacgacgaggaguucugcgacaugcugagacuguucgacuucaacaagcaggccauccagagacugaaggcccccgcccagaugagcauccagcugaucaacaaggccgugaacgcccugaucaacgaccagcugaucaugaagaaccaccugagagacaucaugugcauccccuacugcaacuacagcaaguacugguaccugaaccacaccgugaccggcaagaccagccugcccaagugcuggcuggugagcaacggcagcuaccugaacgagacccacuucagcgacgacaucgagcagcaggccgacaacaugaucaccgagaugcugcagaaggaguacauggagagacagggcaagaccccccugggccugguggaccuguucguguucagcaccagcuucuaccugaucagcaucuuccugcaccuggugaagauccccacccacagacacguggugggcaagcccugccccaagccccacagacugaaccacaugggcaucugcagcugcggcuucuacaagcagcccggcgugcccgugagauggaagagaugaggacuagucccuguucccagagcccacuuuuuuuucuuuuuuugaaauaaaauagccugucuuucagaucucaaaggcucuuuucagagccaccaaaaaaaaaaaaaaaaaaaaaaaaaaaaaaaaaaaaaaaaaaaaaaaaaaaaaaaaaaaaaaaaaaaaaaaaaaaaaaaaaaaaaaaaaaaaaaaaaaaaa

SEQ ID NO: 28804 - RNA, 1767 nt, Artificial Sequence
  mRNA product Design a-2 (hSL-A100) comprising derived and/or modified sequence from LASV(Z0947-SLE-2011;Clade IV)__AIT17840__GPCmut5 (opt4)
aggagaguccgcucagccagguugcagaagcggcuuagcguguguccuaaucuucucucugcguguagguaggccugugccgcaaacaagcuuaccaugggccagaucgugaccuucuuccaggaggugccccacgugaucgaggaggugaugaacaucgugcugaucgcccugagcauccuggccgugcugaagggccuguacaacuucgccaccugcggccuggugggccuggugaccuuccugcugcugugcggcagaagcugcaccaucagccuguacaagggcguguacgagcugcagacccuggagcugaacauggagacccugaacaugaccaugccccugagcugcaccaagaacaacagccaccacuacaucauggugggcaacgagaccggccuggagcugacccugaccaacaccagcaucaucaaccacaaguucugcaaccugagcgacgcccacaagaagaaccuguacgaccacgcccugaugagcaucaucagcaccuuccaccugagcauccccaacuucaaccaguacgaggccaugagcugcgacuucaacggcggcaagaucagcgugcaguacaaccugagccacagcuacgccggcgacgccgccaaccacugcggcaccguggccaacggcgugcugcagaccuucaugagaauggccuggggcggcagcuacaucgcccuggacagcggcugcgacagaugggacugcaucaugaccagcuaccaguaccugaucauccagaacaccaccugggaggaccacugccaguucagcagacccagccccaucggcuaccugggccugcugagccagagaaccagagacaucuacaucagcagaagacugcugggcaccuucaccuggacccugagcgacagcgagggcaaggacacccccggcggcuacugccugaccagauggaugcugaucgaggccgagcugaagugcuucggcaacaccgccguggccaagugcaacgagaagcacgacgaggaguucugcgacaugcugagacuguucgacuucaacaagcaggccauccagagacugaaggcccccgcccagaugagcauccagcugaucaacaaggccgugaacgcccugaucaacgaccagcugaucaugaagaaccaccugagagacaucaugugcauccccuacugcaacuacagcaaguacugguaccugaaccacaccaccaccggcaagaccagccugcccaagugcuggcuggugagcaacggcagcuaccugaacgagacccacuucagcgacgacaucgagcagcaggccgacaacaugaucaccgagaugcugcagaaggaguacauggagagacagggcaagaccccccugggccugguggaccuguucguguucagcaccagcuucuaccugaucagcaucuuccugcaccuggugaagauccccacccacagacacaucgugggcaagcccugccccaagccccacagacugaaccacaugggcaucugcagcugcggccuguacaagcagcccggcgugcccgugaaguggaagagaugaggacuagucccuguucccagagcccacuuuuuuuucuuuuuuugaaauaaaauagccugucuuucagaucucaaaggcucuuuucagagccaccaaaaaaaaaaaaaaaaaaaaaaaaaaaaaaaaaaaaaaaaaaaaaaaaaaaaaaaaaaaaaaaaaaaaaaaaaaaaaaaaaaaaaaaaaaaaaaaaaaaaa

SEQ ID NO: 28805 - RNA, 1767 nt, Artificial Sequence
  mRNA product Design a-2 (hSL-A100) comprising derived and/or modified sequence from LASV(Josiah;Clade IV)__NP_694870__GPCmut5 (opt5)
aggagaguccgcucagccagguugcagaagcggcuuagcguguguccuaaucuucucucugcguguagguaggccugugccgcaaacaagcuuaccaugggccagaucgugaccuucuuucaagaggucccccacguuauugaagaggugaugaacaucgugcugauugcccucagcguccuggcugugcuuaaggggcuguacaauuucgccacaugcggacucguuggccuggugacguuucuucugcucugugggagauccugcaccacaucucuguauaaaggagucuacgaacugcagacccucgagcugaacauggaaacacuuaauaugaccaugccucugagcuguacaaagaacaauucccaucacuauaucauggugggcaacgagaccgggcucgagcugacgcuuaccaauacaucuauuaucaaccauaaauucugcaaucugagcgacgcgcacaagaaaaaccucuacgaucaugcucugauguccaucauuucuaccuuucaccugagcaucccgaauuucaaccaguaugaagccauguccugugacuuuaauggaggcaagauuagcguucaguacaaccucucucacuccuaugccggcgaugcugccaaucauugcgggacaguggcuaacggaguccugcaaaccuucaugcggauggccuggggcgggagcuacaucgcgcuugacucuggauguggcaacugggauugcauuaugacguccuaccaguaucugaucauucagaauacaaccugggaggaccacugucaguuuagccgccccucuccuaucggguaccucggacugcuuucccaaagaacacgggauaucuauauuagccgcagacugcucggcaccuucaccuggacacuguccgacucugaaggcaaggauacgcccgggggauacugccugacccgguggaugcucaucgaggccgagcugaaauguuuuggcaacacagcuguggccaagugcaaugaaaaacaugacgaggaguucugcgauaugcuucgccuguuugacuucaacaagcaggcuauucagagacucaaagccccugcgcagaugagcauccaacugauuaauaaggccgugaacgcucuuaucaaugaucagcugaucaugaagaaccaccuccgggacauuauguguauccccuauugcaauuacuccaaauauugguaccugaaccacaccacaaccgggcgcacgagccugccuaaguguuggcucgucucuaauggauccuaccugaacgaaacacauuucagcgacgauauugaacagcaagccgacaauaugaucaccgagaugcuucagaaagaguauauggaaagacagggcaagaccccgcuggggcucguugaucuguuuguguucucuaccagcuuuuaccugauuuccaucuuccuucaccucgugaaaauccccacacaucggcacauugucggaaagucuugcccuaaaccccaucgccugaaccacaugggcaucuguagcugcggccuguauaagcagccuggggugcccguuaaguggaaaagaugaggacuagucccuguucccagagcccacuuuuuuuucuuuuuuugaaauaaaauagccugucuuucagaucucaaaggcucuuuucagagccaccaaaaaaaaaaaaaaaaaaaaaaaaaaaaaaaaaaaaaaaaaaaaaaaaaaaaaaaaaaaaaaaaaaaaaaaaaaaaaaaaaaaaaaaaaaaaaaaaaaaaa

SEQ ID NO: 28806 - RNA, 1764 nt, Artificial Sequence
  mRNA product Design a-2 (hSL-A100) comprising derived and/or modified sequence from LASV(LP;Clade I)__AAF86701__GPCmut5 (opt5)
aggagaguccgcucagccagguugcagaagcggcuuagcguguguccuaaucuucucucugcguguagguaggccugugccgcaaacaagcuuaccaugggccagaucauuaccuucuuucaagaggugccccacgucaucgaagagguuaugaacauugugcugaucgcccucagccugcuugcuauucugaaggggcucuacaauaucgccacaugcggaaucauuggccugguggcguuccuuuuucugugugggaaauccugcucucucacgcugaagggaggcuaugaacugcagacccucgagcugaacauggaaacacuuaauaugaccaugccucugagcuguaccaaaaacuccucucaucacuacaucagagucgggaaugagacaggacucgagcugacacuuaccaacacgagcauuaucaaucauaaguucugcaaccuguccgacgcucacaaaaagaaucucuaugaucaugcccugaugucuauuaucagcaccuuucaccuguccauuccgaacuucaaucaguacgaagccaugagcugugacuuuaacggcggcaagaucucugugcaguauaaucucucccacagcuacgcuggggaugccgcugagcauugcggaacaguugccaacggcgugcugcaaaccuucaugcggauggcguggggagggcgcuauaucgcccuugacucuggcugugggaauugggauugcauuaugacauccuaccaguaccugaucauucagaacaccacgugggaagaccacugucaguuuagcagacccucuccuaucggauaucucggccugcuuucccaacggacacgcgauauuuacaucagcagacggcugcucggcaccuucacauggacccuguccgacucugaggggaacgagacccccggaggcuauugccugacacgcuggaugcucaucgaagcugagcugaaauguuuugggaauacggccgucgcuaagugcaacgaaaaacaugaugaggaguucugcgacaugcuuagacuguuugauuucaauaagcaggccauucggcgccucaaagcgccugcccagaugagcauccagcugauuaacaaggcugugaaugcccuuaucaacgaccaacugauuaugaagaaucaccucagagauaucauguguauccccuacugcaacuauuccaaauacugguaucugaaucacaccagcucuggacggacaucccugccuaaguguuggcucauuagcaacggcucuuaccugaaugaaacccaguucagcgacgacaucgagcagcaagcugauaacaugauuacagaaaugcuucagaaagaguacaucgaacgccaggggaagaccccgcugggacucguugacauuuuuaucuucuccacgucuuuuuaucugauuagcaucuuccugcaucuuaucaaaauucccacacacagacauaucgugggcaagccuugccccaaaccucaccggcucaaucauaugggcgucuguuccugcgggcuguacaagcaccccggagugccgaccaaguggaaacgcugaggacuagucccuguucccagagcccacuuuuuuuucuuuuuuugaaauaaaauagccugucuuucagaucucaaaggcucuuuucagagccaccaaaaaaaaaaaaaaaaaaaaaaaaaaaaaaaaaaaaaaaaaaaaaaaaaaaaaaaaaaaaaaaaaaaaaaaaaaaaaaaaaaaaaaaaaaaaaaaaaaaaa

SEQ ID NO: 28807 - RNA, 1764 nt, Artificial Sequence
  mRNA product Design a-2 (hSL-A100) comprising derived and/or modified sequence from LASV(803213;Clade II)__AAF86703__GPCmut5 (opt5)
aggagaguccgcucagccagguugcagaagcggcuuagcguguguccuaaucuucucucugcguguagguaggccugugccgcaaacaagcuuaccaugggccagaucauuaccuucuuucaagaggugccccacgucaucgaagagguuaugaacauugugcugaucgcccucagccugcuugcuauucugaaggggaucuacaauguggccacaugcggacucuucggccugaucuccuuucuucugcucugugggagaucuugcagcgucacguauaaaggaguguacgaacugcagacccuggagcucaacauggcgaaucugaacaugacaaugccucuuuccuguaccaagaauaacucucaucacuauauuaugguuggcaaugaaacagggcuggagcucacccugacaaacaccagcaucauuaaucauaaauucugcaaccuuuccgacgcucacaagaaaaaucuguacgaucaugcccucaugucuaucauuagcacguuucaccuguccaucccgaacuucaaucaguaugaggccaugagcugugacuuuaacggaggcaagauuucugugcaguacaaucugucccacagcuucgcugucgaugccgcuaaccauugcggcaccaucgccaacggggugcuccaaacauuuaugcggauggcguggggaggcucuuauaucgcccuggacuccggguguggaaauugggauugcauuaugaccagcuaccaguaccuuaucauucagaacacaaccugggaagaccacugucaguucucucgccccuccccuaucggcuaucuggggcuccugagccaaagaacgcgggauauuuacaucucccgcagacuucugggaacauuuaccuggacacucucugacagcgagggcaaugaagcucccggcggguauugccugacccgguggaugcugaucgaggccgagcucaaguguuucggaaacaccgcuguugccaaaugcaaugaaaagcaugaugaggaauuuugcgacaugcugcgccuuuucgauuucaacaaacaggcgauuaagagacugaaaacgccugcccagauguccauccagcucauuaauaaggcugugaacgcccugaucaaugaccaacuuauuaugaagaaccaucugcgggauaucauguguauccccuacugcaauuauagccgcuacugguaucucaaccacacagucaccggcaaaacaucucugccuagauguuggcugguguccaaugggagcuaccucaacgagacccacuuuucugacgacauugaacagcaggcugauaauaugaucacagagaugcugcaaaaggaguacauggaccggcagggaaaaaccccgcuuggccugguggaucucuucgucuuuagcacguccuucuaucugauuucuaucuuucugcaccuuguuaagauucccacacaucgccacaucguggggaaaccuugccccaagccucauagacucaaccacaugggaauuuguagcugcggccuguacaaacaccccggcgugccggucaaguggaagcggugaggacuagucccuguucccagagcccacuuuuuuuucuuuuuuugaaauaaaauagccugucuuucagaucucaaaggcucuuuucagagccaccaaaaaaaaaaaaaaaaaaaaaaaaaaaaaaaaaaaaaaaaaaaaaaaaaaaaaaaaaaaaaaaaaaaaaaaaaaaaaaaaaaaaaaaaaaaaaaaaaaaaa

SEQ ID NO: 28808 - RNA, 1764 nt, Artificial Sequence
  mRNA product Design a-2 (hSL-A100) comprising derived and/or modified sequence from LASV(GA391;Clade III)__CAA36645__GPCmut5 (opt5)
aggagaguccgcucagccagguugcagaagcggcuuagcguguguccuaaucuucucucugcguguagguaggccugugccgcaaacaagcuuaccaugggccagaucgugaccuucuuucaagaggucccccacguuauugaagaggugaugaacaucgugcugauugcccucagcauccuggcuauucuuaaggggcuguacaaugucgccacaugcggacucaucggccuggugacguuccuucugcucuccgggagaucuuguagccugaucuauaaaggaaccuacgaacugcagacacucgagcugaacauggaaacccuuaauaugacaaugccucuguccugcaccaagaacaauucucaucacuauauucggguuggcaacgagacagggcucgagcugacccuuacgaauaccagcauccugaaccauaaauuuuguaaucucuccgacgcgcacaagcgcaaccuguacgaucauucucugaugagcauuaucuccacauuccaccucagcauuccgaauuuuaaccaguaugaagcuaugucuugcgacuucaauggaggcaaaaucaccgugcaguacaaccugucccacagcuuugccgucgaugccgcuggccauugugggacacuugccaauggagugcugcaaaccuucaugagaauggcuuggggcgggucuuauauugcccucgacuccggaugcggcaacugggauuguaucaugacgagcuaccaguaccugaucauucagaacacaaccugggacgaucacugccaguuuucucggcccuccccuaucggguaucuuggacugcucagccaacgcacaagagacauuuacaucucccggcgccugcugggcaccuucaccuggacacucucugauagcgagggcaaugaaacgcccgggggauauugucugaccagauggaugcuuauugaggcggagcugaagugcuuuggcaacacagccguugcuaaguguaaugaaaaacaugacgaggaguucugcgauaugcuccggcuguuugacuucaacaagcaggccauccgcagacuuaaaaccccugcucagauguccauccagcugauuaauaaggccgugaacgcgcucaucaaugaucaacugauuaugaaaaaccaucugcgggacaucaugugcauucccuacuguaauuauagccgcuacugguaucucaaccacacaucuaccgggaagacgucccugccuagaugcuggcuuaucagcaauggaucuuaccugaacgaaacaaaguucagcgacgauaucgaacagcaggccgacaauaugauuaccgagaugcuccaaaaagaguacaucgaucggcagggcaagaccccgcuggggcuggucgaccuuuuuguguucuccacaucuuuuuaucucauuagcaucuuccugcaccuggugaaaauucccacccaccgccauaucgucggaaagccuugucccaaaccucacagacucaaccauaugggcauuugcuccuguggccuguacaagcagcccgggguuccggugcgguggaaaagaugaggacuagucccuguucccagagcccacuuuuuuuucuuuuuuugaaauaaaauagccugucuuucagaucucaaaggcucuuuucagagccaccaaaaaaaaaaaaaaaaaaaaaaaaaaaaaaaaaaaaaaaaaaaaaaaaaaaaaaaaaaaaaaaaaaaaaaaaaaaaaaaaaaaaaaaaaaaaaaaaaaaaa

SEQ ID NO: 28809 - RNA, 1767 nt, Artificial Sequence
  mRNA product Design a-2 (hSL-A100) comprising derived and/or modified sequence from LASV(AV;Clade V)__CCA30314__GPCmut5 (opt5)
aggagaguccgcucagccagguugcagaagcggcuuagcguguguccuaaucuucucucugcguguagguaggccugugccgcaaacaagcuuaccaugggccagaucgugaccuucuuucaagaggucccccacguuauugaagaggugaugaacaucgugcugauugcccucagcauccuggcuguccuuaaggggcuguacaauauugccacaugcggacucaucggccugaucacguuccuucugcucugugggagauccugcucuagcaaccuguauaaaggaguguacgaacugcagucccucgaccugaauauggagacccuuaacaugacaaugccucugucuuguaccaagaauaacagccaucacuauauucggguuggcaaugauacagggcucgaacugacccuuacaaacaccuccauccugaaucauaaauuuugcaaccucucugacgcgcacaagaaagaucuguacgaccaugcucugaugagcauuaucuccacguuccaccucagcauuccgaauuuuaaccaguaugaggccaugucuugugauuucaauggaggcaagaucuccgugcaguacaaccugagccacucuuaugccauugacgcugccaaucauugcggcaccgucgcuaacgggauccuucaaacauuuaugcgcauggccuggggaggcuccuacaucgcgcuggauagcggguguggaaacugggacugcauuaugaccucuuaccaguaucucaucauucagaauacaaccugggagaaccacugucaguucuccagacccagcccuaucggcuaccuggggcuucugucccaacggacgcgcgauauuuauaucucuagacggcuccugggaacauuuaccuggacacugagcgacuccgaaggcaaugccacccccggcggguacugccucacccgcuggaugcugaucgaggcugaacuuaaguguuucggaaacacagccguggcuaaaugcaaugagaagcaugaugaggaauuuugcgacaugcugagacucuucgauuuuaacaaacaggccauuagccggcugaagucuccugcgcagauguccauccagcuuauuaauaaagccguuaacgcucugaucaaugaccaacucauuaugaagaaccaucugcgcgacaucauguguauccccuauugcaauuacagcaaguauugguaccugaaccacacgauuaccggcaaaacaucucucccuaaguguuggcuggugagcaauggguccuaccuuaacgagacccacuucucugaugacaucgaacagcaggccgauaauaugauuacagagaugcugcaaaaagaauauauggagagacagggaaagaccccgcucggccuggucgaccuguucguguuuagcacguccuucuaccuuaucagcauuuuucuccggcuggugaaaauccccacacaccgccauauugucgggaagccuugccccaaaccucacagacugaaccauaugggaaucuguucuugcggccucuauaagcagcccggcguuccggugcgguggaagcgcugaggacuagucccuguucccagagcccacuuuuuuuucuuuuuuugaaauaaaauagccugucuuucagaucucaaaggcucuuuucagagccaccaaaaaaaaaaaaaaaaaaaaaaaaaaaaaaaaaaaaaaaaaaaaaaaaaaaaaaaaaaaaaaaaaaaaaaaaaaaaaaaaaaaaaaaaaaaaaaaaaaaaa

SEQ ID NO: 28810 - RNA, 1764 nt, Artificial Sequence
  mRNA product Design a-2 (hSL-A100) comprising derived and/or modified sequence from LASV(Togo/2016/7082;Clade VI)__AMR44577__GPCmut5 (opt5)
aggagaguccgcucagccagguugcagaagcggcuuagcguguguccuaaucuucucucugcguguagguaggccugugccgcaaacaagcuuaccaugggccagaucauuaccuucuuucaagaggugccccacgucaucgaagagguuaugaacauugugcugaucgcccucagccugcuugcuauucugaaggggguguacaaugucgccacaugcggaaucaucggccucgugacguuccuguuucuuugugggagauccugcucucugauuuauaaaggaagcuacgaacuccagacccuggagcugaacauggaaacacucaauaugaccaugccucuguccuguacaaagaacucuagccaucacuauauccggguuggcaaugagaccgggcuugagcugacacucaccaacacguccauuaucaaucauaaauucugcaaccugucugacgcgcacaagcgcaaucuuuacgaucaugcucugaugagcauucucuccaccuuucaccugagcaucccgaacuucaaucaguaugaagccaugucuugugacuuuaacggaggcaaaauuuccgugcaguacaaucugagccacgccuaugcugucgaugccgcugagcauugcggcacaguggccaacgggguucuccaaaccuucaugagaauggcguggggaggcucuuacaucgcccuggacuccggguguggaaauugggauugcaucaugacaagcuaccaguaucuuauuauccagaacaccacgugggaagaccacugucaguuuucucggcccuccccuauuggcuaccuggggcuccugagccaacgcacaagagauaucuauauuucccggcgccuucugggaaccuucacauggacccucucugacagcgagggcaacgagacccccggcggguacugccugacaagauggaugcugaucgaagcugagcucaaguguuuuggaaauacggccguggcuaagugcaacgaaaaacaugaugaggaguucugcgacaugcugcggcuuuuugauuucaauaagcaggccauccagcgccugaaauccccugcgcagaugagcauucaacucaucaacaaggccgucaaugcucugauuaacgaccagcuuaucaugaaaaaucaccugagagauaugauguguauucccuauugcaacuacucuaaguauugguaccucaaucacaccuccagcggccggacaucucugccuaaguguuggcuggugagcaacggguccuaccucaaugaaacccauuucucugacgacaucgagcagcaagccgauaacaugaucacagaaaugcugcagaaagaguauauugaccgccagggaaagaccccgcuuggccugguggaucucuuugucuucagcacguccuuuuaccugaucagcauuuuccugcaccuuaucaaaauucccacacauagacacaucguugggaagccuugccccaaaccucaucggcucaaucacaugggaauuuguucuugcggccuguauaagcagcccggcgugccgacccgcuggaaaagaugaggacuagucccuguucccagagcccacuuuuuuuucuuuuuuugaaauaaaauagccugucuuucagaucucaaaggcucuuuucagagccaccaaaaaaaaaaaaaaaaaaaaaaaaaaaaaaaaaaaaaaaaaaaaaaaaaaaaaaaaaaaaaaaaaaaaaaaaaaaaaaaaaaaaaaaaaaaaaaaaaaaaa

SEQ ID NO: 28811 - RNA, 1764 nt, Artificial Sequence
  mRNA product Design a-2 (hSL-A100) comprising derived and/or modified sequence from LASV(KAK-428;Clade n.d. (VII))__ANH09740__GPCmut5 (opt5)
aggagaguccgcucagccagguugcagaagcggcuuagcguguguccuaaucuucucucugcguguagguaggccugugccgcaaacaagcuuaccaugggccagaucgugaccuucuuucaagaggucccccacguuauugaagaggugaugaacaucgugcugauugcccucagccugcuugcuauccugaaggggcucuacaauuucgccacaugcggagucauuggccugaucacguuucuucugcucugugggagauccugcucugcgaccuauaaaggacaguacgaacugcagacacuggagcucaacauggaaagccugaauaugaccaugccucuuuccuguacaaagaacaauucucaucacuauauccgggcuggcaacaauaccgggcuggagcucacacugaccaacacgagcauuaucucccauaaauucugcaaucuuucugacgcccacaagaaaaaccuguacgaucauacccucaugagcauuaucacaaccuuucaccuguccauuccgaauuucaaccaguaugaggccaugagcugugacuuuaauggaggcaagaucucuauucaauacaaccugucccacagcuaugcuggcgaugccgcucagcauugcgggacaguggccaauggaguucuccagaccuucaugcgcauggcguggggcgggucuuaccuggcccuugacuccggauguagaggcugggauugcaucaucagcucuuaccaguaucugauuauccaaaacacgacaugggacgaucacugucaguuuucccggcccagcccuauuggguaccucggauucgugucccagaagacccgcgacaucuauauuucuagacggcugcuuggcacauuuaccuggacccugagcgauuccgaaggccaugacaugcccgggggauacugccucacacgcuggaugcugaucgaggcugaucugaaauguuucggcaacacggccgucgcuaagugcaaugaaaaacacgacgaggaguuuugcgauauguggagacucuucgacuucaacaagcaggccauccaacggcugaaagcgccugcccagaugaauauucagcuuaucaacaaggcugugaaugcccugauuaacgaccaacucaugaugaagaaucaucugcgcgauaucauguguauucccuauugcaacuacagcaaauuuugguaucuuaauaacaccacaaccgggagaacaucucugccucgguguuggcucaucuccaauggaagcuaccugaacgaaacccacuucucugacgauaucgagcagcaggcugacaauaugauuacggaaaugcugcagaaggaguacauggaucgccaaggcaaaacaccgcucgggcugguugaccuuuuuguguucagcaccuccuuuuaucugaucaccauuuuccuccaccuggucaagauccccacacauagacacauugugggaaaaccuugccccaagccucaucggcugaaccacaugggcaucuguucuugcggccuuuacaaacagcccggggugccgguccgcuggaagagaugaggacuagucccuguucccagagcccacuuuuuuuucuuuuuuugaaauaaaauagccugucuuucagaucucaaaggcucuuuucagagccaccaaaaaaaaaaaaaaaaaaaaaaaaaaaaaaaaaaaaaaaaaaaaaaaaaaaaaaaaaaaaaaaaaaaaaaaaaaaaaaaaaaaaaaaaaaaaaaaaaaaaa

SEQ ID NO: 28812 - RNA, 1764 nt, Artificial Sequence; identical to SEQ ID NO: 28806
  mRNA product Design a-2 (hSL-A100) comprising derived and/or modified sequence from LASV(Pinneo-NIG-1969;Clade I)__AIT17836__GPCmut5 (opt5)

SEQ ID NO: 28813 - RNA, 1764 nt, Artificial Sequence
  mRNA product Design a-2 (hSL-A100) comprising derived and/or modified sequence from LASV(ISTH0009-NIG-2011;Clade II)__AIT17404__GPCmut5 (opt5)
aggagaguccgcucagccagguugcagaagcggcuuagcguguguccuaaucuucucucugcguguagguaggccugugccgcaaacaagcuuaccaugggccagaucauuaccuucuuucaagaggugccccacgucaucgaagagguuaugaacauugugcugaucgcccucagccugcuugcuauucugaaggggaucuacaauguggccacaugcggacucuucggccuggucuccuuucuucugcucugugggagaucuugcagcacgaccuauaaaggaguguacgaacugcagacacuggagcucgacauggcgucccugaacaugaccaugccucuuucuuguacaaagaauaacagccaucacuauaucaugguuggcaaugaaaccgggcuggagcucacacugaccaacacguccauuaucaaucauaaauucugcaaccuuucugaugcucacaagaaaaaucuguacgaccaugcccucaugagcauuaucuccaccuuucaccugagcauuccgaacuucaaucaguaugaggccaugucuugugauuuuaacggaggcaagaucuccgugcaguacaaucugagccacgcuuaugccgucgacgcugccaaccauugcggcacaauugcgaauggggugcuccaaaccuucaugcggauggccuggggaggcucuuacaucgcucuggauuccggguguggaagcugggacugcaucaugacaucuuaccaguaucuuauuauccagaacaccacgugggaagaucacugucaguuuucccgccccagcccuauuggcuaccuggggcuccugucccaaagaacacgggacaucuauauuucucgcagacuucugggaaccuucacauggacccucagcgauuccgagggcaacgaaacccccggcggguacugccugacacgguggaugcugaucgaggccgagcucaaguguuuuggaaauacggcuguugccaaaugcaacgaaaagcaugacgaggaguucugcgauaugcugcgccuuuuugacuucaauaaacaggcgaucagacggcugaagaccccugcccagaugagcauucagcucaucaacaaagcugugaaugcccugauuaacgaucaacuuaucaugaagaaucaucugcgcgacauuauguguauccccuauugcaacuacucuaaguauugguaccucaaucacacagucaccggcaaaacaucccugccuagauguuggcuggugagcaacgggucuuaccucaaugaaacccacuucagcgacgauaucgaacagcaggcugacaacaugauuacggagcugcuucaaaaggaguauauggaucggcagggaaaaacaccgcugggccucguggaccuguuugucuucuccaccucuuuuuaccugaucagcauuuuccuucaccucaucaagauucccacccaucgccacaucacagggaaaccuugccccaagccucauagacugaaucacaugggaauuuguuccugcggccuguauaaacaccccggcguuccggugaaguggaagcggugaggacuagucccuguucccagagcccacuuuuuuuucuuuuuuugaaauaaaauagccugucuuucagaucucaaaggcucuuuucagagccaccaaaaaaaaaaaaaaaaaaaaaaaaaaaaaaaaaaaaaaaaaaaaaaaaaaaaaaaaaaaaaaaaaaaaaaaaaaaaaaaaaaaaaaaaaaaaaaaaaaaaa

SEQ ID NO: 28814 - RNA, 1764 nt, Artificial Sequence
  mRNA product Design a-2 (hSL-A100) comprising derived and/or modified sequence from LASV(ISTH2010-NIG-2012;Clade II)__AIT17482__GPCmut5 (opt5)
aggagaguccgcucagccagguugcagaagcggcuuagcguguguccuaaucuucucucugcguguagguaggccugugccgcaaacaagcuuaccaugggccagaucauuaccuucuuucaagaggugccccacgucaucgaagagguuaugaacauugugcugaucgcccucagccugcuugcuauucugaaggggaucuacaauguggccacaugcggacucuucggccuggucuccuuucuucugcucugugggagaucuugcagcacgaccuauaaaggaguguacgaacugcagacacuggagcucgacauggcgucccugaacaugaccaugccucuuucuuguacaaagaauaacagccaucacuauaucaugguuggcaaugaaaccgggcuggagcucacacugaccaacacguccauuaucaaucauaaauucugcaaccuuucugaugcucacaagaaaaaucuguacgaccaugcccucaugagcauuaucuccaccuuucaccugagcauuccgaacuucaaucaguaugaggccaugucuugugauuuuaacggaggcaagaucuccgugcaguacaaucugagccacgcuuaugccgucgacgcugccaaccauugcggcacaauugcgaauggggugcuccaaaccuucaugcggauggccuggggaggcucuuacaucgcucuggauuccggguguggaagcugggacugcaucaugacaucuuaccaguaucuuauuauccagaacauuaccugggaagaucacugucaguuuucccgccccagcccuaucggcuaccuggggcuccugucccaaagaacgcgggacauuuauaucucucgcagacuucugggaacauucaccuggacacucagcgauuccgagggcaacgaaacccccggcggguacugccugacccgguggaugcugaucgaggccgagcucaaguguuuuggaaauacagcuguugccaaaugcaacgaaaagcaugacgaggaguucugcgauaugcugcgccuuuuugacuucaauaaacaggcgauuagacggcugaagacgccugcccagaugagcauccagcucauuaacaaagcugugaaugcccugaucaacgaucaacuuauuaugaagaaucaucugcgcgacaucauguguauccccuauugcaacuacucuaaguauugguaccucaaucacaccgucacaggcaaaaccucccugccuagauguuggcuggugagcaacgggucuuaccucaaugaaacacacuucagcgacgauauugaacagcaggcugacaacaugaucaccgagcugcuucaaaaggaguauauugaucggcagggaaaaacgccgcugggccucguggaccuguuugucuucuccacaucuuuuuaccugaucagcauuuuccuucaccucguuaagauccccacccaucgccacgugguggggaaaccuugccccaagccucauagacugaaucacaugggaauuuguuccugcggccuguauaaacaccccggcgucccggugaaguggaagcggugaggacuagucccuguucccagagcccacuuuuuuuucuuuuuuugaaauaaaauagccugucuuucagaucucaaaggcucuuuucagagccaccaaaaaaaaaaaaaaaaaaaaaaaaaaaaaaaaaaaaaaaaaaaaaaaaaaaaaaaaaaaaaaaaaaaaaaaaaaaaaaaaaaaaaaaaaaaaaaaaaaaaa

SEQ ID NO: 28815 - RNA, 1764 nt, Artificial Sequence
  mRNA product Design a-2 (hSL-A100) comprising derived and/or modified sequence from LASV(Lassa virus/H.sapiens-wt/NGA/2015/ISTH_0543;Clade II)__AVO03639__GPCmut5 (opt5)
aggagaguccgcucagccagguugcagaagcggcuuagcguguguccuaaucuucucucugcguguagguaggccugugccgcaaacaagcuuaccaugggccagaucauuaccuucuuucaagaggugccccacgucaucgaagagguuaugaacauugugcugaucgcccucagccugcuugcuauucugaaggggaucuacaauguggccacaugcggacucuucggccuggucuccuuucuucugcucugugggagaucuugcagcacgaccuauaaaggaguguacgaacugcagacacuggagcucgacauggcgaaccugaauaugaccaugccucuuuccuguacaaagaacaauucucaucacuauaucaugguuggcaacgaaaccgggcuggagcucacacugaccaauacgagcauuaucaaccauaaauucugcaaucuuuccgaugcucacaagaaaaaccuguacgaccaugcccucaugucuauuaucagcaccuuucaccuguccauuccgaauuucaaccaguaugaggccaugagcugugauuuuaauggaggcaagaucucugugcaguacaaccugucccacacauaugcugucgacgccgcuaaucauugcggcaccauugccaacggggugcuccaaacauucaugcggauggcguggggaggcagcuacaucgcccuggauucuggguguggauccugggacugcaucaugaccagcuaccaguaucuuguuauucagaacacgacaugggaagaucacugucaguuuucucgccccuccccuaucggcuaccuggggcuccugagccaaagaacccgggacauuuauaucucccgcagacuucugggaacauucaccuggacccucucugauagcgagggcaaugaaacacccggcggguacugccugacgcgguggaugcugauugaggcugagcucaaguguuuuggaaacaccgccguggcuaaaugcaaugaaaagcaugacgaggaguucugcgauaugcugcgccuuuuugacuucaacaaacaggccaucagacggcugaagaccccugcgcagauguccauccagcucauuaauaaagccgucaacgcucugaucaaugaucaacuuauuaugaagaaccaucugcgcgacaucauguguauucccuauugcaauuacagcaaguauugguaccucaaccacacagugacaggcaaaaccucucugccuagauguuggcugguguccaaugggagcuaccucaacgaaacgcacuucucugacgauaucgaacagcaggccgacaauaugaucacagagcugcuucaaaaggaguauauugaucggcagggaaaaaccccgcugggccucgucgaccuguuuguuuucagcaccuccuuuuaccugaucucuauuuuccuucaccucgugaagauccccacacaucgccacauuaccgggaaaccuugccccaagccucauagacugaaccacaugggaaucuguagcugcggccuguauaaacaccccggcgugccggucaaguggaagcggugaggacuagucccuguucccagagcccacuuuuuuuucuuuuuuugaaauaaaauagccugucuuucagaucucaaaggcucuuuucagagccaccaaaaaaaaaaaaaaaaaaaaaaaaaaaaaaaaaaaaaaaaaaaaaaaaaaaaaaaaaaaaaaaaaaaaaaaaaaaaaaaaaaaaaaaaaaaaaaaaaaaaa

SEQ ID NO: 28816 - RNA, 1764 nt, Artificial Sequence
  mRNA product Design a-2 (hSL-A100) comprising derived and/or modified sequence from LASV(Lassa virus/H.sapiens-wt/NGA/2016/ISTH_0009;Clade II)__AVO03571__GPCmut5 (opt5)
aggagaguccgcucagccagguugcagaagcggcuuagcguguguccuaaucuucucucugcguguagguaggccugugccgcaaacaagcuuaccaugggccagaucauuaccuucuuucaagaggugccccacgucaucgaagagguuaugaacauugugcugaucgcccucagccugcuugcuauucugaaggggaucuacaauguggccacaugcggacuccugggccuugucuccuuccugcuccugugugggagaucuugcagcacgaccuauaaaggaguguacgaacugcagacacucgagcuggacauggcgucccuuaacaugaccaugccucugucuuguacaaagaauaacagccaucacuauaucaugguuggcaaugaaaccgggcucgagcugacacuuaccaacacguccauuaucaaucauaaauuuugcaaccugucugaugcucacaagaaaaaucucuacgaccaugcccugaugagcauuaucuccaccuuccaccugagcauuccgaacuuuaaucaguaugaggccaugucuugugauuucaacggaggccggaucuccgugcaguacaaucucagccacucuuaugcugucgacgccgcuaaccauugcggcacaauugccaauggggugcugcaaaccuuuaugcgcauggcguggggaggcuccuacaucgcccuugauagcggguguggaucuugggacugcaucaugacauccuaccaguaucugauuauccagaacaccacgugggaagaucacugucaguucagcagacccuccccuauuggcuaccucgggcugcuuucucaacggacacgcgacaucuauauuagcagacggcugcucggaaccuuuacauggacccuguccgauagcgagggcaacgaaacccccggcggguacugccugacacgcuggaugcucaucgaggcugagcugaaguguuucggaaauacggccguugcuaagugcaacgaaaaacaugacgaggaauuuugcgauaugcuuagacuguucgacuuuaauaagcaggccauccggcgccucaaaaccccugcgcagaugucuauucagcugaucaacaaggccgugaaugcucuuauuaacgaucaacugaucaugaaaaaucaccucagagacauuauguguauccccuauugcaacuacuccaaguauugguaccugaaucacacagucaccggcaagacaagccugccucgguguuggcucgugucuaacgggagcuaccugaaugagacccauuucuccgacgauaucgaacagcaggccgacaacaugauuacggagcuucugcaaaaagaguauaucgaucgccagggaaagacaccgcucggccugguggaccuguucgucuuuucuaccagcuucuaccuuauuuccaucuuucuccaccugguuaaaauucccacccauagacacaucacagggaagccuugccccaaaccucaucggcugaaucacaugggaauuuguagcugcggccucuauaaccaccccggcgugccggugaaguggaaacgcugaggacuagucccuguucccagagcccacuuuuuuuucuuuuuuugaaauaaaauagccugucuuucagaucucaaaggcucuuuucagagccaccaaaaaaaaaaaaaaaaaaaaaaaaaaaaaaaaaaaaaaaaaaaaaaaaaaaaaaaaaaaaaaaaaaaaaaaaaaaaaaaaaaaaaaaaaaaaaaaaaaaaa

SEQ ID NO: 28817 - RNA, 1764 nt, Artificial Sequence
  mRNA product Design a-2 (hSL-A100) comprising derived and/or modified sequence from LASV(Lassa virus/H.sapiens-wt/NGA/2016/ISTH_0017;Clade II)__AVO03567__GPCmut5 (opt5)
aggagaguccgcucagccagguugcagaagcggcuuagcguguguccuaaucuucucucugcguguagguaggccugugccgcaaacaagcuuaccaugggccagaucauuaccuucuuucaagaggugccccacgucaucgaagagguuaugaacauugugcugaucgcccucagccugcuugcuauucugaaggggaucuacaauguggccacaugcggacucuucggccuggucuccuuucuucugcucugugggagaucuugcagcacgaccuauaaaggaguguacgaacugcagacacuggagcucgacauggcgucccugaacaugaccaugccucuuucuuguacaaagaauaacagccaucacuauaucaugguuggcaaugaaaccgggcuggagcucacacugaccaacacguccauuaucaaucauaaauucugcaaccuuucugaugcucacaagaaaaaucuguacgaccaugcccucaugagcauuaucuccaccuuucaccugagcauuccgaacuucaaucaguaugaggccaugucuugugauuuuaacggaggcaagaucuccgugcaguacaaucugagccacacauaugcuauugacgccgcuaaccauugcggcaccaucgccaaugggguccuccaaacauucaugcggauggcguggggaggcucuuacaucgcccuggauuccggguguggaagcugggacugcauuaugaccucuuaccaguaucuuaucauucagaacacgacaugggaagaucacugucaguuuucccgccccagcccuaucggcuaccuggggcuccugucccaaagaacccgggacauuuauaucucucgcagacuucugggaacauucaccuggacccucagcgauuccgagggcaacgaaacacccggcggguacugccugacgcgguggaugcugaucgaggcugagcucaaguguuuuggaaauaccgccguggcuaaaugcaacgaaaagcaugacgaggaguucugcgauaugcugcgccuuuuugacuucaauaaacaggccauuagacggcugaagaccccugcgcagaugagcauccagcucauuaacaaagccguuaaugcucugaucaacgaucaacuuauuaugaagaaucaucugcgcgacaucauguguauccccuauugcaacuacucuaaguauugguaccucaaucacacagugacaggcaaaaccucccugccuagauguuggcuggucagcaacgggucuuaccucaaugaaacgcacuucagcgacgauauugaacagcaggccgacaacaugaucacagagcugcuucaaaaggaguauauggaucggcagggaaaaaccccgcugggccucguggaccuguuuguguucuccaccucuuuuuaccugauuagcaucuuccuucaccucguccgcauucccacacauagacacguuaucgggaagccuugccccaaaccucaucggcugaaucacaugggaauuuguuccugcggccuguauaagcaccccggcgugccggugaaauggaagcgcugaggacuagucccuguucccagagcccacuuuuuuuucuuuuuuugaaauaaaauagccugucuuucagaucucaaaggcucuuuucagagccaccaaaaaaaaaaaaaaaaaaaaaaaaaaaaaaaaaaaaaaaaaaaaaaaaaaaaaaaaaaaaaaaaaaaaaaaaaaaaaaaaaaaaaaaaaaaaaaaaaaaaa

SEQ ID NO: 28818 - RNA, 1764 nt, Artificial Sequence
  mRNA product Design a-2 (hSL-A100) comprising derived and/or modified sequence from LASV(Lassa virus/H.sapiens-wt/NGA/2018/ISTH_0959;Clade II)__AVV65099__GPCmut5 (opt5)
aggagaguccgcucagccagguugcagaagcggcuuagcguguguccuaaucuucucucugcguguagguaggccugugccgcaaacaagcuuaccaugggccagaucauuaccuucuuucaagaggugccccacgucaucgaagagguuaugaacauugugcugaucgcccucagccugcuugcuauucugaaggggaucuacaauguggucacaugcggacucuucggccugguguccuuucuucugcucugugggagaucuugcagcacgaccuauaaaggaguuuacgaacugcagacacuggagcucgacauggccucccugaacaugaccaugccucuuucuuguacaaagaauaacagccaucacuauaucauggugggcaaugaaaccgggcuggagcucacacugaccaacacguccauuaucaaucauaaauucugcaaccuuucugaugcgcacaagaaaaaucuguacgaccaugcucucaugagcauuaucuccaccuuucaccugagcauuccgaacuucaaucaguaugaggccaugucuugugauuuuaacggaggcaagaucuccguccaguacaaucugagccacgccuaugcuauugacgccgcuaaccauugcggcacaaucgccaauggggugcuccaaaccuucaugcggauggcguggggaggcucuuacaucgcccuggauuccggguguggaagcugggacugcauuaugacaucuuaccaguaucuuaucauucagaacaccacgugggaagaucacugucaguuuucccgccccagcccuaucggcuaccuggggcuccugucccaaagaacacgggacauuuauaucucucgcagacuucugggaaccuucacauggacccucagcgauuccgagggcaacgaaacccccggcggguacugccugacacgguggaugcugaucgaggcugagcucaaguguuuuggaaauacggccguugcuaaaugcaacgaaaagcaugacgaggaguucugcgauaugcugcgccuuuuugacuucaauaaacaggccauuagacggcugaagaccccugcgcagaugagcauccagcucauuaacaaagccgugaaugcucugaucaacgaucaacuuauuaugaagaaucaucugcgcgacaucauguguauccccuauugcaacuacucuaaguauugguaccucaaucacacagucaccggcaaaacaucccugccuagauguuggcuggugagcaacgggucuuaccucaaugaaacccacuucagcgacgauauugaacagcaggccgacaacaugaucacggagcugcuucaaaaggaguauauugaucggcagggaaaaacaccgcugggccucguggaccuguuugucuucuccaccucuuuuuaccugaucagcauuuuccuucaccucguuaagauccccacccaucgccacgugauugggaaaccuugccccaagccucauagacugaaucacaugggaaucuguuccugcggccuguauaaacaccccggcgugccggucaaguggaagcggugaggacuagucccuguucccagagcccacuuuuuuuucuuuuuuugaaauaaaauagccugucuuucagaucucaaaggcucuuuucagagccaccaaaaaaaaaaaaaaaaaaaaaaaaaaaaaaaaaaaaaaaaaaaaaaaaaaaaaaaaaaaaaaaaaaaaaaaaaaaaaaaaaaaaaaaaaaaaaaaaaaaaa

SEQ ID NO: 28819 - RNA, 1764 nt, Artificial Sequence
  mRNA product Design a-2 (hSL-A100) comprising derived and/or modified sequence from LASV(LASV003-NIG-2008;Clade II)__AIT17580__GPCmut5 (opt5)
aggagaguccgcucagccagguugcagaagcggcuuagcguguguccuaaucuucucucugcguguagguaggccugugccgcaaacaagcuuaccaugggccagaucauuaccuucuuucaagaggugccccacgucaucgaagagguuaugaacauugugcugaucgcccucagccugcuugcuauucugaaggggaucuacaauguggccacaugcggacucuucggccuggucuccuuucuucugcucugugggagaucuugcagcacgaccuauaaaggaguguacgaacugcagacacuggagcucgacauggcgucccugaacaugaccaugccucuuucuuguacaaagaauaacagccaucacuauaucaugguuggcaaugaaaccgggcuggagcucacacugaccaacacguccauuaucaaucauaaauucugcaaccuuucugaugcucacaagaaaaaucuguacgaccaugcccucaugagcauuaucuccaccuuucaccugagcauuccgaacuucaaucaguaugaggccaugucuugugauuuuaacggaggcaagaucuccgugcaguacaaucugagccacacauaugcugucgacgccgcuaaccauugcggcaccauugccaauggggugcuccaaacauucaugcggauggcguggggaggcucuuacaucgcccuggauuccggguguggaagcugggacugcaucaugaccucuuaccaguaucuuauuauccagaacacgacaugggaagaucacugucaguuuucccgccccagcccuauuggcuaccuggggcuccugucccaaagaacccgggacaucuauauuucucgcagacuucugggaacauucaccuggacccucagcgauuccgagagcaacgaaacacccggcggcuacugccugacgcgguggaugcugaucgaggcugagcucaaguguuuugggaauaccgccguugcuaaaugcaacgaaaagcaugacgaggaguucugcgauaugcugcgccuuuuugacuucaauaaacaggccaucagacggcugaaggcgccugcccagaugucuauucagcucaucaacaaagcugugaaugcccugauuaacgaucaacuuaucaugaagaaucaucugcgcgacauuauguguauccccuauugcaacuacuccaaguauugguaccucaaucacacagucaccggaagaacaagccugccucgguguuggcuggugucuaacggcagcuaccucaaugaaacccacuucuccgacgauaucgaacagcaggcugacaacaugauuacggagcugcuucaaaaagaguauauggaucgccaggggaagacaccgcugggacucguggaccuguuugucuucucuaccagcuuuuaccugaucuccauuuuccuucaccucguuaaaauccccacccauagacacgugauuggcaagccuugccccaaaccucaucggcugaaucacauggggaucuguagcugcggacuguauaagcaccccggcgugccggucaaauggaagcgcugaggacuagucccuguucccagagcccacuuuuuuuucuuuuuuugaaauaaaauagccugucuuucagaucucaaaggcucuuuucagagccaccaaaaaaaaaaaaaaaaaaaaaaaaaaaaaaaaaaaaaaaaaaaaaaaaaaaaaaaaaaaaaaaaaaaaaaaaaaaaaaaaaaaaaaaaaaaaaaaaaaaaa

SEQ ID NO: 28820 - RNA, 1764 nt, Artificial Sequence
  mRNA product Design a-2 (hSL-A100) comprising derived and/or modified sequence from LASV(LASV035-NIG-2009;Clade II)__AIT17588__GPCmut5 (opt5)
aggagaguccgcucagccagguugcagaagcggcuuagcguguguccuaaucuucucucugcguguagguaggccugugccgcaaacaagcuuaccaugggccagaucauuaccuucuuucaagaggugccccacgucaucgaagagguuaugaacauugugcugaucgcccucagccugcuugcuauucugaaggggaucuacaauguggccacaugcggacucuucggccuggucuccuuucuucugcucugugggagaucuugcagcacgaccuauaaaggaguguacgaacugcagacacuggagcucgacauggcgucccugaacaugaccaugccucuuucuuguacaaagaauaacagccaucacuauaucaugguuggcaaugaaaccgggcuggagcucacacugaccaacacguccauuaucaaucauaaauucugcaaccuuucugaugcucacaagaaaaaucuguacgaccaugcccucaugagcauuaucuccaccuuucaccugagcauuccgaacuucaaucaguaugaggccaugucuugugauuuuaacggaggcaagaucuccgugcaguacaaucugagccacgcuuaugccgucgacgcugccaaccauugcggcacaauugcgaauggggugcuccaaaccuucaugcggauggccuggggaggcucuuacaucgcucuggauuccggguguggaagcugggacugcaucaugacaucuuaccaguaucuuauuauccagaacaccacgugggaagaucacugucaguuuucccgccccagcccuauuggcuaccuggggcuccugucccaaagaacacgggacaucuauauuucucgcagacuucugggaaccuucacauggacccucagcgauuccgagggcaacgaaacccccggcggguacugccugacacgguggaugcugaucgaggccgagcucaaguguuuuggaaauacggcuguugccaaaugcaacgaaaagcaugacgaggaguucugcgauaugcugcgccuuuuugacuucaauaaacaggcgaucagacggcugaaggccccugcucagaugagcauucagcucaucaacaaagccgugaaugcucugauuaacgaucaacuuaucaugaagaaucaucugcgcgacauuauguguauccccuauugcaacuacucuaaguauugguaccucaaucacaccgucacaggcaaaaccucccugccuagauguuggcuggugagcaacgggucuuaccucaaugaaacacacuucagcgacgauaucgaacagcaggccgacaacaugauuaccgagcugcuucaaaaggaguauaucgaucggcagggaaaaacgccgcugggccucguggaccuguuugucuucuccacaucuuuuuaccugauuagcaucuuccuucaccucguuaagauucccacccaucgccacgugaucgggaaaccuugccccaagccucauagacugaaucacaugggaauuuguuccugcggccuguauaaacaccccggcgugccggucaaguggaagcggugaggacuagucccuguucccagagcccacuuuuuuuucuuuuuuugaaauaaaauagccugucuuucagaucucaaaggcucuuuucagagccaccaaaaaaaaaaaaaaaaaaaaaaaaaaaaaaaaaaaaaaaaaaaaaaaaaaaaaaaaaaaaaaaaaaaaaaaaaaaaaaaaaaaaaaaaaaaaaaaaaaaaa

SEQ ID NO: 28821 - RNA, 1764 nt, Artificial Sequence
  mRNA product Design a-2 (hSL-A100) comprising derived and/or modified sequence from LASV(LASV1000-NIG-2009;Clade II)__AIT17782__GPCmut5 (opt5)
aggagaguccgcucagccagguugcagaagcggcuuagcguguguccuaaucuucucucugcguguagguaggccugugccgcaaacaagcuuaccaugggccagaucauuaccuucuuucaagaggugccccacgucaucgaagagguuaugaacauugugcugaucgcccucagccugcuugcuauucugaaggggaucuacaauguggccacaugcggacucuucggccuggucuccuuucuucugcucugugggagaucuugcagcacgaccuauaaaggaguguacgaacugcagacacuggagcucgacauggcgucccugaacaugaccaugccucuuucuuguacaaagaauaacagccaucacuauaucaugguuggcaaugaaaccgggcuggagcucacacugaccaacacguccauuaucaaucauaaauucugcaaccuuucugaugcucacaagaaaaaucuguacgaccaugcccucaugagcauuaucuccaccuuucaccugagcauuccgaacuucaaucaguaugaggccaugucuugugauuuuaacggaggcaagaucuccgugcaguacaaucugagccacacauaugcugucgacgccgcuaaccauugcggcaccauugccaauggggugcuccaaacauucaugcggauggcguggggaggcucuuacaucgcccuggauuccggguguggaagcugggacugcaucaugaccucuuaccaguaucuuauuauccagaacacgacaugggaagaucacugucaguuuucccgccccagcccuauuggcuaccuggggcuccugucccaaagaacccgggacaucuauauuucucgcagacuucugggaacauucaccuggacccucagcgauuccgagggcaacgaaacacccggcggguacugccugacgcgguggaugcugaucgaggcugagcucaaguguuuuggaaauaccgccguugcuaaaugcaacgaaaagcaugacgaggaguucugcgauaugcugcgccuuuuugacuucaauaaacaggccaucaagagacugaaaaccccugcgcagaugagcauucagcucaucaacaaggccgugaaugcucugauuaacgaucaacuuaucaugaagaaucaucugcgggacauuauguguauccccuauugcaacuacucuaaauauugguaccucaaucacacagucacaggcaagaccucccugccucgcuguuggcuggugagcaacgggucuuaccucaaugaaacgcacuucagcgacgauaucgaacagcaggccgacaacaugauuacagagcugcuucaaaaagaguauaucgauagacagggaaagaccccgcugggccucguggaccuguuugucuucuccaccucuuuuuaccugauuagcaucuuccuucaccucguuaaaauucccacacaucggcacgugguggggaagccuugccccaaaccucaucgccugaaucacaugggaaucuguuccugcggccuguauaagcaccccggcgucccggugaaguggaaaagaugaggacuagucccuguucccagagcccacuuuuuuuucuuuuuuugaaauaaaauagccugucuuucagaucucaaaggcucuuuucagagccaccaaaaaaaaaaaaaaaaaaaaaaaaaaaaaaaaaaaaaaaaaaaaaaaaaaaaaaaaaaaaaaaaaaaaaaaaaaaaaaaaaaaaaaaaaaaaaaaaaaaaa

SEQ ID NO: 28822 - RNA, 1764 nt, Artificial Sequence
  mRNA product Design a-2 (hSL-A100) comprising derived and/or modified sequence from LASV(LASV221-NIG-2010;Clade II)__AIT17624__GPCmut5 (opt5)
aggagaguccgcucagccagguugcagaagcggcuuagcguguguccuaaucuucucucugcguguagguaggccugugccgcaaacaagcuuaccaugggccagaucauuaccuucuuucaagaggugccccacgucaucgaagagguuaugaacauugugcugaucgcccucagccugcuugcuauucugaaggggaucuacaauguggccacaugcggacucuucggccuggucuccuuucuucugcucugugggagaucuugcagcacgaccuauaaaggaguguacgaacugcagacacuggagcucgacauggcgucccugaacaugaccaugccucuuucuuguacaaagaauaacagccaucacuauaucaugguuggcaaugaaaccgggcuggagcucacacugaccaacacguccauuaucaaucauaaauucugcaaccuuucugaugcucacaagaaaaaucuguacgaccaugcccucaugagcauuaucuccaccuuucaccugagcauuccgaacuucaaucaguaugaggccaugucuugugauuuuaacggaggcaagaucuccgugcaguacaaucugagccacacauaugcuauugacgccgcuaaccauugcggcaccaucgccaaugggguccuccaaacauucaugcggauggcguggggaggcucuuacaucgcccuggauuccggguguggaagcugggacugcauuaugaccucuuaccaguaucuuaucauucagaacacgacaugggaagaucacugucaguuuucccgccccagcccuaucggcuaccuggggcuccugucccaaagaacccgggacauuuauaucucucgcagacuucugggaacauucaccuggacccucagcgauuccgagggcaacgaaacacccggcggguacugccugacgcgguggaugcugaucgaggcugagcucaaguguuuuggaaauaccgccguggcuaaaugcaacgaaaagcaugacgaggaguucugcgauaugcugcgccuuuuugacuucaauaaacaggccauuagacggcugaagaccccugcgcagaugagcauccagcucauuaacaaagccguuaaugcucugaucaacgaucaacuuauuaugaagaaucaucugcgcgacaucauguguauccccuauugcaacuacucuaaguauugguaccucaaucacacagugacaggcaaaaccucccugccuagauguuggcuggucagcaacgggucuuaccucaaugaaacgcacuucagcgacgauauugaacagcaggccgacaacaugaucacagagaugcugcaaaaggaguauauggaucggcagggaaaaaccccgcuuggccugguggaccucuuuguguucuccaccucuuuuuaccugauuagcaucuuccugcaccuugucaagauucccacacaucgccacguuaucgggaaaccuugccccaagccucauagacucaaucacaugggaauuuguuccugcggccuguauaaacaccccggcgugccggugaaguggaagcggugaggacuagucccuguucccagagcccacuuuuuuuucuuuuuuugaaauaaaauagccugucuuucagaucucaaaggcucuuuucagagccaccaaaaaaaaaaaaaaaaaaaaaaaaaaaaaaaaaaaaaaaaaaaaaaaaaaaaaaaaaaaaaaaaaaaaaaaaaaaaaaaaaaaaaaaaaaaaaaaaaaaaa

SEQ ID NO: 28823 - RNA, 1764 nt, Artificial Sequence
  mRNA product Design a-2 (hSL-A100) comprising derived and/or modified sequence from LASV(LASV237-NIG-2010;Clade II)__AIT17638__GPCmut5 (opt5)
aggagaguccgcucagccagguugcagaagcggcuuagcguguguccuaaucuucucucugcguguagguaggccugugccgcaaacaagcuuaccaugggccagaucauuaccuucuuucaagaggugccccacgucaucgaagagguuaugaacauugugcugaucgcccucagccugcuugcuauucugaaggggaucuacaauguggccacaugcggacucuucggccuggucuccuuucuucugcucugugggagaucuugcagcacgaccuauaaaggaguguacgaacugcagacacuggagcucgacauggcgucccugaacaugaccaugccucuuucuuguacaaagaauaacagccaucacuauaucaugguuggcaaugaaaccgggcuggagcucacacugaccaacacguccauuaucaaucauaaauucugcaaccuuucugaugcucacaagaaagaccuguacgaucaugcccucaugagcauuaucuccaccuuucaccugagcauuccgaauuucaaccaguaugaggccaugucuugugacuuuaauggaggcaagaucuccgugcaguacaaccugagccacacauaugcugucgaugccgcuaaucauugcggcaccauugccaacggggugcuccaaacauucaugcggauggcguggggaggcucuuacaucgcccuggacuccggguguggaagcugggauugcaucaugaccucuuaccaguaucuuauuauccagaauacgacaugggaagaccacugucaguuuucccgccccagcccuauuggcuaccuggggcuccugucccaaagaacccgggauaucuauauuucucgcagacuucugggaacauucaccuggacccucagcgacuccgagggcaacgaaacacccggcggguacugccugacgcgguggaugcugaucgaggcugagcucaaguguuuuggaaacaccgccguugcuaaaugcaaugaaaagcaugaugaggaguucugcgacaugcugcgccuuuuugauuucaacaaacaggccaucagacggcugaagaccccugcgcagaugagcauucagcucaucaauaaagccgugaacgcucugauuaaugaccaacuuaucaugaagaaccaucugcgcgacauuauguguauccccuauugcaauuacucuaaguauugguaccucaaccacacagucacaggcaaaaccucccugccuagauguuggcuggugagcaaugggucuuaccucaacgaaacgcacuucagcgaugacaucgaacagcaggccgauaauaugauuacagagcugcuucaaaaggaguauauggaccggcagggaaaaaccccgcugggccucguggaucuguuugucuucuccaccucuuuuuaccugaucagcauuuuccuucaccucaucaagauucccacacaucgccacaucaccgggaaaccuugccccaagccucauagacugaaccacaugggaauuuguuccugcggccuguauaaacaccccggcguuccggugaaguggaagcggugaggacuagucccuguucccagagcccacuuuuuuuucuuuuuuugaaauaaaauagccugucuuucagaucucaaaggcucuuuucagagccaccaaaaaaaaaaaaaaaaaaaaaaaaaaaaaaaaaaaaaaaaaaaaaaaaaaaaaaaaaaaaaaaaaaaaaaaaaaaaaaaaaaaaaaaaaaaaaaaaaaaaa

SEQ ID NO: 28824 - RNA, 1764 nt, Artificial Sequence
  mRNA product Design a-2 (hSL-A100) comprising derived and/or modified sequence from LASV(LASV253-NIG-2011;Clade II)__AIT17670__GPCmut5 (opt5)
aggagaguccgcucagccagguugcagaagcggcuuagcguguguccuaaucuucucucugcguguagguaggccugugccgcaaacaagcuuaccaugggccagaucauuaccuucuuucaagaggugccccacgucaucgaagagguuaugaacauugugcugaucgcccucagccugcuugcuauucugaaggggaucuacaauguggccacaugcggacucuucggccuggucuccuuucuucugcucugugggagaucuugcagcacgaccuauaaaggaguguacgaacugcagacacuggagcucgacauggcgucccugaacaugaccaugccucuuucuuguacaaagaauaacagccaucacuauaucaugguuggcaaugaaaccgggcuggagcucacacugaccaacacguccauuaucaaucauaaauucugcaaccuuucugaugcucacaagaaaaaucuguacgaccaugcccucaugagcauuaucuccaccuuucaccugagcauuccgaacuucaaucaguaugaggccaugucuugugauuuuaacggaggcaagaucuccgugcaguacaaucugagccacacauaugcugucgacgccgcuaaccauugcggcaccauugccaauggggugcuccaaacauucaugcggauggcguggggaggcucuuacaucgcccuggauuccggguguggaagcugggacugcaucaugaccucuuaccaguaucuuauuauccagaacacgacaugggaagaucacugucaguuuucccgccccagcccuauuggcuaccuggggcuccugucccaaagaacccgggacaucuauauuucucgcagacuucugggaacauucaccuggacccucagcgauuccgagggcaacgaaacacccggcggguacugccugacgcgguggaugcugaucgaggcugagcucaaguguuuuggaaauaccgccguugcuaaaugcaacgaaaagcaugacgaggaguucugcgauaugcugcgccuuuuugacuucaauaaacaggccaucagacggcugaaggcgccugcccagaugagcauucagcucaucaacaaagcugugaaugcccugauuaacgaucaacuuaucaugaagaaucaucugcgcgacauuauguguauccccuauugcaacuacucuaaguauugguaccucaaucacacagucaccggcagaacaucccugccucgguguuggcuggugagcaacgggucuuaccucaaugaaacccacuucagcgacgauaucgaacagcaggcugacaacaugauuacggagcugcuucaaaaagaguauaucgaucgccagggaaagacaccgcugggccucguggaccuguuugucuucuccaccucuuuuuaccugauuagcaucuuccuucaccucguuaaaauucccacccauagacacaucauugggaagccuugccccaaaccucaucggcugaaucacaugggaaucuguuccugcggccuguauaagcaccccggcgugccggugaaauggaagcgcugaggacuagucccuguucccagagcccacuuuuuuuucuuuuuuugaaauaaaauagccugucuuucagaucucaaaggcucuuuucagagccaccaaaaaaaaaaaaaaaaaaaaaaaaaaaaaaaaaaaaaaaaaaaaaaaaaaaaaaaaaaaaaaaaaaaaaaaaaaaaaaaaaaaaaaaaaaaaaaaaaaaaa

SEQ ID NO: 28825 - RNA, 1764 nt, Artificial Sequence
  mRNA product Design a-2 (hSL-A100) comprising derived and/or modified sequence from LASV(LASV254-NIG-2011;Clade II)__AIT17674__GPCmut5 (opt5)
aggagaguccgcucagccagguugcagaagcggcuuagcguguguccuaaucuucucucugcguguagguaggccugugccgcaaacaagcuuaccaugggccagaucauuaccuucuuucaagaggugccccacgucaucgaagagguuaugaacauugugcugaucgcccucagccugcuugcuauucugaaggggaucuacaauguggccacaugcggacucuucggccuggucuccuuucuucugcucugugggagaucuugcagcacgaccuauaaaggaguguacgaacugcagacacuggagcucgacaugaccaaccugaauaugacaaugccucuuuccuguaccaagaacaauucucaucacuauaucaugguuggcaacgaaacagggcuggagcucacccugacgaauaccagcauuaucaaccauaaauucugcaaucuuuccgaugcgcacaagaaaaaccuguacaaucaugcucucaugucuauuaucagcacauuucaccuguccauuccgaacuucaaucaguaugaggccaugagcugugacuuuaacggaggcaagaucucugugcaguacaaucugucccacagcuaugccgucgaugcugccaaccauugcggcaccauugcuaacggggugcuccaaacauucaugcggauggccuggggaggcucuuacaucgcgcuggacuccggguguggaaauugggauugcaucaugaccagcuaccaguaucuuauuauccagaacacgacaugggaagaccacugucaguuuucucgccccuccccuauuggcuaccuggggcuccugagccaaagaacccgggauaucuauauuucccgcagacuucugggaacauucaccuggacccucucugacagcgagggcaaugaaacacccggcggguacugccugacgcgguggaugcugaucgaggccgagcucaaguguuuuggaaacaccgcuguugccaaaugcaaugaaaagcaugaugaggaguucugcgacaugcugcgccuuuuugauuucaacaaacaggcuaucagacggcugaagaccccugcccaggcgaauauucagcucaucaacaaagccgugaaugcucugauuaacgaccaacuuaucaugaagaaucaucugcgcgauauuauguguauccccuauugcaacuacuccaaguauugguaccucaaucacacagucacaggcaaaaccagccugccuagauguuggcuggugucuaacggguccuaccucaaugaaacgcacuucagcgacgacaucgaacagcaggccgauaacaugauuacagagcugcuucaaaaggaguauauggaccggcagggaaaaaccccgcugggccucguggaucuguuugucuucucuaccagcuuuuaccugaucuccauuuuccuucaccucguuaagauccccacacaucgccacgugauugggaaaccuugccccaagccucauagacugaaccacaugggaaucuguucuugcggccuguauaaacaccccggcgugccggucaaguggaagcggugaggacuagucccuguucccagagcccacuuuuuuuucuuuuuuugaaauaaaauagccugucuuucagaucucaaaggcucuuuucagagccaccaaaaaaaaaaaaaaaaaaaaaaaaaaaaaaaaaaaaaaaaaaaaaaaaaaaaaaaaaaaaaaaaaaaaaaaaaaaaaaaaaaaaaaaaaaaaaaaaaaaaa

SEQ ID NO: 28826 - RNA, 1764 nt, Artificial Sequence
  mRNA product Design a-2 (hSL-A100) comprising derived and/or modified sequence from LASV(Nig08-A19;Clade III)__ADU56618__GPCmut5 (opt5)
aggagaguccgcucagccagguugcagaagcggcuuagcguguguccuaaucuucucucugcguguagguaggccugugccgcaaacaagcuuaccaugggccagaucgugaccuucuuucaagaggucccccacguuauugaagaggugaugaacaucgugcugauugcccucagcauccuggcuauucuuaaggggcuguacaauaucgccacaugcggacucaucggccuggucacguuccuucugcucuccgggagaucuuguagcaugaccuauaaaggaguguacgaacugcagacacuggagcucaacaugaauacccugaacaugacaaugccucuuuccugcaccaagaauaacucucaucacuauauuaugguuggcaaugaaacagggcuggagcucacccugacgaacaccagccuucugcaucacaaauuuuguaaucucuccgacgcgcauaagaaaaaccuguacgaucacacacugaugucuaucauuagcaccuuccaccucuccaucccgaauuuuaaccaguaugaggcuaugagcugcgacuucaauggaggcaagauuacagugcaguacaaccugucucauuccuaugccaucgaugccgcuaaucacuguggcaccgucgccaacggggugcuucaaacguuuaugcggauggcuuggggaggcagcuacauugcccuggacucugggugcggaaagugggauuguaucaugacauccuaccaguaucucaucauucagaacaccacaugggaagaccauugccaguucagccgccccucuccuaucggcuaccuggggcuucugucccaaagaacccgggauauuuauaucagccgcagacuccugggaaccuuuacauggacgcuguccgacucugagggcaaugaaacccccggcggguacugucucacacgguggaugcugauugaggcggagcuuaaaugcuucggaaacaccgccguugcuaaguguaaugaaaaacacgaugaggaauuuugcgacaugcugcgccucuucgauuuuaacaagcaggccaucagacggcugaaagcuccugcccagaugagcauccagcuuauuaauaaggcggugaacgcccugaucaaugaccaacucauuaugaagaaccaucugcgcgauaucaugugcauucccuauuguaauuacuccaaauauugguaccugaaccacacaagcaccggcagaacgucucucccucggugcuggcuggucuccaaugggagcuaccuuaacgagacacacuucucugacgacaucgaacagcaggcugauaauaugaucaccgagaugcugcaaaaggaguaucucgaccgccagggaaaaaccccgcugggccugguggaucuuuucguguuuagcacauccuucuaccucauuucuaucuuucugcaucuggucaagauucccacccacagacauaucguugggaaaccuugucccaagccucaccggcucaaccacaugggaauuugcagcuguggccuguauaaacagcccggcgugccggugcgcuggaagagaugaggacuagucccuguucccagagcccacuuuuuuuucuuuuuuugaaauaaaauagccugucuuucagaucucaaaggcucuuuucagagccaccaaaaaaaaaaaaaaaaaaaaaaaaaaaaaaaaaaaaaaaaaaaaaaaaaaaaaaaaaaaaaaaaaaaaaaaaaaaaaaaaaaaaaaaaaaaaaaaaaaaaa

SEQ ID NO: 28827 - RNA, 1767 nt, Artificial Sequence
  mRNA product Design a-2 (hSL-A100) comprising derived and/or modified sequence from LASV(G1180-SLE-2010;Clade IV)__AIT17168__GPCmut5 (opt5)
aggagaguccgcucagccagguugcagaagcggcuuagcguguguccuaaucuucucucugcguguagguaggccugugccgcaaacaagcuuaccaugggccagaucgugaccuucuuucaagaggucccccacguuauugaagaggugaugaacaucgugcugauugcccucagcauccuggcuguccuuaaggggcuguacaauuucgccacaugcggacucgugggccugcuuacguuucugcuccugugugggagauccugcaccgcgucucgguauaaaggaguuuacgaacugcagacacucgagcugaacauggaaacccuuaauaugacaaugccucugagcuguaccaagaacaauucccaucacuauauuauggugggcaacgagacagggcucgagcugacccuuacgaauaccucuaucaucaaccauaaauucugcaaucugagcgacgcucacaagaaaaaccucuacgaucaugcccugauguccauuaucucuacauuucaccugagcauuccgaauuucaaccaguaugaagccauguccugugacuuuaauggaggcaagaucagcguccaguacaaccucucucacuccuaugcuggcgaugccgcuaaucauugcgggaccguggccaacggaguucugcaaacauucaugcgcauggcguggggcgggagcuacauugcccuugacucuggauguggcuccugggauugcaucaugaccagcuaccaguaucugauuauccagaacacgacaugggaggaccacugucaguuuucuagacccuccccuaucggguaccucggacugcuuagccaacggacccgcgauauuuauaucuccagacggcugcucggcacauucaccuggacccugucugacagcgaaggcaaggauacacccgggggauacugccugacgcgcuggaugcucauugaggcugagcugaaauguuuuggcaauaccgccguggcuaagugcaacgaaaaacaugacgaggaguucugcgauaugcuuagacuguuugacuucaauaagcaggccauccagcggcucaaagcgccugcccagauguccauucaacugaucaacaaggcugucaaugcccuuaucaacgaucagcugauuaugaagaaucaccuccgcgacaucauguguauucccuauugcaacuacagcaaauauugguaccugaaucacacaaccacagggaagaccucucugccuaaauguuggcucguguccaacggaagcuaccugaaugaaacgcauuucucugacgauaucgaacagcaagcugacaacaugauuacagagaugcuucagaaggaguauauggaaagacagggcaaaaccccgcuggggcucguggaucuguuugucuucagcaccuccuuuuaccugaucucuaucuuccuucaccucguuaagauucccacacaucggcacaucgugggaaaaagcugcccuaagccccaucgccugaaucacaugggcauuuguuccugcggccuguauaagcagccuggggugcccgucaaauggaagagaugaggacuagucccuguucccagagcccacuuuuuuuucuuuuuuugaaauaaaauagccugucuuucagaucucaaaggcucuuuucagagccaccaaaaaaaaaaaaaaaaaaaaaaaaaaaaaaaaaaaaaaaaaaaaaaaaaaaaaaaaaaaaaaaaaaaaaaaaaaaaaaaaaaaaaaaaaaaaaaaaaaaaa

SEQ ID NO: 28828 - RNA, 1767 nt, Artificial Sequence
  mRNA product Design a-2 (hSL-A100) comprising derived and/or modified sequence from LASV(G1442-SLE-2011;Clade IV)__AIT17180__GPCmut5 (opt5)
aggagaguccgcucagccagguugcagaagcggcuuagcguguguccuaaucuucucucugcguguagguaggccugugccgcaaacaagcuuaccaugggccagaucgugaccuucuuucaagaggucccccacguuauugaagaggugaugaacaucgugcugauugcccucagcauccuggcuguccuuaaggggcuguacaauguggccacaugcggacucauuggccugguuacguuccuucugcucugugggagauccugcaccacaacccuguauaaaggaguguacgaacugcagacacucgagcugaacauggaaacccuuaauaugacaaugccucugucuuguaccaagaacaauagccaucacuauauccgggucggcaacgagacggggcucgagcugacccuuacaaauaccuccaucauuaaccauaaauuuugcaaucugucugacgcgcacaagaaaaaccucuacgaucaugcucugaugagcaucauuuccacauuccaccugucuaucccgaauuuuaaccaguaugaagccaugagcugugacuucaauggaggcaagauuuccgugcaguacaaccucagccacucuuaugccggcgaugcugccaaucauugcgggaccguugcuaacggagugcugcaaacguuuaugcgcauggccuggggcggguccuacaucgcgcuugacagcggauguggcaacugggauugcauuaugacaucuuaccaguaucugaucauccagaauaccacaugggacgaucacugucaguucuccagacccagcccuauuggguaccucggacugcuuucucaacggacccgcgacgucuauaucuccagacggcugcucggcaccuuuacauggacgcugagcgauuccgagggcaaggacacccccgggggauacugccugacacgcuggaugcucauugaagccgagcugaaauguuucggcaacaccgcuguggccaagugcaaugagaaacaugaugaagaguuuugcgacaugcuuagacuguucgauuuuaacaagcaggcuauccagcggcucaaagccccugcgcagaugucuauucaacugaucaauaaggccgugaacgcucuuaucaaugaccagcugauuaugaagaaccaccuccgcgacaucauguguauucccuauugcaauuacagcaaauauugguaccugaacaauacagccaccgggaagacgucccugccuaaauguuggcucaucagcaacggaucuuaccugaaugaaacacacuucuccgaugacauugagcaggaagcugauaacaugaucaccgagaugcuucaaaaggaguauauggaaagacagggcaaaaccccgcuggggcucgucgaccuguucguuuuuagcacaucuuucuaccugaucagcauuuuucuucaucucgugaagauccccacccaccggcauauugugggaaaauccugcccuaagccccaccgccugaaucauaugggcaucuguucuugcggccuguauaagcagccugggguccccgugagauggaaacggugaggacuagucccuguucccagagcccacuuuuuuuucuuuuuuugaaauaaaauagccugucuuucagaucucaaaggcucuuuucagagccaccaaaaaaaaaaaaaaaaaaaaaaaaaaaaaaaaaaaaaaaaaaaaaaaaaaaaaaaaaaaaaaaaaaaaaaaaaaaaaaaaaaaaaaaaaaaaaaaaaaaaa

SEQ ID NO: 28829 - RNA, 1767 nt, Artificial Sequence
  mRNA product Design a-2 (hSL-A100) comprising derived and/or modified sequence from LASV(G3010-SLE-2013;Clade IV)__AIT17344__GPCmut5 (opt5)
aggagaguccgcucagccagguugcagaagcggcuuagcguguguccuaaucuucucucugcguguagguaggccugugccgcaaacaagcuuaccaugggccagaucgugaccuucuuucaagaggucccccacguuauugaagaggugaugaacaucgugcugauugcccucagcauccuggcuguccuuaaggggcuguacaauuucgccacaugcggacucgugggccugguuacguuucuucugcucugugggagauccugcaccacaucucuguauaaaggaguguacgaacugcagacccucgagcugaacauggaaacacuuaauaugaccaugccucugagcuguacaaagaacaauucccaucacuauauuauggucggcaacgagaccgggcucgagcugacgcuuaccaauacaucuaucaucaaccauaaauucugcaaucugagcgacgcgcacaagaaaaaccucuacaaucaugcucugauguccauuaucucuaccuuucaccugagcauuccgaacuucaaucaguaugaagccauguccugugauuuuaacggaggcaagaucagcgugcaguacaaucucucucacuccuaugccggcgacgcugccagccauugcgggacaguugcuaacggagugcugcaaaccuucaugcggauggccuggggcgggucuuacauugcgcuugauuccggauguggcaagugggacugcaucaugacgagcuaccaguaucugauuauccagaacacaaccugggaggaucacugucaguuuucucgccccuccccuaucggguaccucggacugcuuagccaaagaacacgggacauuuauaucucccgcagacugcucggcaccuucaccuggacacugucugauagcgaaggcaaagacacgcccgggggauacugccugacccgguggaugcucauugaggccgagcugaaguguuuuggcaauacagcugucgccaaaugcaacgaaaagcaugaugaggaguucugcgacaugcuucgccuguuugauuucaauaaacaggcuauccagagacucaagaccccugcccagauguccauucaacugaucaacaaggcggugaaugcccuuaucaacgaccagcugauuaugaaaaaucaccuccgggauaucauguguauucccuauugcaacuacagcaaguauugguaccugaaucacacaaccacggggaaaacaucucugccuaaguguuggcucguguccaacggaagcuaccugaaugaaacccauuucucugacgacaucgaacagcaagcugauaacaugauuaccgagaugcuucagaaagaguauauggaacgccagggcaagacaccgcuggggcucgucgaccuguuuguuuucagcaccuccuuuuaccugaucucuaucuuccuucaccucgugaaaauucccacacauagacacaucgugggaaagagcugcccuaagccccaucggcugaaucacaugggcauuuguuccugcggccuguauaaacagccugggguccccgugcgcuggaagagaugaggacuagucccuguucccagagcccacuuuuuuuucuuuuuuugaaauaaaauagccugucuuucagaucucaaaggcucuuuucagagccaccaaaaaaaaaaaaaaaaaaaaaaaaaaaaaaaaaaaaaaaaaaaaaaaaaaaaaaaaaaaaaaaaaaaaaaaaaaaaaaaaaaaaaaaaaaaaaaaaaaaaa

SEQ ID NO: 28830 - RNA, 1767 nt, Artificial Sequence
  mRNA product Design a-2 (hSL-A100) comprising derived and/or modified sequence from LASV(G502-SLE-2009;Clade IV)__AIT17126__GPCmut5 (opt5)
aggagaguccgcucagccagguugcagaagcggcuuagcguguguccuaaucuucucucugcguguagguaggccugugccgcaaacaagcuuaccaugggccagaucgugaccuucuuucaagaggucccccacguuauugaagaggugaugaacaucgugcugauugcccucagcauccuggcuguccuuaaggggcuguacaauuucgccacaugcggacucgugggccugcuuacguuucugcuccugugugggagauccugcaccacaggacuguauaaaggcguuuacgaacuccagacccuggagcuuaacauggaaacacugaauaugaccaugccucucucuuguacaaagaacaauagccaucacuauauuaugguggggaacgagaccggacuggagcuuacgcugaccaauacauccaucaucaaccauaaauucugcaaucucucugacgcgcacaagaaaaaccuguacgaucaugcucugaugagcauuaucuccaccuuucaccucucuauuccgaauuucaaccaguaugaagccaugagcugugacuuuaauggcggcaagaucuccguccaguacaaccugagccacucuuaugccggggaugcugccgaccauugcggaacaguggcuaauggcguucuucaaaccuucaugcggauggccuggggaggguccuacauugcgcuggauagcggcugugggcgcugggacugcaucaugacgucuuaccaguaucucauuauccagaacacaaccugggaggaucacugucaguuuuccagacccagcccuaucggauaccugggccuucugucucaacggacacgcgacauuuauaucuccagacggcuccugggcaccuucaccuggacacugagcgauuccgaagggaaggacacgcccggaggcuacugccucacccgcuggaugcugauugaggccgagcuuaaauguuuugggaacacagcuguggccaagugcaaugaaaaacaugaugaggaguucugcgacaugcugagacucuuugauuucaacaagcaggcuauccagcggcugaaagccccugcgcagaugucuauucaacuuaucaauaaggccgucaacgcucugaucaaugaccagcucgugaugaagaaccaucugcgcgacauuauguguauccccuauugcaauuacagcagauauugguaccugaaccacaccacaaccggacggacgucccucccuaaauguuggcuggugagcaauggcucuuaccuuaacgaaacacacuucuccgaugacauugaacagcaagccgauaauaugaucaccgagaugcugcagaaggaguauauggaacgccaggggaaaaccccgcucggacuggucgaccuguuuguuuucagcacaucuuuuuaccuuauuagcaucuuccuccaccuggugaagauccccacccauagacacauugugggcaaauccugcccuaagccccaucggcugaaccacaugggcaucuguucuugcgggcucuauaaacagccuggaguccccgugaaguggaagcgcugaggacuagucccuguucccagagcccacuuuuuuuucuuuuuuugaaauaaaauagccugucuuucagaucucaaaggcucuuuucagagccaccaaaaaaaaaaaaaaaaaaaaaaaaaaaaaaaaaaaaaaaaaaaaaaaaaaaaaaaaaaaaaaaaaaaaaaaaaaaaaaaaaaaaaaaaaaaaaaaaaaaaa

SEQ ID NO: 28831 - RNA, 1767 nt, Artificial Sequence
  mRNA product Design a-2 (hSL-A100) comprising derived and/or modified sequence from LASV(G733-SLE-2010;Clade IV)__AIT17154__GPCmut5 (opt5)
aggagaguccgcucagccagguugcagaagcggcuuagcguguguccuaaucuucucucugcguguagguaggccugugccgcaaacaagcuuaccaugggccagaucgugaccuucuuucaagaggucccccacguuauugaagaggugaugaacaucgugcugauugcccucagcauccuggcuguccuuaaggggcuguacaauuucgccacaugcggaauugugggccucguuuccuuucugcuucugugugggagaucuugcacgaccagccucuauaaaggaguguacgaacugcagacacuggagcucaacauggaaacccugaauaugacaaugccucuuuccuguaccaagaacaauucucaucacuauaucauggucggcaacgagacagggcuggagcucacccugacgaauaccagcaucauuaaccauaaauucugcaaucuuuccgacgcgcacaagaaaaaccuguacgaucaugcucucaugucuaucauuagcacauuucaccuguccaucccgaauuucaaccaguaugaagccaugagcugugacuuuaauggaggcaagauuucugugcaguacaaccugucccacagcuaugccggcgaugcugccaaucauugcgggaccaucgcuaacggaguucuccaaacauucaugcggauggccuggggcgggucuuacauugcgcuggacuccggaugugaucgcugggacugcaucaugaccagcuaccaguaucuuaucauucagaacacgacaugggaggaucacugucaguuuucuagacccuccccuaucggcuaccuggggcuccugagccaacggacccgcgacauuuauaucuccagacggcuucugggaacauucaccuggacccucucugauagcgaaggcaaggacacacccggcggguacugccugacgcgcuggaugcugauugaggccgagcucaaauguuuuggaaauaccgcuguggccaagugcaacgaaaaacaugaugaggaguucugcgacaugcugagacuuuuugauuucaauaagcaggcuauccagcggcugaaagccccugcgcagauguccauccaacucauuaacaaggccgucaaugcucugaucaacgaccagcuuauuaugaagaaucaucugcgcgacaucauguguauucccuauugcaacuacagcaaauauugguaccucaaucacacaaccacaggcaagaccucucugccuaaauguuggcugguguccaacgggagcuaccucaaugaaacgcacuucucugaugacaucgaacagcaagccgauaacaugaucacagagaugcugcagaaggaguauauggaaagacagggaaaaaccccgcuuggccugguggaccucuuugucuucagcaccuccuuuuaccugauuucuaucuuccugcaccuuguuaagauucccacacaucggcacgugguggggaaaagcugcccuaagccccaucgccucaaucacaugggaaucuguuccugcggccuguauggccagccugggguccccgugaaguggaaaagaugaggacuagucccuguucccagagcccacuuuuuuuucuuuuuuugaaauaaaauagccugucuuucagaucucaaaggcucuuuucagagccaccaaaaaaaaaaaaaaaaaaaaaaaaaaaaaaaaaaaaaaaaaaaaaaaaaaaaaaaaaaaaaaaaaaaaaaaaaaaaaaaaaaaaaaaaaaaaaaaaaaaaa

SEQ ID NO: 28832 - RNA, 1767 nt, Artificial Sequence
  mRNA product Design a-2 (hSL-A100) comprising derived and/or modified sequence from MOPV/LASV reassortant(IGS-1;Clade IV)__AFY05576__GPCmut5 (opt5)
aggagaguccgcucagccagguugcagaagcggcuuagcguguguccuaaucuucucucugcguguagguaggccugugccgcaaacaagcuuaccaugggccagaucgugaccuucuuucaagaggucccccacguuauugaagaggugaugaacaucgugcugauugcccucagcguccuggcugugcuuaaggggcuguacaauuucgccacaugcggacucguuggccuggugacguuucuucugcucugugggagauccugcaccacaucucuguauaaaggagucuacgaacugcagacccucgagcugaacauggaaacacuuaauaugaccaugccucugagcuguacaaagaacaauucccaucacuauaucauggugggcaacgagaccgggcucgagcugacgcuuaccaauacaucuauuaucaaccauaaauucugcaaucugagcgacgcgcacaagaaaaaccucuacgaucaugcucugauguccaucauuucuaccuuucaccugagcaucccgaauuucaaccaguaugaagccauguccugugacuuuaauggaggcaagauuagcguucaguacaaccucucucacuccuaugccggcgaugcugccaaucauugcgggacaguggcuaacggaguccugcaaaccuucaugcggauggccuggggcgggagcuacaucgcgcuugacucuggauguggcaacugggauugcauuaugacguccuaccaguaucugaucauucagaauacaaccugggaggaccacugucaguuuagccgccccucuccuaucggguaccucggacugcuuucccaaagaacacgggauaucuauauuagccgcagacugcucggcaccuucaccuggacacuguccgacucugaaggcgaggauacgcccgggggauacugccugacccgguggaugcucaucgaggccgaacugaaguguuuuggcaacacagcuguggccaaaugcaaugagaagcaugacgaagaguucugcgauaugcuucgccuguuugacuucaacaaacaggcuauucagagacucaaggccccugcgcagaugagcauccaacugauuaauaaagccgugaacgcucuuaucaaugaucagcugaucaugaagaaccaccuccgggacauuauguguauccccuauugcaauuacuccaaguauugguaccugaaccacaccacaaccgggcgcacgagccugccuaaauguuggcucgucucuaauggauccuaccugaacgaaacacauuucagcgacgauauugagcagcaagccgacaauaugaucaccgagaugcuucagaaggaauauauggagagacagggcaaaaccccgcuggggcucguugaucuguuuguguucucuaccagcuuuuaccugauuuccaucuuccuucaccucgugaagauccccacacaucggcacauugucggaaaaucuugcccuaagccccaucgccugaaccacaugggcaucuguagcugcggccuguauaaacagccuggggugcccguuaaguggaagagaugaggacuagucccuguucccagagcccacuuuuuuuucuuuuuuugaaauaaaauagccugucuuucagaucucaaaggcucuuuucagagccaccaaaaaaaaaaaaaaaaaaaaaaaaaaaaaaaaaaaaaaaaaaaaaaaaaaaaaaaaaaaaaaaaaaaaaaaaaaaaaaaaaaaaaaaaaaaaaaaaaaaaa

SEQ ID NO: 28833 - RNA, 1767 nt, Artificial Sequence
  mRNA product Design a-2 (hSL-A100) comprising derived and/or modified sequence from LASV(LM765-SLE-2012;Clade IV)__AIT17814__GPCmut5 (opt5)
aggagaguccgcucagccagguugcagaagcggcuuagcguguguccuaaucuucucucugcguguagguaggccugugccgcaaacaagcuuaccaugggccagaucgugaccuucuuucaagaggucccccacguuauugaagaggugaugaacaucgugcugauugcccucagcauccuggcuguccuuaaggggcuguacaauuucgccacaugcggacucgugggccugguuacguuucuucugcucugugggagauccugcaccacaucucuguauaaaggaguguacgaacugcagacccucgagcugaacauggaaacacuuaauaugaccaugccucugagcuguacaaagaacaauucccaucacuauauuauggucggcaacgagaccgggcucgagcugacgcuuaccaauacaucuaucaucgaccauaaauucugcaaccugagcgaugcgcaccggaagaaucucuacgaccaugcucugauguccauuaucucuaccuuucaccugagcauuccgaacuucaaucaguaugaagccauguccugugauuuuaacggaggcaaaaucagcgugcaguacaaucucucucacuccuaugccaaggacgcugccgaucauugcggcacaguugcuaacggggugcugcaaaccuucaugcgcauggccuggggaggcagcuacauugcgcuugacucuggguguggaagaugggauugcaucaugacguccuaccaguaucugauuauccagaauacaaccugggaggaccacugucaguuuagccggcccucuccuaucggcuaccucgggcugcuuucccaacgcacaagagauauuuauaucagccggcgccugcucggaaccuucaccuggacacuguccgacucugaaggcaaggauacgcccggcggguacugccugaccagauggaugcucauugaggccgagcugaaauguuuuggaaacacagcugucgccaagugcaacgaaaaacaugacgaggaguucugcgauaugcuucggcuguuugacuucaauaagcaggcuauccagcgccucaaagccccugcgcagaugagcauucaacugaucaacaaggccgugaaugcucuuaucaacgaccagcugauuaugaagaaucaccucagagauaucauguguauucccuauugcaacuacuccaaauauugguaccugaaucacaccacaaccggcaagacgagccugccuaaauguuggcucgugucuaacggguccuaccugaaugaaacacauuucagcgacgauaucgaacagcaagccgacaacaugauuaccgagaugcuucagaaggaguauauggaacggcagggaaaaaccccgcugggccucgucgaucuguuuguuuucucuaccagcuuuuaccugaucuccaucuuccuucaccucgugaagauucccacacaucgccacaucguggggaaaccuugccccaagccucauagacugaaucacaugggaauuuguucuugcggccuguauaagcagcccggcgucccggugaaauggaagcggugaggacuagucccuguucccagagcccacuuuuuuuucuuuuuuugaaauaaaauagccugucuuucagaucucaaaggcucuuuucagagccaccaaaaaaaaaaaaaaaaaaaaaaaaaaaaaaaaaaaaaaaaaaaaaaaaaaaaaaaaaaaaaaaaaaaaaaaaaaaaaaaaaaaaaaaaaaaaaaaaaaaaa

SEQ ID NO: 28834 - RNA, 1767 nt, Artificial Sequence
  mRNA product Design a-2 (hSL-A100) comprising derived and/or modified sequence from LASV(LM776-SLE-2012;Clade IV)__AIT17824__GPCmut5 (opt5)
aggagaguccgcucagccagguugcagaagcggcuuagcguguguccuaaucuucucucugcguguagguaggccugugccgcaaacaagcuuaccaugggccagaucgugaccuucuuucaagaggucccccacguuauugaagaggugaugaacaucgugcugauugcccucagcauccuggcuguccuuaaggggcuguacaauuucgccacaugcggacucgugggccugguuacguuucuucugcucugugggagauccugcaccacaucuguguauaaaggagucuacgaacugcagacccuggagcucaacauggaaacacugaauaugaccaugccucuuagcuguacaaagaacaauucccaucacuauauuauggugggcaacgagaccgggcuggagcucacgcugaccaauacaucuaucaucaaccauaaauucugcaaucuuagcgacgcgcacaagaaaaaccuguacgaucaugcucucauguccauuaucucuaccuuucaccugagcauuccgaauuucaaccaguaugaagccauguccugugacuuuaauggaggcaagaucagcguucaguacaaccugucucacuccuaugccggcgaugcugccaaucauugcgggacaguggcuaacggaguccuccaaaccuucaugcggauggccuggggcgggagcuacauugcgcuggacucuggauguggcaagugggauugcaucaugacguccuaccaguaucuuauuauccagaacacaaccugggaggaccacugucaguuuagccgccccucuccuaucggguaccugggacuccugucccaaagaacacgggauauuuauaucagccgcagacuucugggcaccuucaccuggacacucuccgacucugaaggcaaagauacgcccgggggauacugccugacccgguggaugcugauugaggccgagcucaaguguuuuggcaauacagcuguggccaaaugcaacgaaaagcaugacgaggaguucugcgauaugcugcgccuuuuugacuucaauaaacaggcuauccagagacugaaggccccugcgcagaugagcauucaacucaucaacaaggccgugaaugcucugaucaacgaucagcuuauuaugaaaaaucaucugcgggacaucauguguauucccuauugcaacuacuccaaguauugguaccucaaucacaccacaaccgggaaaacgagccugccuaaguguuggcuggucucuaacggauccuaccucaaugaaacacacuucagcgacgauaucgaacagcaagccgacaacaugauuaccgagaugcugcagaaagaguauauggaacgccagggcaagaccccgcuugggcugguugaucucuuuguguucucuaccagcuuuuaccugaucuccaucuuccugcaccuugugaaaauucccacacauagacacaucgucggaaagucuugcccuaagccccaucggcucaaucacaugggcauuuguagcugcggccuguauaaacagccuggggugcccguucgcuggaagagaugaggacuagucccuguucccagagcccacuuuuuuuucuuuuuuugaaauaaaauagccugucuuucagaucucaaaggcucuuuucagagccaccaaaaaaaaaaaaaaaaaaaaaaaaaaaaaaaaaaaaaaaaaaaaaaaaaaaaaaaaaaaaaaaaaaaaaaaaaaaaaaaaaaaaaaaaaaaaaaaaaaaaa

SEQ ID NO: 28835 - RNA, 1767 nt, Artificial Sequence
  mRNA product Design a-2 (hSL-A100) comprising derived and/or modified sequence from LASV(Mad39;Clade IV)__ANH09722__GPCmut5 (opt5)
aggagaguccgcucagccagguugcagaagcggcuuagcguguguccuaaucuucucucugcguguagguaggccugugccgcaaacaagcuuaccaugggccagaucgugaccuucuuucaagaggucccccacguuauugaagaggugaugaacaucgugcugauugcccucagcauccuggcuguccuuaaggggcuguacaauguggccacaugcggacucauuggccugguuacguuccuucugcucugugggagauccugcaccacaacccuguauaaaggaguguacgaacugcaggcgcucgagcugaacauggaaacacuuaauaugaccaugccucugucuuguacaaagaacaauagccaucacuauauccgggucggcaacgagaccgggcucgagcugacgcuuaccaauacaucccugaucaaccauaaauuuugcaaucucucugacgcucacaagaaaaaccuguacgaucaugcccugaugagcauuaucuccaccuuccaccucucuauuccgaauuuuaaccaguaugaagccaugagcugugacuucaaugauggaaagaucuccgugcaguacaaccugagccacacauaugcuggcgacaccgccaaucauugcggcacgguugcuaacggggugcuucaaacauuuaugcgcauggccuggggaggcucuuacauugcgcuggauuccggguguggaggcugggacugcaucaugaccagcuaccaguaucucauuauccagaacacaaccugggaggaucacugucaguucucuagacccuccccuaucggguaccugggacuucugagccaacggacccgcgacauuuauaucucuagacggcuccugggcacauuuacguggacccuguccgauagcgaaggcaaggacacacccgggggauacugccucacccgcuggaugcugauugaggccgagcuuaaauguuucggcaauacagcugucgccaagugcaacgaaaaacaugaugaggaauuuugcgacaugcugagacucuucgauuuuaauaagcaggcuauccagcggcugaaagccccugcgcagauguccauucaacuuaucaacaaggccgugaaugcucugaucaacgaccagcucauuaugaagaaucaucugcgcgacaucauguguauucccuauugcaacuacucuaaauauugguaccugaaucacaccgugacggggaagacaagccucccuaaauguuggcuggucuccaacggaagcuaccuuaaugagacccacuucucugaugacaucgaacagcaagccgauaacaugauuaccgagaugcugcagaaggaguauauggaaagacagggcaaaacaccgcucgggcugguugaccuguucguguuuuccaccagcuucuaccuuaucucuaucuuucuccaccuggugaagauucccacacaucggcacgucgugggaaaaccuugccccaagccucaucgccugaaucacaugggcaucuguagcugcggcuucuauaagcagcccgggguuccggugagauggaaacggugaggacuagucccuguucccagagcccacuuuuuuuucuuuuuuugaaauaaaauagccugucuuucagaucucaaaggcucuuuucagagccaccaaaaaaaaaaaaaaaaaaaaaaaaaaaaaaaaaaaaaaaaaaaaaaaaaaaaaaaaaaaaaaaaaaaaaaaaaaaaaaaaaaaaaaaaaaaaaaaaaaaaa

SEQ ID NO: 28836 - RNA, 1767 nt, Artificial Sequence
  mRNA product Design a-2 (hSL-A100) comprising derived and/or modified sequence from LASV(Z0947-SLE-2011;Clade IV)__AIT17840__GPCmut5 (opt5)
aggagaguccgcucagccagguugcagaagcggcuuagcguguguccuaaucuucucucugcguguagguaggccugugccgcaaacaagcuuaccaugggccagaucgugaccuucuuucaagaggucccccacguuauugaagaggugaugaacaucgugcugauugcccucagcauccuggcuguccuuaaggggcuguacaauuucgccacaugcggacucgugggccugguuacguuucuucugcucugugggagauccugcaccauuucucuguauaaaggaguguacgaacugcagacacucgagcugaacauggaaacccuuaauaugacaaugccucugagcuguaccaagaacaauucccaucacuauaucauggucggcaacgagacagggcucgagcugacccuuacgaauaccucuaucauuaaccauaaauucugcaaucugagcgacgcgcacaagaaaaaccucuacgaucaugcucugauguccaucauuucuacauuucaccugagcaucccgaauuucaaccaguaugaagccauguccugugacuuuaauggaggcaagauuagcgugcaguacaaccucucucacuccuaugccggcgaugcugccaaucauugcgggaccguugcuaacggagugcugcaaacauucaugcggauggccuggggcgggagcuacaucgcgcuugacucuggaugugaucgcugggacugcauuaugaccuccuaccaguaucugaucauccagaacacgacaugggaggaucacugucaguuuagcagacccucuccuauuggcuaccucgggcugcuuucccaacggacccgcgacaucuauauuagcagacggcugcucggaacauucaccuggacccuguccgauucugaaggcaaggacacacccggcggguacugccugacgcgcuggaugcucaucgaggccgagcugaaauguuuuggaaauaccgcugucgccaagugcaacgaaaaacaugaugaggaguucugcgacaugcuuagacuguuugauuucaauaagcaggcuauucagcggcucaaagccccugcgcagaugagcauccaacugaucaacaaggccgugaaugcucuuauuaacgaccagcugaucaugaagaaucaccuccgcgacauuauguguauccccuauugcaacuacuccaaauauugguaccugaaucacacaaccacaggcaagaccagccugccuaaauguuggcucgugucuaacggguccuaccugaaugaaacgcauuucagcgaugacauugaacagcaagccgauaacaugaucacagagaugcuucagaaggaguauauggaaagacagggaaaaaccccgcugggccucgucgaccuguuuguuuucucuaccagcuuuuaccugaucuccauuuuccuucaccucgugaagauccccacacaucggcacauuguggggaaaccuugccccaagccucaucgccugaaucacaugggaaucuguucuugcggccuguauaagcagcccggcgucccggugaaauggaagagaugaggacuagucccuguucccagagcccacuuuuuuuucuuuuuuugaaauaaaauagccugucuuucagaucucaaaggcucuuuucagagccaccaaaaaaaaaaaaaaaaaaaaaaaaaaaaaaaaaaaaaaaaaaaaaaaaaaaaaaaaaaaaaaaaaaaaaaaaaaaaaaaaaaaaaaaaaaaaaaaaaaaaa

SEQ ID NO: 28837 - RNA, 1743 nt, Artificial Sequence
  mRNA product Design a-2 (A100) comprising derived and/or modified sequence from LASV(Josiah;Clade IV)__NP_694870__GPCmut5 (opt1)
aggagaguccgcucagccagguugcagaagcggcuuagcguguguccuaaucuucucucugcguguagguaggccugugccgcaaacaagcuuaccaugggccagaucgugaccuucuuccaggaggucccccacgugaucgaggaggugaugaacaucguccugaucgcccucagcgugcuggccgugcugaaggggcucuacaacuucgcgaccugcggccuggucgggcuggugacguuccuccugcugugcggccgcuccugcaccaccagccucuacaaggggguguacgagcugcagacccuggagcucaacauggagacgcugaacaugaccaugccgcuguccugcaccaagaacaacagccaccacuacaucauggucggcaacgagaccggccucgagcugacgcugaccaacaccuccaucaucaaccacaaguucugcaaccucagcgacgcccacaagaagaaccuguacgaccacgcccugauguccaucaucagcaccuuccaccucuccauccccaacuucaaccaguacgaggccaugagcugcgacuucaacgggggcaagaucuccgugcaguacaaccugagccacuccuacgccggggacgcggccaaccacugcggcacgguggccaacgggguccugcagaccuucaugcggauggccuggggcggcagcuacaucgcgcucgacuccgggugcggcaacugggacugcaucaugaccagcuaccaguaccugaucauccagaacaccacgugggaggaccacugccaguucucccggcccagccccaucggguaccugggccuccugucccagcgcacccgggacaucuacaucagccgccggcugcucggcaccuucaccuggacgcugagcgacuccgaggggaaggacaccccgggcggguacugccugacccgcuggaugcucaucgaggccgagcugaagugcuucggcaacaccgccguggccaagugcaacgagaagcacgacgaggaguucugcgacaugcugcggcuguucgacuucaacaagcaggccauccagcgccugaaggcgcccgcccagaugagcauccagcugaucaacaaggccgugaacgcccucaucaacgaccagcugaucaugaagaaccaccuccgggacaucaugugcauccccuacugcaacuacuccaaguacugguaccucaaccacacgaccaccggccgcaccagccugcccaagugcuggcuggucuccaacggcagcuaccucaacgagacgcacuucuccgacgacaucgagcagcaggccgacaacaugaucaccgagaugcugcagaaggaguacauggagcggcaggggaagacgccccugggccucguggaccuguucguguucagcaccuccuucuaccugaucagcaucuuccugcaccucgucaagaucccgacccaccgccacaucguggggaaguccugccccaagccccaccggcugaaccacaugggcaucugcagcugcgggcuguacaagcagcccggcgugccggucaaguggaagcgcugaggacuagucccuguucccagagcccacuuuuuuuucuuuuuuugaaauaaaauagccugucuuucagaucuaaaaaaaaaaaaaaaaaaaaaaaaaaaaaaaaaaaaaaaaaaaaaaaaaaaaaaaaaaaaaaaaaaaaaaaaaaaaaaaaaaaaaaaaaaaaaaaaaaaa

SEQ ID NO: 28838 - RNA, 1740 nt, Artificial Sequence
  mRNA product Design a-2 (A100) comprising derived and/or modified sequence from LASV(LP;Clade I)__AAF86701__GPCmut5 (opt1)
aggagaguccgcucagccagguugcagaagcggcuuagcguguguccuaaucuucucucugcguguagguaggccugugccgcaaacaagcuuaccaugggccagaucaucaccuucuuccaggaggugccccacgucaucgaggaggugaugaacaucgugcugaucgcccucagccugcuggccauccucaaggggcuguacaacaucgcgaccugcggcaucaucgggcuggucgccuuccucuuccugugcggcaaguccugcagccugacgcucaagggcggguacgagcugcagacccuggagcucaacauggagacccugaacaugaccaugccgcuguccugcacgaagaacagcucccaccacuacauccgcgugggcaacgagaccgggcucgagcugacccugaccaacacgagcaucaucaaccacaaguucugcaaccucuccgacgcccacaagaagaaccuguacgaccacgcccugaugagcaucaucuccaccuuccaccucagcauccccaacuucaaccaguacgaggccauguccugcgacuucaacggcgggaagaucagcgugcaguacaaccugucccacagcuacgcgggcgacgccgccgagcacugcgggaccgucgccaacggcgugcugcagaccuucaugcggauggcguggggcgggcgcuacaucgcccucgacuccggcugcgggaacugggacugcaucaugacgagcuaccaguaccugaucauccagaacaccaccugggaggaccacugccaguucucccggcccagccccaucggcuaccugggccuccugucccagcgcacccgggacaucuacaucagccgccggcugcucgggacguucaccuggacccugagcgacuccgagggcaacgagacccccgggggcuacugccugacgcgcuggaugcucaucgaggccgagcugaagugcuucgggaacaccgccguggccaagugcaacgagaagcacgacgaggaguucugcgacaugcugcggcuguucgacuucaacaagcaggcgauccgccggcugaaggcccccgcccagaugagcauccagcugaucaacaaggccgucaacgcccucaucaacgaccagcugaucaugaagaaccaccuccgcgacaucaugugcauccccuacugcaacuacuccaaguacugguaccucaaccacaccagcuccggccggaccagccugcccaagugcuggcugaucuccaacgggagcuaccucaacgagacgcaguucuccgacgacaucgagcagcaggcggacaacaugaucaccgagaugcugcagaaggaguacaucgagcgccagggcaagaccccgcuggggcucguggacaucuucaucuucagcaccuccuucuaccugaucagcaucuuccugcaccugaucaagaucccgacgcaccggcacaucgugggcaagcccugccccaagccccaccgccucaaccacaugggggucugcuccugcggccuguacaagcacccgggcgugcccaccaaguggaagcggugaggacuagucccuguucccagagcccacuuuuuuuucuuuuuuugaaauaaaauagccugucuuucagaucuaaaaaaaaaaaaaaaaaaaaaaaaaaaaaaaaaaaaaaaaaaaaaaaaaaaaaaaaaaaaaaaaaaaaaaaaaaaaaaaaaaaaaaaaaaaaaaaaaaaa

SEQ ID NO: 28839 - RNA, 1740 nt, Artificial Sequence
  mRNA product Design a-2 (A100) comprising derived and/or modified sequence from LASV(803213;Clade II)__AAF86703__GPCmut5 (opt1)
aggagaguccgcucagccagguugcagaagcggcuuagcguguguccuaaucuucucucugcguguagguaggccugugccgcaaacaagcuuaccaugggccagaucaucaccuucuuccaggaggugccccacgucaucgaggaggugaugaacaucgugcugaucgcccucagccugcuggccauccucaaggggaucuacaacgucgcgaccugcggccuguucgggcugaucuccuuccuccugcugugcggccgcagcugcuccgugacguacaaggggguguacgagcuccagacccuggagcugaacauggccaaccucaacaugaccaugccgcugagcugcaccaagaacaacucccaccacuacaucauggucggcaacgagacgggccuggagcucacccugaccaacaccagcaucaucaaccacaaguucugcaaccuguccgacgcccacaagaagaaccucuacgaccacgcccugaugagcaucaucuccacguuccaccugagcauccccaacuucaaccaguacgaggccauguccugcgacuucaacgggggcaagaucagcgugcaguacaaccucucccacagcuucgcgguggacgccgccaaccacugcgggaccaucgccaacggcguccugcagaccuucaugcggauggcguggggcggguccuacaucgcccuggacagcggcugcgggaacugggacugcaucaugaccuccuaccaguaccucaucauccagaacacgaccugggaggaccacugccaguucagccgccccucccccaucggcuaccuggggcugcucagccagcggacccgcgacaucuacaucagccggcgccugcugggcaccuucacguggacccucuccgacagcgagggcaacgaggcccccgggggcuacugccugacccgguggaugcugaucgaggccgagcucaagugcuucgggaacaccgccguggcgaagugcaacgagaagcacgacgaggaguucugcgacaugcugcgccuguucgacuucaacaagcaggccaucaagcggcucaagacgcccgcccagauguccauccagcugaucaacaaggccgugaacgcccugaucaacgaccagcucaucaugaagaaccaccuccgcgacaucaugugcauccccuacugcaacuacagccgguacugguaccugaaccacaccgucaccgggaagaccucccugccccgcugcuggcuggugagcaacggcuccuaccugaacgagacgcacuucagcgacgacaucgagcagcaggcggacaacaugaucaccgagaugcuccagaaggaguacauggaccggcagggcaagaccccgcuggggcugguggaccucuucgucuucuccaccagcuucuaccugaucuccaucuuccugcaccuggugaagaucccgacgcaccgccacaucgugggcaagcccugccccaagccccaccggcucaaccacauggggaucugcagcugcggccuguacaagcacccggggguccccgugaaguggaagcgcugaggacuagucccuguucccagagcccacuuuuuuuucuuuuuuugaaauaaaauagccugucuuucagaucuaaaaaaaaaaaaaaaaaaaaaaaaaaaaaaaaaaaaaaaaaaaaaaaaaaaaaaaaaaaaaaaaaaaaaaaaaaaaaaaaaaaaaaaaaaaaaaaaaaaa

SEQ ID NO: 28840 - RNA, 1740 nt, Artificial Sequence
  mRNA product Design a-2 (A100) comprising derived and/or modified sequence from LASV(GA391;Clade III)__CAA36645__GPCmut5 (opt1)
aggagaguccgcucagccagguugcagaagcggcuuagcguguguccuaaucuucucucugcguguagguaggccugugccgcaaacaagcuuaccaugggccagaucgugaccuucuuccaggaggucccccacgugaucgaggaggugaugaacaucguccugaucgcccucagcauccuggccauccugaaggggcucuacaacguggcgaccugcggccugaucgggcuggugacguuccuccugcuguccggccgcagcugcucccucaucuacaaggggaccuacgagcugcagacccuggagcucaacauggagacccugaacaugacgaugccgcugagcugcaccaagaacaacucccaccacuacauccgggucggcaacgagaccggccucgagcugacccugacgaacaccagcauccucaaccacaaguucugcaaccuguccgacgcccacaagcgcaaccuguacgaccacagccucauguccaucaucagcaccuuccaccuguccauccccaacuucaaccaguacgaggccaugagcugcgacuucaacgggggcaagaucaccgugcaguacaaccugucccacagcuucgccguggacgccgcggggcacugcggcacgcucgccaacgggguccugcagaccuucaugcggauggccuggggcggcuccuacaucgcccuggacagcgggugcggcaacugggacugcaucaugaccuccuaccaguaccucaucauccagaacaccacgugggacgaccacugccaguucagccggcccucccccaucggguaccugggccugcucagccagcgcacccgggacaucuacaucagccgccggcugcugggcaccuucaccuggacgcucuccgacagcgaggggaacgagaccccgggcggguacugccugacccgcuggaugcugaucgaggcggagcucaagugcuucggcaacaccgccguggccaagugcaacgagaagcacgacgaggaguucugcgacaugcugcggcuguucgacuucaacaagcaggccauccgccggcucaagacgcccgcccagauguccauccagcugaucaacaaggcggugaacgcccugaucaacgaccagcucaucaugaagaaccaccuccgcgacaucaugugcauccccuacugcaacuacagccgguacugguaccugaaccacaccuccaccggcaagaccagccugccccgcugcuggcugaucuccaacggcagcuaccugaacgagacgaaguucuccgacgacaucgagcagcaggccgacaacaugaucaccgagaugcuccagaaggaguacaucgaccggcaggggaagacgccccugggccuggucgaccuguucguguucagcaccuccuucuaccucaucagcaucuuccugcaccuggugaagaucccgacccaccgccacaucgucgggaagcccugccccaagccccaccggcucaaccacaugggcaucugcuccugcgggcuguacaagcagccgggcgugcccgugcgcuggaagcggugaggacuagucccuguucccagagcccacuuuuuuuucuuuuuuugaaauaaaauagccugucuuucagaucuaaaaaaaaaaaaaaaaaaaaaaaaaaaaaaaaaaaaaaaaaaaaaaaaaaaaaaaaaaaaaaaaaaaaaaaaaaaaaaaaaaaaaaaaaaaaaaaaaaaa

SEQ ID NO: 28841 - RNA, 1743 nt, Artificial Sequence
  mRNA product Design a-2 (A100) comprising derived and/or modified sequence from LASV(AV;Clade V)__CCA30314__GPCmut5 (opt1)
aggagaguccgcucagccagguugcagaagcggcuuagcguguguccuaaucuucucucugcguguagguaggccugugccgcaaacaagcuuaccaugggccagaucgugaccuucuuccaggaggucccccacgugaucgaggaggugaugaacaucguccugaucgcccucagcauccuggccgugcugaaggggcucuacaacaucgcgaccugcggccugaucgggcugaucacguuccuccugcugugcggccgcuccugcagcuccaaccucuacaaggggguguacgagcugcagagccuggaccucaacauggagacccugaacaugaccaugccgcuguccugcaccaagaacaacagccaccacuacauccgggucggcaacgacacgggccucgagcugacccugaccaacaccuccauccucaaccacaaguucugcaaccugagcgacgcccacaagaaggaccuguacgaccacgcccucauguccaucaucagcacguuccaccuguccauccccaacuucaaccaguacgaggccaugagcugcgacuucaacgggggcaagaucuccgugcaguacaaccugagccacuccuacgccaucgacgcggccaaccacugcgggaccguggccaacggcauccuccagaccuucaugcgcauggccuggggcgggagcuacaucgcgcuggacuccggcugcgggaacugggacugcaucaugaccagcuaccaguaccugaucauccagaacacgaccugggagaaccacugccaguucucccgccccagccccaucggcuaccucgggcugcugagccagcggacccgcgacaucuacaucucccggcgccuccugggcaccuucacguggacccugagcgacuccgagggcaacgccacccccgggggcuacugccucacccgguggaugcugaucgaggccgagcugaagugcuucgggaacacggccgucgccaagugcaacgagaagcacgacgaggaguucugcgacaugcuccgccuguucgacuucaacaagcaggcgaucagccggcugaagucccccgcccagaugagcauccagcucaucaacaaggccgugaacgcccugaucaacgaccagcugaucaugaagaaccaccuccgcgacaucaugugcauccccuacugcaacuacuccaaguacugguaccugaaccacaccaucaccgggaagaccagccugcccaagugcuggcucguguccaacggcagcuaccugaacgagacgcacuucuccgacgacaucgagcagcaggccgacaacaugaucaccgagaugcugcagaaggaguacauggagcggcagggcaagaccccgcucgggcuggucgaccuguucguguucagcaccuccuucuaccugaucagcaucuuccuccgccuggugaagaucccgacgcaccggcacaucgucggcaagcccugccccaagccccaccgccugaaccacauggggaucugcuccugcggccucuacaagcagccgggggugcccgugcgguggaagcgcugaggacuagucccuguucccagagcccacuuuuuuuucuuuuuuugaaauaaaauagccugucuuucagaucuaaaaaaaaaaaaaaaaaaaaaaaaaaaaaaaaaaaaaaaaaaaaaaaaaaaaaaaaaaaaaaaaaaaaaaaaaaaaaaaaaaaaaaaaaaaaaaaaaaaa

SEQ ID NO: 28842 - RNA, 1740 nt, Artificial Sequence
  mRNA product Design a-2 (A100) comprising derived and/or modified sequence from LASV(Togo/2016/7082;Clade VI)__AMR44577__GPCmut5 (opt1)
aggagaguccgcucagccagguugcagaagcggcuuagcguguguccuaaucuucucucugcguguagguaggccugugccgcaaacaagcuuaccaugggccagaucaucaccuucuuccaggaggugccccacgucaucgaggaggugaugaacaucgugcugaucgcccucagccugcuggccauccucaagggggucuacaacguggcgaccugcggcaucaucgggcuggugacguuccuguuccucugcggccgcuccugcagccugaucuacaagggguccuacgagcugcagacccucgagcugaacauggagacccugaacaugaccaugccgcucagcugcacgaagaacuccagccaccacuacauccgggucggcaacgagaccggccuggagcugacccucaccaacacguccaucaucaaccacaaguucugcaaccugagcgacgcccacaagcgcaaccuguacgaccacgcccucauguccauccugagcaccuuccaccuguccauccccaacuucaaccaguacgaggccaugagcugcgacuucaacgggggcaagaucuccgugcaguacaaccucagccacgccuacgcgguggacgccgccgagcacugcgggaccgucgccaacggcgugcugcagaccuucaugcggauggcguggggcggguccuacaucgcccuggacagcggcugcgggaacugggacugcaucaugacguccuaccaguaccucaucauccagaacaccaccugggaggaccacugccaguucagccggcccucccccaucggcuaccuggggcugcucagccagcgcacccgggacaucuacaucagccgccggcugcugggcacguucaccuggacccucuccgacagcgagggcaacgagacccccgggggcuacugccugacgcgcuggaugcugaucgaggccgagcucaagugcuucgggaacaccgccguggccaagugcaacgagaagcacgacgaggaguucugcgacaugcugcggcuguucgacuucaacaagcaggcgauccagcgccucaagucccccgcccagaugagcauccagcugaucaacaaggccgucaacgcccugaucaacgaccagcucaucaugaagaaccaccuccgggacaugaugugcauccccuacugcaacuacuccaaguacugguaccugaaccacaccagcuccgggcgcaccagccugcccaagugcuggcugguguccaacggcagcuaccugaacgagacgcacuucuccgacgacaucgagcagcaggccgacaacaugaucaccgagaugcuccagaaggaguacaucgaccggcagggcaagaccccgcuggggcugguggaccucuucgucuucagcaccuccuucuaccugaucagcaucuuccugcaccugaucaagaucccgacgcaccgccacaucgugggcaagcccugccccaagccccaccggcucaaccacauggggaucugcuccugcggccuguacaagcagccgggggugcccacccgcuggaagcggugaggacuagucccuguucccagagcccacuuuuuuuucuuuuuuugaaauaaaauagccugucuuucagaucuaaaaaaaaaaaaaaaaaaaaaaaaaaaaaaaaaaaaaaaaaaaaaaaaaaaaaaaaaaaaaaaaaaaaaaaaaaaaaaaaaaaaaaaaaaaaaaaaaaaa

SEQ ID NO: 28843 - RNA, 1740 nt, Artificial Sequence
  mRNA product Design a-2 (A100) comprising derived and/or modified sequence from LASV(KAK-428;Clade n.d. (VII))__ANH09740__GPCmut5 (opt1)
aggagaguccgcucagccagguugcagaagcggcuuagcguguguccuaaucuucucucugcguguagguaggccugugccgcaaacaagcuuaccaugggccagaucgugaccuucuuccaggaggucccccacgugaucgaggaggugaugaacaucguccugaucgcccucagccugcuggccauccucaaggggcuguacaacuucgcgaccugcggcgugaucgggcugaucacguuccuccugcugugcggccgcuccugcagcgccaccuacaaggggcaguacgagcuccagacccuggagcugaacauggagucccucaacaugaccaugccgcugagcugcacgaagaacaacucccaccacuacauccgggccggcaacaacaccggccuggagcucacccugaccaacacgagcaucaucucccacaaguucugcaaccugagcgacgcccacaagaagaaccucuacgaccacacccugauguccaucaucaccaccuuccaccugagcauccccaacuucaaccaguacgaggccauguccugcgacuucaacgggggcaagaucagcauccaguacaaccucucccacagcuacgcgggggacgccgcccagcacugcggcacgguggccaacgggguccugcagaccuucaugcgcauggcguggggcggcuccuaccuggcccucgacagcgggugccgcggcugggacugcaucaucuccagcuaccaguaccugaucauccagaacaccaccugggacgaccacugccaguucucccggcccagccccaucggguaccugggcuucgugagccagaagacgcgcgacaucuacaucucccggcgccuccugggcaccuucaccuggacccugagcgacuccgaggggcacgacaugccgggcggguacugccucacgcgguggaugcugaucgaggccgaccugaagugcuucggcaacaccgccguggccaagugcaacgagaagcacgacgaggaguucugcgacauguggcgccucuucgacuucaacaagcaggcgauccagcggcugaaggcccccgcccagaugaacauccagcugaucaacaaggccgucaacgcccucaucaacgaccagcugaugaugaagaaccaccuccgcgacaucaugugcauccccuacugcaacuacagcaaguucugguaccugaacaacaccaccacgggccggaccucccugccccgcugcuggcugaucagcaacggcuccuaccucaacgagacccacuucagcgacgacaucgagcagcaggcggacaacaugaucaccgagaugcugcagaaggaguacauggaccggcaggggaagacgccccugggccucguggaccuguucguguucuccaccagcuucuaccugaucaccaucuuccuccaccuggucaagaucccgacccaccgccacaucguggggaagcccugccccaagccccaccggcugaaccacaugggcaucugcuccugcgggcuguacaagcagccgggcgugcccguccgcuggaagcggugaggacuagucccuguucccagagcccacuuuuuuuucuuuuuuugaaauaaaauagccugucuuucagaucuaaaaaaaaaaaaaaaaaaaaaaaaaaaaaaaaaaaaaaaaaaaaaaaaaaaaaaaaaaaaaaaaaaaaaaaaaaaaaaaaaaaaaaaaaaaaaaaaaaaa

SEQ ID NO: 28844 - RNA, 1740 nt, Artificial Sequence; identical to SEQ ID NO: 28838
  mRNA product Design a-2 (A100) comprising derived and/or modified sequence from LASV(Pinneo-NIG-1969;Clade I)__AIT17836__GPCmut5 (opt1)

SEQ ID NO: 28845 - RNA, 1740 nt, Artificial Sequence
  mRNA product Design a-2 (A100) comprising derived and/or modified sequence from LASV(ISTH0009-NIG-2011;Clade II)__AIT17404__GPCmut5 (opt1)
aggagaguccgcucagccagguugcagaagcggcuuagcguguguccuaaucuucucucugcguguagguaggccugugccgcaaacaagcuuaccaugggccagaucaucaccuucuuccaggaggugccccacgucaucgaggaggugaugaacaucgugcugaucgcccucagccugcuggccauccucaaggggaucuacaacgucgcgaccugcggccuguucgggcugguguccuuccuccugcugugcggccgcagcugcuccacgaccuacaaggggguguacgagcuccagacccuggagcuggacauggccagccucaacaugaccaugccgcuguccugcacgaagaacaacagccaccacuacaucauggucggcaacgagaccggccuggagcucacccugaccaacacguccaucaucaaccacaaguucugcaaccugagcgacgcccacaagaagaaccucuacgaccacgcccugauguccaucaucagcaccuuccaccuguccauccccaacuucaaccaguacgaggccaugagcugcgacuucaacgggggcaagaucuccgugcaguacaaccucagccacgcguacgccguggacgccgccaaccacugcgggaccaucgcgaacggcguccugcagaccuucaugcggauggccuggggcggguccuacaucgcccuggacagcggcugcggguccugggacugcaucaugacgagcuaccaguaccucaucauccagaacaccaccugggaggaccacugccaguucucccgccccagccccaucggcuaccuggggcugcucagccagcggacccgcgacaucuacaucucccggcgccugcugggcacguucaccuggacccucagcgacuccgagggcaacgagacccccgggggcuacugccugacgcgguggaugcugaucgaggccgagcucaagugcuucgggaacaccgccguggcgaagugcaacgagaagcacgacgaggaguucugcgacaugcugcgccuguucgacuucaacaagcaggccauccggcgccucaagacccccgcccagaugagcauccagcugaucaacaaggccgugaacgcccugaucaacgaccagcucaucaugaagaaccaccuccgggacaucaugugcaucccguacugcaacuacuccaaguacugguaccugaaccacaccgucacggggaagaccagccugccccgcugcuggcugguguccaacggcagcuaccugaacgagacccacuucuccgacgacaucgagcagcaggcggacaacaugaucaccgagcuccugcagaaggaguacauggaccggcagggcaagacgccccuggggcucguggaccuguucgucuucagcaccuccuucuaccugaucagcaucuuccugcaccucaucaagaucccgacccaccgccacaucaccggcaagcccugccccaagccccaccggcugaaccacauggggaucugcuccugcggccuguacaagcacccgggggugcccgugaaguggaagcgcugaggacuagucccuguucccagagcccacuuuuuuuucuuuuuuugaaauaaaauagccugucuuucagaucuaaaaaaaaaaaaaaaaaaaaaaaaaaaaaaaaaaaaaaaaaaaaaaaaaaaaaaaaaaaaaaaaaaaaaaaaaaaaaaaaaaaaaaaaaaaaaaaaaaaa

SEQ ID NO: 28846 - RNA, 1740 nt, Artificial Sequence
  mRNA product Design a-2 (A100) comprising derived and/or modified sequence from LASV(ISTH2010-NIG-2012;Clade II)__AIT17482__GPCmut5 (opt1)
aggagaguccgcucagccagguugcagaagcggcuuagcguguguccuaaucuucucucugcguguagguaggccugugccgcaaacaagcuuaccaugggccagaucaucaccuucuuccaggaggugccccacgucaucgaggaggugaugaacaucgugcugaucgcccucagccugcuggccauccucaaggggaucuacaacgucgcgaccugcggccuguucgggcugguguccuuccuccugcugugcggccgcagcugcuccacgaccuacaaggggguguacgagcuccagacccuggagcuggacauggccagccucaacaugaccaugccgcuguccugcacgaagaacaacagccaccacuacaucauggucggcaacgagaccggccuggagcucacccugaccaacacguccaucaucaaccacaaguucugcaaccugagcgacgcccacaagaagaaccucuacgaccacgcccugauguccaucaucagcaccuuccaccuguccauccccaacuucaaccaguacgaggccaugagcugcgacuucaacgggggcaagaucuccgugcaguacaaccucagccacgcguacgccguggacgccgccaaccacugcgggaccaucgcgaacggcguccugcagaccuucaugcggauggccuggggcggguccuacaucgcccuggacagcggcugcggguccugggacugcaucaugacgagcuaccaguaccucaucauccagaacaucaccugggaggaccacugccaguucucccgccccagccccaucggcuaccuggggcugcucagccagcggacccgcgacaucuacaucucccggcgccugcugggcaccuucacguggacccucagcgacuccgagggcaacgagacccccgggggcuacugccugacccgguggaugcugaucgaggccgagcucaagugcuucgggaacacggccguggcgaagugcaacgagaagcacgacgaggaguucugcgacaugcugcgccuguucgacuucaacaagcaggccauccggcgccucaagacccccgcccagaugagcauccagcugaucaacaaggccgugaacgcccugaucaacgaccagcucaucaugaagaaccaccuccgggacaucaugugcauccccuacugcaacuacuccaaguacugguaccugaaccacaccgucaccgggaagacgagccugccccgcugcuggcugguguccaacggcagcuaccugaacgagacccacuucuccgacgacaucgagcagcaggcggacaacaugaucaccgagcuccugcagaaggaguacaucgaccggcagggcaagaccccgcuggggcucguggaccuguucgucuucagcacguccuucuaccugaucagcaucuuccugcaccucgugaagaucccgacccaccgccacguggucggcaagcccugccccaagccccaccggcugaaccacauggggaucugcuccugcggccuguacaagcacccgggggugcccgugaaguggaagcgcugaggacuagucccuguucccagagcccacuuuuuuuucuuuuuuugaaauaaaauagccugucuuucagaucuaaaaaaaaaaaaaaaaaaaaaaaaaaaaaaaaaaaaaaaaaaaaaaaaaaaaaaaaaaaaaaaaaaaaaaaaaaaaaaaaaaaaaaaaaaaaaaaaaaaa

SEQ ID NO: 28847 - RNA, 1740 nt, Artificial Sequence
  mRNA product Design a-2 (A100) comprising derived and/or modified sequence from LASV(Lassa virus/H.sapiens-wt/NGA/2015/ISTH_0543;Clade II)__AVO03639__GPCmut5 (opt1)
aggagaguccgcucagccagguugcagaagcggcuuagcguguguccuaaucuucucucugcguguagguaggccugugccgcaaacaagcuuaccaugggccagaucaucaccuucuuccaggaggugccccacgucaucgaggaggugaugaacaucgugcugaucgcccucagccugcuggccauccucaaggggaucuacaacgucgcgaccugcggccuguucgggcugguguccuuccuccugcugugcggccgcagcugcuccacgaccuacaaggggguguacgagcuccagacccuggagcuggacauggccaaccucaacaugaccaugccgcugagcugcacgaagaacaacucccaccacuacaucauggucggcaacgagaccggccuggagcucacccugaccaacacgagcaucaucaaccacaaguucugcaaccuguccgacgcccacaagaagaaccucuacgaccacgcccugaugagcaucaucuccaccuuccaccugagcauccccaacuucaaccaguacgaggccauguccugcgacuucaacgggggcaagaucagcgugcaguacaaccucucccacaccuacgcgguggacgccgccaaccacugcgggaccaucgccaacggcguccugcagacguucaugcggauggcguggggcgggagcuacaucgcccuggacuccggcugcgggagcugggacugcaucaugaccuccuaccaguaccucgugauccagaacaccaccugggaggaccacugccaguucagccgccccucccccaucggcuaccuggggcugcucagccagcggacgcgcgacaucuacaucagccggcgccugcugggcaccuucaccuggacccucuccgacagcgagggcaacgagacgcccgggggcuacugccugacccgguggaugcugaucgaggccgagcucaagugcuucgggaacaccgccguggccaagugcaacgagaagcacgacgaggaguucugcgacaugcugcgccuguucgacuucaacaagcaggcgauccggcgccucaagacccccgcccagauguccauccagcugaucaacaaggccgucaacgcccugaucaacgaccagcucaucaugaagaaccaccuccgggacaucaugugcauccccuacugcaacuacagcaaguacugguaccugaaccacacggugaccgggaagaccucccugccccgcugcuggcuggugagcaacggcuccuaccugaacgagacccacuucagcgacgacaucgagcagcaggccgacaacaugaucacggagcuccugcagaaggaguacaucgaccggcagggcaagaccccgcuggggcucgucgaccuguucguguucuccaccagcuucuaccugaucuccaucuuccugcaccucgugaagaucccgacccaccgccacaucacgggcaagcccugccccaagccccaccggcugaaccacauggggaucugcagcugcggccuguacaagcacccggggguccccgugaaguggaagcgcugaggacuagucccuguucccagagcccacuuuuuuuucuuuuuuugaaauaaaauagccugucuuucagaucuaaaaaaaaaaaaaaaaaaaaaaaaaaaaaaaaaaaaaaaaaaaaaaaaaaaaaaaaaaaaaaaaaaaaaaaaaaaaaaaaaaaaaaaaaaaaaaaaaaaa

SEQ ID NO: 28848 - RNA, 1740 nt, Artificial Sequence
  mRNA product Design a-2 (A100) comprising derived and/or modified sequence from LASV(Lassa virus/H.sapiens-wt/NGA/2016/ISTH_0009;Clade II)__AVO03571__GPCmut5 (opt1)
aggagaguccgcucagccagguugcagaagcggcuuagcguguguccuaaucuucucucugcguguagguaggccugugccgcaaacaagcuuaccaugggccagaucaucaccuucuuccaggaggugccccacgucaucgaggaggugaugaacaucgugcugaucgcccucagccugcuggccauccucaaggggaucuacaacgucgcgaccugcggccugcuggggcucguguccuuccugcugcucugcggccgcagcugcuccacgaccuacaaggggguguacgagcugcagacccuggagcucgacauggccagccugaacaugaccaugccgcuguccugcacgaagaacaacagccaccacuacaucauggucggcaacgagaccggccucgagcugacccugaccaacacguccaucaucaaccacaaguucugcaaccucagcgacgcccacaagaagaaccuguacgaccacgcccugauguccaucaucagcaccuuccaccucuccauccccaacuucaaccaguacgaggccaugagcugcgacuucaacgggggccggaucuccgugcaguacaaccugagccacuccuacgcgguggacgccgccaaccacugcgggaccaucgccaacggcguccugcagaccuucaugcgcauggcguggggcgggagcuacaucgcccucgacuccggcugcgggagcugggacugcaucaugacguccuaccaguaccugaucauccagaacaccaccugggaggaccacugccaguucagccggcccagccccaucggcuaccuggggcuccugucccagcgcacccgggacaucuacaucagccgccggcugcucggcacguucaccuggacccuguccgacagcgagggcaacgagacccccgggggcuacugccugacgcgcuggaugcucaucgaggccgagcugaagugcuucgggaacaccgccguggccaagugcaacgagaagcacgacgaggaguucugcgacaugcugcggcuguucgacuucaacaagcaggcgauccgccggcugaagacccccgcccagauguccauccagcugaucaacaaggccgugaacgcccucaucaacgaccagcugaucaugaagaaccaccuccgcgacaucaugugcaucccguacugcaacuacagcaaguacugguaccucaaccacaccgucacggggaagaccucccugccccggugcuggcuggugagcaacggcuccuaccucaacgagacccacuucagcgacgacaucgagcagcaggccgacaacaugaucaccgagcugcugcagaaggaguacaucgaccgccagggcaagacgccccucgggcugguggaccuguucgucuucuccaccagcuucuaccugaucuccaucuuccuccaccuggugaagaucccgacccaccggcacaucaccggcaagcccugccccaagccccaccgccugaaccacauggggaucugcagcugcggccucuacaaccacccgggggugcccgucaaguggaagcggugaggacuagucccuguucccagagcccacuuuuuuuucuuuuuuugaaauaaaauagccugucuuucagaucuaaaaaaaaaaaaaaaaaaaaaaaaaaaaaaaaaaaaaaaaaaaaaaaaaaaaaaaaaaaaaaaaaaaaaaaaaaaaaaaaaaaaaaaaaaaaaaaaaaaa

SEQ ID NO: 28849 - RNA, 1740 nt, Artificial Sequence
  mRNA product Design a-2 (A100) comprising derived and/or modified sequence from LASV(Lassa virus/H.sapiens-wt/NGA/2016/ISTH_0017;Clade II)__AVO03567__GPCmut5 (opt1)
aggagaguccgcucagccagguugcagaagcggcuuagcguguguccuaaucuucucucugcguguagguaggccugugccgcaaacaagcuuaccaugggccagaucaucaccuucuuccaggaggugccccacgucaucgaggaggugaugaacaucgugcugaucgcccucagccugcuggccauccucaaggggaucuacaacgucgcgaccugcggccuguucgggcugguguccuuccuccugcugugcggccgcagcugcuccacgaccuacaaggggguguacgagcuccagacccuggagcuggacauggccagccucaacaugaccaugccgcuguccugcacgaagaacaacagccaccacuacaucauggucggcaacgagaccggccuggagcucacccugaccaacacguccaucaucaaccacaaguucugcaaccugagcgacgcccacaagaagaaccucuacgaccacgcccugauguccaucaucagcaccuuccaccuguccauccccaacuucaaccaguacgaggccaugagcugcgacuucaacgggggcaagaucuccgugcaguacaaccucagccacaccuacgcgaucgacgccgccaaccacugcgggaccaucgccaacggcgugcugcagacguucaugcggauggcguggggcggguccuacaucgcccuggacagcggcugcggguccugggacugcaucaugaccagcuaccaguaccucaucauccagaacaccaccugggaggaccacugccaguucucccgccccagccccaucggcuaccuggggcugcucagccagcggacgcgcgacaucuacaucucccggcgccugcugggcaccuucaccuggacccucagcgacuccgagggcaacgagacgcccgggggcuacugccugacccgguggaugcugaucgaggccgagcucaagugcuucgggaacaccgccgucgccaagugcaacgagaagcacgacgaggaguucugcgacaugcugcgccuguucgacuucaacaagcaggcgauccggcgccucaagacccccgcccagaugagcauccagcugaucaacaaggccgugaacgcccugaucaacgaccagcucaucaugaagaaccaccuccgggacaucaugugcauccccuacugcaacuacuccaaguacugguaccugaaccacacggugaccgggaagaccagccugccccgcugcuggcuggucuccaacggcagcuaccugaacgagacccacuucuccgacgacaucgagcagcaggccgacaacaugaucacggagcuccugcagaaggaguacauggaccggcagggcaagaccccgcuggggcucguggaccuguucguguucagcaccuccuucuaccugaucagcaucuuccugcaccucguccgcaucccgacccaccggcacgugaucggcaagcccugccccaagccccaccgccugaaccacauggggaucugcuccugcggccuguacaagcacccgggggugcccgucaaguggaagcggugaggacuagucccuguucccagagcccacuuuuuuuucuuuuuuugaaauaaaauagccugucuuucagaucuaaaaaaaaaaaaaaaaaaaaaaaaaaaaaaaaaaaaaaaaaaaaaaaaaaaaaaaaaaaaaaaaaaaaaaaaaaaaaaaaaaaaaaaaaaaaaaaaaaaa

SEQ ID NO: 28850 - RNA, 1740 nt, Artificial Sequence
  mRNA product Design a-2 (A100) comprising derived and/or modified sequence from LASV(Lassa virus/H.sapiens-wt/NGA/2018/ISTH_0959;Clade II)__AVV65099__GPCmut5 (opt1)
aggagaguccgcucagccagguugcagaagcggcuuagcguguguccuaaucuucucucugcguguagguaggccugugccgcaaacaagcuuaccaugggccagaucaucaccuucuuccaggaggugccccacgucaucgaggaggugaugaacaucgugcugaucgcccucagccugcuggccauccucaaggggaucuacaacgucgugaccugcggccuguucgggcugguguccuuccuccugcugugcggccgcagcugcuccacgaccuacaagggggucuacgagcuccagacccuggagcuggacauggcgagccucaacaugaccaugccgcuguccugcacgaagaacaacagccaccacuacaucauggugggcaacgagaccggccuggagcucacccugaccaacacguccaucaucaaccacaaguucugcaaccugagcgacgcccacaagaagaaccucuacgaccacgcccugauguccaucaucagcaccuuccaccuguccauccccaacuucaaccaguacgaggccaugagcugcgacuucaacgggggcaagaucuccgugcaguacaaccucagccacgccuacgcgaucgacgccgccaaccacugcgggaccaucgccaacggcguccugcagaccuucaugcggauggcguggggcggguccuacaucgcccuggacagcggcugcggguccugggacugcaucaugacgagcuaccaguaccucaucauccagaacaccaccugggaggaccacugccaguucucccgccccagccccaucggcuaccuggggcugcucagccagcggacccgcgacaucuacaucucccggcgccugcugggcacguucaccuggacccucagcgacuccgagggcaacgagacccccgggggcuacugccugacgcgguggaugcugaucgaggccgagcucaagugcuucgggaacaccgccguggccaagugcaacgagaagcacgacgaggaguucugcgacaugcugcgccuguucgacuucaacaagcaggcgauccggcgccucaagacccccgcccagaugagcauccagcugaucaacaaggccgugaacgcccugaucaacgaccagcucaucaugaagaaccaccuccgggacaucaugugcaucccguacugcaacuacuccaaguacugguaccugaaccacaccgucacggggaagaccagccugccccgcugcuggcugguguccaacggcagcuaccugaacgagacccacuucuccgacgacaucgagcagcaggccgacaacaugaucaccgagcuccugcagaaggaguacaucgaccggcagggcaagacgccccuggggcucguggaccuguucgucuucagcaccuccuucuaccugaucagcaucuuccugcaccucgugaagaucccgacccaccgccacgugaucggcaagcccugccccaagccccaccggcugaaccacauggggaucugcuccugcggccuguacaagcacccggggguccccgugaaguggaagcgcugaggacuagucccuguucccagagcccacuuuuuuuucuuuuuuugaaauaaaauagccugucuuucagaucuaaaaaaaaaaaaaaaaaaaaaaaaaaaaaaaaaaaaaaaaaaaaaaaaaaaaaaaaaaaaaaaaaaaaaaaaaaaaaaaaaaaaaaaaaaaaaaaaaaaa

SEQ ID NO: 28851 - RNA, 1740 nt, Artificial Sequence
  mRNA product Design a-2 (A100) comprising derived and/or modified sequence from LASV(LASV003-NIG-2008;Clade II)__AIT17580__GPCmut5 (opt1)
aggagaguccgcucagccagguugcagaagcggcuuagcguguguccuaaucuucucucugcguguagguaggccugugccgcaaacaagcuuaccaugggccagaucaucaccuucuuccaggaggugccccacgucaucgaggaggugaugaacaucgugcugaucgcccucagccugcuggccauccucaaggggaucuacaacgucgcgaccugcggccuguucgggcugguguccuuccuccugcugugcggccgcagcugcuccacgaccuacaaggggguguacgagcuccagacccuggagcuggacauggccagccucaacaugaccaugccgcuguccugcacgaagaacaacagccaccacuacaucauggucggcaacgagaccggccuggagcucacccugaccaacacguccaucaucaaccacaaguucugcaaccugagcgacgcccacaagaagaaccucuacgaccacgcccugauguccaucaucagcaccuuccaccuguccauccccaacuucaaccaguacgaggccaugagcugcgacuucaacgggggcaagaucuccgugcaguacaaccucagccacaccuacgcgguggacgccgccaaccacugcgggaccaucgccaacggcguccugcagacguucaugcggauggcguggggcggguccuacaucgcccuggacagcggcugcggguccugggacugcaucaugaccagcuaccaguaccucaucauccagaacaccaccugggaggaccacugccaguucucccgccccagccccaucggcuaccuggggcugcucagccagcggacgcgcgacaucuacaucucccggcgccugcugggcaccuucaccuggacccucagcgacuccgagagcaacgagacgccgggcggguacugccugacccgguggaugcugaucgaggccgagcucaagugcuucggcaacaccgccguggccaagugcaacgagaagcacgacgaggaguucugcgacaugcugcgccuguucgacuucaacaagcaggcgauccggcgccucaaggcccccgcccagauguccauccagcugaucaacaaggccgugaacgcccugaucaacgaccagcucaucaugaagaaccaccuccgggacaucaugugcauccccuacugcaacuacagcaaguacugguaccugaaccacaccgucacgggccgcaccucccugccccggugcuggcuggugagcaacggguccuaccugaacgagacccacuucagcgacgacaucgagcagcaggcggacaacaugaucaccgagcuccugcagaaggaguacauggaccgccagggcaagacgccccugggccucguggaccuguucgucuucuccaccagcuucuaccugaucuccaucuuccugcaccucgugaagaucccgacccaccggcacgugaucgggaagcccugccccaagccccaccgccugaaccacaugggcaucugcagcugcgggcuguacaagcacccgggcguccccgugaaguggaagcggugaggacuagucccuguucccagagcccacuuuuuuuucuuuuuuugaaauaaaauagccugucuuucagaucuaaaaaaaaaaaaaaaaaaaaaaaaaaaaaaaaaaaaaaaaaaaaaaaaaaaaaaaaaaaaaaaaaaaaaaaaaaaaaaaaaaaaaaaaaaaaaaaaaaaa

SEQ ID NO: 28852 - RNA, 1740 nt, Artificial Sequence
  mRNA product Design a-2 (A100) comprising derived and/or modified sequence from LASV(LASV035-NIG-2009;Clade II)__AIT17588__GPCmut5 (opt1)
aggagaguccgcucagccagguugcagaagcggcuuagcguguguccuaaucuucucucugcguguagguaggccugugccgcaaacaagcuuaccaugggccagaucaucaccuucuuccaggaggugccccacgucaucgaggaggugaugaacaucgugcugaucgcccucagccugcuggccauccucaaggggaucuacaacgucgcgaccugcggccuguucgggcugguguccuuccuccugcugugcggccgcagcugcuccacgaccuacaaggggguguacgagcuccagacccuggagcuggacauggccagccucaacaugaccaugccgcuguccugcacgaagaacaacagccaccacuacaucauggucggcaacgagaccggccuggagcucacccugaccaacacguccaucaucaaccacaaguucugcaaccugagcgacgcccacaagaagaaccucuacgaccacgcccugauguccaucaucagcaccuuccaccuguccauccccaacuucaaccaguacgaggccaugagcugcgacuucaacgggggcaagaucuccgugcaguacaaccucagccacgcguacgccguggacgccgccaaccacugcgggaccaucgcgaacggcguccugcagaccuucaugcggauggccuggggcggguccuacaucgcccuggacagcggcugcggguccugggacugcaucaugacgagcuaccaguaccucaucauccagaacaccaccugggaggaccacugccaguucucccgccccagccccaucggcuaccuggggcugcucagccagcggacccgcgacaucuacaucucccggcgccugcugggcacguucaccuggacccucagcgacuccgagggcaacgagacccccgggggcuacugccugacgcgguggaugcugaucgaggccgagcucaagugcuucgggaacaccgccguggcgaagugcaacgagaagcacgacgaggaguucugcgacaugcugcgccuguucgacuucaacaagcaggccauccggcgccucaaggcccccgcccagaugagcauccagcugaucaacaaggccgugaacgcgcugaucaacgaccagcucaucaugaagaaccaccuccgggacaucaugugcauccccuacugcaacuacuccaaguacugguaccugaaccacaccgucaccgggaagacgagccugccccgcugcuggcugguguccaacggcagcuaccugaacgagacccacuucuccgacgacaucgagcagcaggccgacaacaugaucaccgagcuccugcagaaggaguacaucgaccggcagggcaagaccccgcuggggcucguggaccuguucgucuucagcacguccuucuaccugaucagcaucuuccugcaccucgugaagaucccgacccaccgccacgugaucggcaagcccugccccaagccccaccggcugaaccacauggggaucugcuccugcggccuguacaagcacccggggguccccgugaaguggaagcgcugaggacuagucccuguucccagagcccacuuuuuuuucuuuuuuugaaauaaaauagccugucuuucagaucuaaaaaaaaaaaaaaaaaaaaaaaaaaaaaaaaaaaaaaaaaaaaaaaaaaaaaaaaaaaaaaaaaaaaaaaaaaaaaaaaaaaaaaaaaaaaaaaaaaaa

SEQ ID NO: 28853 - RNA, 1740 nt, Artificial Sequence
  mRNA product Design a-2 (A100) comprising derived and/or modified sequence from LASV(LASV1000-NIG-2009;Clade II)__AIT17782__GPCmut5 (opt1)
aggagaguccgcucagccagguugcagaagcggcuuagcguguguccuaaucuucucucugcguguagguaggccugugccgcaaacaagcuuaccaugggccagaucaucaccuucuuccaggaggugccccacgucaucgaggaggugaugaacaucgugcugaucgcccucagccugcuggccauccucaaggggaucuacaacgucgcgaccugcggccuguucgggcugguguccuuccuccugcugugcggccgcagcugcuccacgaccuacaaggggguguacgagcuccagacccuggagcuggacauggccagccucaacaugaccaugccgcuguccugcacgaagaacaacagccaccacuacaucauggucggcaacgagaccggccuggagcucacccugaccaacacguccaucaucaaccacaaguucugcaaccugagcgacgcccacaagaagaaccucuacgaccacgcccugauguccaucaucagcaccuuccaccuguccauccccaacuucaaccaguacgaggccaugagcugcgacuucaacgggggcaagaucuccgugcaguacaaccucagccacaccuacgcgguggacgccgccaaccacugcgggaccaucgccaacggcguccugcagacguucaugcggauggcguggggcggguccuacaucgcccuggacagcggcugcggguccugggacugcaucaugaccagcuaccaguaccucaucauccagaacaccaccugggaggaccacugccaguucucccgccccagccccaucggcuaccuggggcugcucagccagcggacgcgcgacaucuacaucucccggcgccugcugggcaccuucaccuggacccucagcgacuccgagggcaacgagacgcccgggggcuacugccugacccgguggaugcugaucgaggccgagcucaagugcuucgggaacaccgccguggccaagugcaacgagaagcacgacgaggaguucugcgacaugcugcgccuguucgacuucaacaagcaggcgaucaagcggcucaagacccccgcccagaugagcauccagcugaucaacaaggccgugaacgcccugaucaacgaccagcucaucaugaagaaccaccuccgcgacaucaugugcauccccuacugcaacuacuccaaguacugguaccugaaccacacggucaccgggaagaccagccugccccggugcuggcugguguccaacggcagcuaccugaacgagacccacuucuccgacgacaucgagcagcaggccgacaacaugaucacggagcuccugcagaaggaguacaucgaccgccagggcaagaccccgcuggggcucguggaccuguucgucuucagcaccuccuucuaccugaucagcaucuuccugcaccucgugaagaucccgacccaccggcacguggucggcaagcccugccccaagccccaccgccugaaccacauggggaucugcuccugcggccuguacaagcacccgggggugcccgugaaguggaagcggugaggacuagucccuguucccagagcccacuuuuuuuucuuuuuuugaaauaaaauagccugucuuucagaucuaaaaaaaaaaaaaaaaaaaaaaaaaaaaaaaaaaaaaaaaaaaaaaaaaaaaaaaaaaaaaaaaaaaaaaaaaaaaaaaaaaaaaaaaaaaaaaaaaaaa

SEQ ID NO: 28854 - RNA, 1740 nt, Artificial Sequence
  mRNA product Design a-2 (A100) comprising derived and/or modified sequence from LASV(LASV221-NIG-2010;Clade II)__AIT17624__GPCmut5 (opt1)
aggagaguccgcucagccagguugcagaagcggcuuagcguguguccuaaucuucucucugcguguagguaggccugugccgcaaacaagcuuaccaugggccagaucaucaccuucuuccaggaggugccccacgucaucgaggaggugaugaacaucgugcugaucgcccucagccugcuggccauccucaaggggaucuacaacgucgcgaccugcggccuguucgggcugguguccuuccuccugcugugcggccgcagcugcuccacgaccuacaaggggguguacgagcuccagacccuggagcuggacauggccagccucaacaugaccaugccgcuguccugcacgaagaacaacagccaccacuacaucauggucggcaacgagaccggccuggagcucacccugaccaacacguccaucaucaaccacaaguucugcaaccugagcgacgcccacaagaagaaccucuacgaccacgcccugauguccaucaucagcaccuuccaccuguccauccccaacuucaaccaguacgaggccaugagcugcgacuucaacgggggcaagaucuccgugcaguacaaccucagccacaccuacgcgaucgacgccgccaaccacugcgggaccaucgccaacggcgugcugcagacguucaugcggauggcguggggcggguccuacaucgcccuggacagcggcugcggguccugggacugcaucaugaccagcuaccaguaccucaucauccagaacaccaccugggaggaccacugccaguucucccgccccagccccaucggcuaccuggggcugcucagccagcggacgcgcgacaucuacaucucccggcgccugcugggcaccuucaccuggacccucagcgacuccgagggcaacgagacgcccgggggcuacugccugacccgguggaugcugaucgaggccgagcucaagugcuucgggaacaccgccgucgccaagugcaacgagaagcacgacgaggaguucugcgacaugcugcgccuguucgacuucaacaagcaggcgauccggcgccucaagacccccgcccagaugagcauccagcugaucaacaaggccgugaacgcccugaucaacgaccagcucaucaugaagaaccaccuccgggacaucaugugcauccccuacugcaacuacuccaaguacugguaccugaaccacacggugaccgggaagaccagccugccccgcugcuggcuggucuccaacggcagcuaccugaacgagacccacuucuccgacgacaucgagcagcaggccgacaacaugaucacggagaugcuccagaaggaguacauggaccggcagggcaagaccccgcuggggcugguggaccucuucguguucagcaccuccuucuaccugaucagcaucuuccugcaccuggucaagaucccgacccaccgccacgugaucggcaagcccugccccaagccccaccggcucaaccacauggggaucugcuccugcggccuguacaagcacccgggggugcccgucaaguggaagcgcugaggacuagucccuguucccagagcccacuuuuuuuucuuuuuuugaaauaaaauagccugucuuucagaucuaaaaaaaaaaaaaaaaaaaaaaaaaaaaaaaaaaaaaaaaaaaaaaaaaaaaaaaaaaaaaaaaaaaaaaaaaaaaaaaaaaaaaaaaaaaaaaaaaaaa

SEQ ID NO: 28855 - RNA, 1740 nt, Artificial Sequence
  mRNA product Design a-2 (A100) comprising derived and/or modified sequence from LASV(LASV237-NIG-2010;Clade II)__AIT17638__GPCmut5 (opt1)
aggagaguccgcucagccagguugcagaagcggcuuagcguguguccuaaucuucucucugcguguagguaggccugugccgcaaacaagcuuaccaugggccagaucaucaccuucuuccaggaggugccccacgucaucgaggaggugaugaacaucgugcugaucgcccucagccugcuggccauccucaaggggaucuacaacgucgcgaccugcggccuguucgggcugguguccuuccuccugcugugcggccgcagcugcuccacgaccuacaaggggguguacgagcuccagacccuggagcuggacauggccagccucaacaugaccaugccgcuguccugcacgaagaacaacagccaccacuacaucauggucggcaacgagaccggccuggagcucacccugaccaacacguccaucaucaaccacaaguucugcaaccugagcgacgcccacaagaaggaccucuacgaccacgcccugauguccaucaucagcaccuuccaccuguccauccccaacuucaaccaguacgaggccaugagcugcgacuucaacgggggcaagaucuccgugcaguacaaccucagccacaccuacgcgguggacgccgccaaccacugcgggaccaucgccaacggcguccugcagacguucaugcggauggcguggggcggguccuacaucgcccuggacagcggcugcggguccugggacugcaucaugaccagcuaccaguaccucaucauccagaacaccaccugggaggaccacugccaguucucccgccccagccccaucggcuaccuggggcugcucagccagcggacgcgcgacaucuacaucucccggcgccugcugggcaccuucaccuggacccucagcgacuccgagggcaacgagacgcccgggggcuacugccugacccgguggaugcugaucgaggccgagcucaagugcuucgggaacaccgccguggccaagugcaacgagaagcacgacgaggaguucugcgacaugcugcgccuguucgacuucaacaagcaggcgauccggcgccucaagacccccgcccagaugagcauccagcugaucaacaaggccgugaacgcccugaucaacgaccagcucaucaugaagaaccaccuccgggacaucaugugcauccccuacugcaacuacuccaaguacugguaccugaaccacacggucaccgggaagaccagccugccccgcugcuggcugguguccaacggcagcuaccugaacgagacccacuucuccgacgacaucgagcagcaggccgacaacaugaucacggagcuccugcagaaggaguacauggaccggcagggcaagaccccgcuggggcucguggaccuguucgucuucagcaccuccuucuaccugaucagcaucuuccugcaccucaucaagaucccgacccaccgccacaucacgggcaagcccugccccaagccccaccggcugaaccacauggggaucugcuccugcggccuguacaagcacccgggggugcccgugaaguggaagcgcugaggacuagucccuguucccagagcccacuuuuuuuucuuuuuuugaaauaaaauagccugucuuucagaucuaaaaaaaaaaaaaaaaaaaaaaaaaaaaaaaaaaaaaaaaaaaaaaaaaaaaaaaaaaaaaaaaaaaaaaaaaaaaaaaaaaaaaaaaaaaaaaaaaaaa

SEQ ID NO: 28856 - RNA, 1740 nt, Artificial Sequence
  mRNA product Design a-2 (A100) comprising derived and/or modified sequence from LASV(LASV253-NIG-2011;Clade II)__AIT17670__GPCmut5 (opt1)
aggagaguccgcucagccagguugcagaagcggcuuagcguguguccuaaucuucucucugcguguagguaggccugugccgcaaacaagcuuaccaugggccagaucaucaccuucuuccaggaggugccccacgucaucgaggaggugaugaacaucgugcugaucgcccucagccugcuggccauccucaaggggaucuacaacgucgcgaccugcggccuguucgggcugguguccuuccuccugcugugcggccgcagcugcuccacgaccuacaaggggguguacgagcuccagacccuggagcuggacauggccagccucaacaugaccaugccgcuguccugcacgaagaacaacagccaccacuacaucauggucggcaacgagaccggccuggagcucacccugaccaacacguccaucaucaaccacaaguucugcaaccugagcgacgcccacaagaagaaccucuacgaccacgcccugauguccaucaucagcaccuuccaccuguccauccccaacuucaaccaguacgaggccaugagcugcgacuucaacgggggcaagaucuccgugcaguacaaccucagccacaccuacgcgguggacgccgccaaccacugcgggaccaucgccaacggcguccugcagacguucaugcggauggcguggggcggguccuacaucgcccuggacagcggcugcggguccugggacugcaucaugaccagcuaccaguaccucaucauccagaacaccaccugggaggaccacugccaguucucccgccccagccccaucggcuaccuggggcugcucagccagcggacgcgcgacaucuacaucucccggcgccugcugggcaccuucaccuggacccucagcgacuccgagggcaacgagacgcccgggggcuacugccugacccgguggaugcugaucgaggccgagcucaagugcuucgggaacaccgccguggccaagugcaacgagaagcacgacgaggaguucugcgacaugcugcgccuguucgacuucaacaagcaggcgauccggcgccucaaggcccccgcccagaugagcauccagcugaucaacaaggccgugaacgcccugaucaacgaccagcucaucaugaagaaccaccuccgggacaucaugugcaucccguacugcaacuacuccaaguacugguaccugaaccacaccgucacggggcgcaccagccugccccggugcuggcugguguccaacggcagcuaccugaacgagacccacuucuccgacgacaucgagcagcaggcggacaacaugaucaccgagcuccugcagaaggaguacaucgaccgccagggcaagacgccccuggggcucguggaccuguucgucuucagcaccuccuucuaccugaucagcaucuuccugcaccucgugaagaucccgacccaccggcacaucaucggcaagcccugccccaagccccaccgccugaaccacauggggaucugcuccugcggccuguacaagcacccgggggugcccgucaaguggaagcggugaggacuagucccuguucccagagcccacuuuuuuuucuuuuuuugaaauaaaauagccugucuuucagaucuaaaaaaaaaaaaaaaaaaaaaaaaaaaaaaaaaaaaaaaaaaaaaaaaaaaaaaaaaaaaaaaaaaaaaaaaaaaaaaaaaaaaaaaaaaaaaaaaaaaa

SEQ ID NO: 28857 - RNA, 1740 nt, Artificial Sequence
  mRNA product Design a-2 (A100) comprising derived and/or modified sequence from LASV(LASV254-NIG-2011;Clade II)__AIT17674__GPCmut5 (opt1)
aggagaguccgcucagccagguugcagaagcggcuuagcguguguccuaaucuucucucugcguguagguaggccugugccgcaaacaagcuuaccaugggccagaucaucaccuucuuccaggaggugccccacgucaucgaggaggugaugaacaucgugcugaucgcccucagccugcuggccauccucaaggggaucuacaacgucgcgaccugcggccuguucgggcugguguccuuccuccugcugugcggccgcagcugcuccacgaccuacaaggggguguacgagcuccagacccuggagcuggacaugaccaaccucaacaugacgaugccgcugagcugcaccaagaacaacucccaccacuacaucauggucggcaacgagaccggccuggagcucacccugacgaacaccagcaucaucaaccacaaguucugcaaccuguccgacgcccacaagaagaaccucuacaaccacgcccugaugagcaucaucuccaccuuccaccugagcauccccaacuucaaccaguacgaggccauguccugcgacuucaacgggggcaagaucagcgugcaguacaaccucucccacagcuacgccguggacgcggccaaccacugcgggaccaucgccaacggcguccugcagacguucaugcggauggccuggggcggguccuacaucgcgcuggacagcggcugcgggaacugggacugcaucaugaccuccuaccaguaccucaucauccagaacaccaccugggaggaccacugccaguucagccgccccucccccaucggcuaccuggggcugcucagccagcggacgcgcgacaucuacaucagccggcgccugcugggcaccuucaccuggacccucuccgacagcgagggcaacgagacgcccgggggcuacugccugacccgguggaugcugaucgaggccgagcucaagugcuucgggaacaccgccguggccaagugcaacgagaagcacgacgaggaguucugcgacaugcugcgccuguucgacuucaacaagcaggccauccggcgccucaagacccccgcgcaggccaacauccagcugaucaacaaggccgugaacgcccugaucaacgaccagcucaucaugaagaaccaccuccgggacaucaugugcauccccuacugcaacuacuccaaguacugguaccugaaccacacggucaccgggaagaccagccugccccgcugcuggcugguguccaacggcagcuaccugaacgagacccacuucuccgacgacaucgagcagcaggccgacaacaugaucacggagcuccugcagaaggaguacauggaccggcagggcaagaccccgcuggggcucguggaccuguucgucuucagcaccuccuucuaccugaucagcaucuuccugcaccucgugaagaucccgacccaccgccacgugaucggcaagcccugccccaagccccaccggcugaaccacauggggaucugcuccugcggccuguacaagcacccggggguccccgugaaguggaagcgcugaggacuagucccuguucccagagcccacuuuuuuuucuuuuuuugaaauaaaauagccugucuuucagaucuaaaaaaaaaaaaaaaaaaaaaaaaaaaaaaaaaaaaaaaaaaaaaaaaaaaaaaaaaaaaaaaaaaaaaaaaaaaaaaaaaaaaaaaaaaaaaaaaaaaa

SEQ ID NO: 28858 - RNA, 1740 nt, Artificial Sequence
  mRNA product Design a-2 (A100) comprising derived and/or modified sequence from LASV(Nig08-A19;Clade III)__ADU56618__GPCmut5 (opt1)
aggagaguccgcucagccagguugcagaagcggcuuagcguguguccuaaucuucucucugcguguagguaggccugugccgcaaacaagcuuaccaugggccagaucgugaccuucuuccaggaggucccccacgugaucgaggaggugaugaacaucguccugaucgcccucagcauccuggccauccugaaggggcucuacaacaucgcgaccugcggccugaucgggcuggugacguuccuccugcuguccggccgcagcugcuccaugaccuacaaggggguguacgagcuccagacccuggagcugaacaugaacacccucaacaugacgaugccgcugagcugcaccaagaacaacucccaccacuacaucauggucggcaacgagaccggccuggagcucacccugacgaacaccagccugcuccaccacaaguucugcaaccuguccgacgcccacaagaagaaccuguacgaccacacccucaugagcaucaucuccaccuuccaccugagcauccccaacuucaaccaguacgaggccauguccugcgacuucaacgggggcaagaucacggugcaguacaaccugagccacuccuacgccaucgacgccgcgaaccacugcgggaccguggccaacggcguccuccagaccuucaugcggauggccuggggcgggagcuacaucgcccuggacuccggcugcgggaagugggacugcaucaugaccagcuaccaguaccugaucauccagaacacgaccugggaggaccacugccaguucucccggcccagccccaucggcuaccucgggcugcugucccagcgcacccgggacaucuacaucagccgccggcuccugggcaccuucacguggacccugagcgacuccgagggcaacgagacccccgggggcuacugccucacccgcuggaugcugaucgaggcggagcugaagugcuucgggaacacggccguggccaagugcaacgagaagcacgacgaggaguucugcgacaugcuccggcuguucgacuucaacaagcaggccauccgccggcugaaggcccccgcgcagaugagcauccagcucaucaacaaggccgugaacgcccugaucaacgaccagcugaucaugaagaaccaccuccgcgacaucaugugcauccccuacugcaacuacuccaaguacugguaccugaaccacaccagcaccgggcggaccucccugccccgcugcuggcucgucagcaacggcuccuaccugaacgagacgcacuucagcgacgacaucgagcagcaggccgacaacaugaucaccgagaugcugcagaaggaguaccucgaccggcagggcaagaccccgcuggggcugguggaccuguucguguucuccaccagcuucuaccucaucuccaucuuccugcaccuggucaagaucccgacgcaccgccacaucgugggcaagcccugccccaagccccaccggcucaaccacauggggaucugcagcugcggccuguacaagcagccgggggugcccguccgcuggaagcggugaggacuagucccuguucccagagcccacuuuuuuuucuuuuuuugaaauaaaauagccugucuuucagaucuaaaaaaaaaaaaaaaaaaaaaaaaaaaaaaaaaaaaaaaaaaaaaaaaaaaaaaaaaaaaaaaaaaaaaaaaaaaaaaaaaaaaaaaaaaaaaaaaaaaa

SEQ ID NO: 28859 - RNA, 1743 nt, Artificial Sequence
  mRNA product Design a-2 (A100) comprising derived and/or modified sequence from LASV(G1180-SLE-2010;Clade IV)__AIT17168__GPCmut5 (opt1)
aggagaguccgcucagccagguugcagaagcggcuuagcguguguccuaaucuucucucugcguguagguaggccugugccgcaaacaagcuuaccaugggccagaucgugaccuucuuccaggaggucccccacgugaucgaggaggugaugaacaucguccugaucgcccucagcauccuggccgugcugaaggggcucuacaacuucgcgaccugcggccugguggggcugcucaccuuccugcugcucugcggccgcuccugcaccgccagccgguacaagggggucuacgagcugcagacccuggagcucaacauggagacccugaacaugacgaugccgcuguccugcaccaagaacaacagccaccacuacaucauggugggcaacgagaccggccucgagcugacccugacgaacaccuccaucaucaaccacaaguucugcaaccucagcgacgcccacaagaagaaccuguacgaccacgcccugauguccaucaucagcaccuuccaccucuccauccccaacuucaaccaguacgaggccaugagcugcgacuucaacgggggcaagaucuccgugcaguacaaccugagccacuccuacgcgggggacgccgccaaccacugcggcaccgucgccaacggggugcugcagacguucaugcgcauggcguggggcggcagcuacaucgcccucgacuccgggugcggcagcugggacugcaucaugaccuccuaccaguaccugaucauccagaacaccaccugggaggaccacugccaguucagccggcccucccccaucggguaccugggccuccugagccagcgcacgcgggacaucuacaucagccgccggcugcucggcaccuucaccuggacccuguccgacagcgaggggaaggacacgccgggcggguacugccugacccgcuggaugcucaucgaggccgagcugaagugcuucggcaacaccgccguggccaagugcaacgagaagcacgacgaggaguucugcgacaugcugcggcuguucgacuucaacaagcaggcgauccagcgccugaaggcccccgcccagauguccauccagcugaucaacaaggccgucaacgcccucaucaacgaccagcugaucaugaagaaccaccuccgggacaucaugugcauccccuacugcaacuacagcaaguacugguaccucaaccacaccacgaccggcaagaccucccugcccaagugcuggcuggugagcaacggcuccuaccucaacgagacccacuucagcgacgacaucgagcagcaggcggacaacaugaucacggagaugcugcagaaggaguacauggagcgccaggggaagacgccccugggccucguggaccuguucgucuucuccaccagcuucuaccugaucuccaucuuccugcaccucgugaagaucccgacccaccggcacaucgugggcaagagcugccccaagccccaccgccugaaccacauggggaucugcuccugcgggcuguacaagcagcccggcgucccggugaaguggaagcggugaggacuagucccuguucccagagcccacuuuuuuuucuuuuuuugaaauaaaauagccugucuuucagaucuaaaaaaaaaaaaaaaaaaaaaaaaaaaaaaaaaaaaaaaaaaaaaaaaaaaaaaaaaaaaaaaaaaaaaaaaaaaaaaaaaaaaaaaaaaaaaaaaaaaa

SEQ ID NO: 28860 - RNA, 1743 nt, Artificial Sequence
  mRNA product Design a-2 (A100) comprising derived and/or modified sequence from LASV(G1442-SLE-2011;Clade IV)__AIT17180__GPCmut5 (opt1)
aggagaguccgcucagccagguugcagaagcggcuuagcguguguccuaaucuucucucugcguguagguaggccugugccgcaaacaagcuuaccaugggccagaucgugaccuucuuccaggaggucccccacgugaucgaggaggugaugaacaucguccugaucgcccucagcauccuggccgugcugaaggggcucuacaacguggcgaccugcggccugaucgggcuggucacguuccuccugcugugcggccgcuccugcaccaccacccucuacaaggggguguacgagcugcagacgcuggagcucaacauggagacccugaacaugaccaugccgcugagcugcaccaagaacaacucccaccacuacauccgggugggcaacgagacgggccucgagcugacccugaccaacaccagcaucaucaaccacaaguucugcaaccucuccgacgcccacaagaagaaccuguacgaccacgcccugaugagcaucaucuccacguuccaccucagcauccccaacuucaaccaguacgaggccauguccugcgacuucaacgggggcaagaucagcguccaguacaaccugucccacagcuacgccggggacgcggccaaccacugcggcaccguggccaacggggugcugcagaccuucaugcgcauggccuggggcggcuccuacaucgcgcucgacagcgggugcggcaacugggacugcaucaugaccuccuaccaguaccugaucauccagaacacgaccugggacgaccacugccaguucagccgccccucccccaucggguaccugggccuccugagccagcggacccgcgacgucuacaucucccggcgccugcucggcaccuucacguggacccugagcgacagcgaggggaaggacaccccgggcggguacugccugacccgguggaugcucaucgaggccgagcugaagugcuucggcaacacggccguggccaagugcaacgagaagcacgacgaggaguucugcgacaugcugcgccucuucgacuucaacaagcaggccauccagcggcugaaggcgcccgcccagauguccauccagcugaucaacaaggccgugaacgcccucaucaacgaccagcugaucaugaagaaccaccuccgcgacaucaugugcauccccuacugcaacuacagcaaguacugguaccugaacaacaccgccaccggcaagaccucccugcccaagugcuggcugaucagcaacggcuccuaccucaacgagacgcacuucagcgacgacaucgagcaggaggcggacaacaugaucaccgagaugcugcagaaggaguacauggagcggcaggggaagacgccccugggccucgucgaccuguucguguucuccaccagcuucuaccugaucuccaucuuccugcaccucgugaagaucccgacccaccgccacaucgucggcaagagcugccccaagccccaccggcugaaccacauggggaucugcuccugcgggcuguacaagcagcccggcgugccggugcgcuggaagcggugaggacuagucccuguucccagagcccacuuuuuuuucuuuuuuugaaauaaaauagccugucuuucagaucuaaaaaaaaaaaaaaaaaaaaaaaaaaaaaaaaaaaaaaaaaaaaaaaaaaaaaaaaaaaaaaaaaaaaaaaaaaaaaaaaaaaaaaaaaaaaaaaaaaaa

SEQ ID NO: 28861 - RNA, 1743 nt, Artificial Sequence
  mRNA product Design a-2 (A100) comprising derived and/or modified sequence from LASV(G3010-SLE-2013;Clade IV)__AIT17344__GPCmut5 (opt1)
aggagaguccgcucagccagguugcagaagcggcuuagcguguguccuaaucuucucucugcguguagguaggccugugccgcaaacaagcuuaccaugggccagaucgugaccuucuuccaggaggucccccacgugaucgaggaggugaugaacaucguccugaucgcccucagcauccuggccgugcugaaggggcucuacaacuucgcgaccugcggccugguggggcuggucacguuccuccugcugugcggccgcuccugcaccaccagccucuacaaggggguguacgagcugcagacccuggagcucaacauggagacgcugaacaugaccaugccgcuguccugcaccaagaacaacagccaccacuacaucauggugggcaacgagaccggccucgagcugacgcugaccaacaccuccaucaucaaccacaaguucugcaaccucagcgacgcccacaagaagaaccuguacaaccacgcccugauguccaucaucagcaccuuccaccucuccauccccaacuucaaccaguacgaggccaugagcugcgacuucaacgggggcaagaucuccguccaguacaaccugagccacuccuacgccggggacgcggccagccacugcggcacgguggccaacggggugcugcagaccuucaugcggauggccuggggcggcuccuacaucgcgcucgacagcgggugcggcaagugggacugcaucaugaccuccuaccaguaccugaucauccagaacaccacgugggaggaccacugccaguucagccgccccucccccaucggguaccugggccuccugagccagcggacccgcgacaucuacaucagccggcgccugcucggcaccuucaccuggacgcuguccgacagcgaggggaaggacaccccgggcggguacugccugacccgguggaugcucaucgaggccgagcugaagugcuucggcaacaccgccgucgccaagugcaacgagaagcacgacgaggaguucugcgacaugcugcgccucuucgacuucaacaagcaggccauccagcggcugaagacgcccgcgcagauguccauccagcugaucaacaaggccgugaacgcccucaucaacgaccagcugaucaugaagaaccaccuccgcgacaucaugugcauccccuacugcaacuacagcaaguacugguaccugaaccacaccaccaccggcaagacgucccugcccaagugcuggcuggugagcaacggcuccuaccucaacgagacccacuucagcgacgacaucgagcagcaggccgacaacaugaucaccgagaugcugcagaaggaguacauggagcggcaggggaagacgccccugggccucgucgaccuguucguguucuccaccagcuucuaccugaucuccaucuuccugcaccucgugaagaucccgacccaccgccacaucgucggcaagagcugccccaagccccaccggcugaaccacauggggaucugcuccugcgggcuguacaagcagcccggcgugccggugcgcuggaagcggugaggacuagucccuguucccagagcccacuuuuuuuucuuuuuuugaaauaaaauagccugucuuucagaucuaaaaaaaaaaaaaaaaaaaaaaaaaaaaaaaaaaaaaaaaaaaaaaaaaaaaaaaaaaaaaaaaaaaaaaaaaaaaaaaaaaaaaaaaaaaaaaaaaaaa

SEQ ID NO: 28862 - RNA, 1743 nt, Artificial Sequence
  mRNA product Design a-2 (A100) comprising derived and/or modified sequence from LASV(G502-SLE-2009;Clade IV)__AIT17126__GPCmut5 (opt1)
aggagaguccgcucagccagguugcagaagcggcuuagcguguguccuaaucuucucucugcguguagguaggccugugccgcaaacaagcuuaccaugggccagaucgugaccuucuuccaggaggucccccacgugaucgaggaggugaugaacaucguccugaucgcccucagcauccuggccgugcugaaggggcucuacaacuucgcgaccugcggccugguggggcugcucacguuccugcugcucugcggccgcuccugcaccaccgggcuguacaagggcgucuacgagcugcagacccucgagcugaacauggagacgcugaacaugaccaugccgcucagcugcaccaagaacaacucccaccacuacaucauggugggcaacgagaccgggcuggagcugacgcucaccaacaccagcaucaucaaccacaaguucugcaaccuguccgacgcccacaagaagaaccuguacgaccacgcccucaugagcaucaucuccaccuuccaccugagcauccccaacuucaaccaguacgaggccauguccugcgacuucaacggcgggaagaucagcgugcaguacaaccugucccacagcuacgccggcgacgcggccgaccacugcgggacggucgccaacggcgugcuccagaccuucaugcggauggccuggggcggguccuacaucgcgcuggacagcggcugcgggcggugggacugcaucaugaccuccuaccaguaccugaucauccagaacaccacgugggaggaccacugccaguucagccgccccucccccaucggcuaccucggccugcugagccagcggacccgcgacaucuacaucucccggcgccuccuggggaccuucaccuggacgcugagcgacagcgagggcaaggacacccccgggggcuacugccucacccgguggaugcugaucgaggccgagcugaagugcuucgggaacaccgccguggccaagugcaacgagaagcacgacgaggaguucugcgacaugcuccgccuguucgacuucaacaagcaggccauccagcggcugaaggcgcccgcccagauguccauccagcucaucaacaaggccgucaacgcccugaucaacgaccagcuggugaugaagaaccaccuccgcgacaucaugugcauccccuacugcaacuacagccgguacugguaccugaaccacacgaccaccggccgcaccucccugcccaagugcuggcucgugagcaacggguccuaccugaacgagacgcacuucagcgacgacaucgagcagcaggccgacaacaugaucaccgagaugcugcagaaggaguacauggagcggcagggcaagaccccgcucgggcuggucgaccuguucguguucuccaccagcuucuaccugaucuccaucuuccuccaccuggugaagaucccgacgcaccgccacaucgucggcaagagcugccccaagccccaccggcugaaccacauggggaucugcuccugcggccucuacaagcagcccggcgugccggugaaguggaagcgcugaggacuagucccuguucccagagcccacuuuuuuuucuuuuuuugaaauaaaauagccugucuuucagaucuaaaaaaaaaaaaaaaaaaaaaaaaaaaaaaaaaaaaaaaaaaaaaaaaaaaaaaaaaaaaaaaaaaaaaaaaaaaaaaaaaaaaaaaaaaaaaaaaaaaa

SEQ ID NO: 28863 - RNA, 1743 nt, Artificial Sequence
  mRNA product Design a-2 (A100) comprising derived and/or modified sequence from LASV(G733-SLE-2010;Clade IV)__AIT17154__GPCmut5 (opt1)
aggagaguccgcucagccagguugcagaagcggcuuagcguguguccuaaucuucucucugcguguagguaggccugugccgcaaacaagcuuaccaugggccagaucgugaccuucuuccaggaggucccccacgugaucgaggaggugaugaacaucguccugaucgcccucagcauccuggccgugcugaaggggcucuacaacuucgcgaccugcggcaucguggggcuggucuccuuccugcuccugugcggccgcagcugcacgaccucccuguacaaggggguguacgagcuccagacccuggagcugaacauggagacccucaacaugacgaugccgcugagcugcaccaagaacaacucccaccacuacaucauggugggcaacgagaccggccuggagcucacccugacgaacaccagcaucaucaaccacaaguucugcaaccuguccgacgcccacaagaagaaccucuacgaccacgcccugaugagcaucaucuccaccuuccaccugagcauccccaacuucaaccaguacgaggccauguccugcgacuucaacgggggcaagaucagcguccaguacaaccucucccacagcuacgccggggacgcggccaaccacugcggcaccaucgccaacggggugcugcagacguucaugcggauggccuggggcggcuccuacaucgcgcuggacagcgggugcgaccggugggacugcaucaugaccuccuaccaguaccucaucauccagaacaccaccugggaggaccacugccaguucagccgccccucccccaucggcuaccuggggcugcucagccagcggacgcgcgacaucuacaucagccggcgccugcugggcaccuucaccuggacccucuccgacagcgagggcaaggacacgcccgggggcuacugccugacccgguggaugcugaucgaggccgagcucaagugcuucgggaacaccgccguggccaagugcaacgagaagcacgacgaggaguucugcgacaugcugcgccuguucgacuucaacaagcaggccauccagcggcucaaggcgcccgcccagauguccauccagcugaucaacaaggccgucaacgcccugaucaacgaccagcucaucaugaagaaccaccuccgcgacaucaugugcauccccuacugcaacuacagcaaguacugguaccugaaccacaccacgaccgggaagaccucccugcccaagugcuggcuggugagcaacggcuccuaccugaacgagacccacuucagcgacgacaucgagcagcaggccgacaacaugaucacggagaugcuccagaaggaguacauggagcggcagggcaagaccccgcuggggcugguggaccucuucgucuucuccaccagcuucuaccugaucuccaucuuccugcaccuggugaagaucccgacccaccgccacguggucggcaagagcugccccaagccccaccggcucaaccacauggggaucugcuccugcggccuguacgggcagcccggcgugccggugaaguggaagcgcugaggacuagucccuguucccagagcccacuuuuuuuucuuuuuuugaaauaaaauagccugucuuucagaucuaaaaaaaaaaaaaaaaaaaaaaaaaaaaaaaaaaaaaaaaaaaaaaaaaaaaaaaaaaaaaaaaaaaaaaaaaaaaaaaaaaaaaaaaaaaaaaaaaaaa

SEQ ID NO: 28864 - RNA, 1743 nt, Artificial Sequence
  mRNA product Design a-2 (A100) comprising derived and/or modified sequence from MOPV/LASV reassortant(IGS-1;Clade IV)__AFY05576__GPCmut5 (opt1)
aggagaguccgcucagccagguugcagaagcggcuuagcguguguccuaaucuucucucugcguguagguaggccugugccgcaaacaagcuuaccaugggccagaucgugaccuucuuccaggaggucccccacgugaucgaggaggugaugaacaucguccugaucgcccucagcgugcuggccgugcugaaggggcucuacaacuucgcgaccugcggccuggucgggcuggugacguuccuccugcugugcggccgcuccugcaccaccagccucuacaaggggguguacgagcugcagacccuggagcucaacauggagacgcugaacaugaccaugccgcuguccugcaccaagaacaacagccaccacuacaucauggucggcaacgagaccggccucgagcugacgcugaccaacaccuccaucaucaaccacaaguucugcaaccucagcgacgcccacaagaagaaccuguacgaccacgcccugauguccaucaucagcaccuuccaccucuccauccccaacuucaaccaguacgaggccaugagcugcgacuucaacgggggcaagaucuccgugcaguacaaccugagccacuccuacgccggggacgcggccaaccacugcggcacgguggccaacgggguccugcagaccuucaugcggauggccuggggcggcagcuacaucgcgcucgacuccgggugcggcaacugggacugcaucaugaccagcuaccaguaccugaucauccagaacaccacgugggaggaccacugccaguucucccggcccagccccaucggguaccugggccuccugucccagcgcacccgggacaucuacaucagccgccggcugcucggcaccuucaccuggacgcugagcgacuccgagggggaggacaccccgggcggguacugccugacccgcuggaugcucaucgaggccgagcugaagugcuucggcaacaccgccguggccaagugcaacgagaagcacgacgaggaguucugcgacaugcugcggcuguucgacuucaacaagcaggccauccagcgccugaaggcgcccgcccagaugagcauccagcugaucaacaaggccgugaacgcccucaucaacgaccagcugaucaugaagaaccaccuccgggacaucaugugcauccccuacugcaacuacuccaaguacugguaccucaaccacacgaccaccggccgcaccagccugcccaagugcuggcuggucuccaacggcagcuaccucaacgagacgcacuucuccgacgacaucgagcagcaggccgacaacaugaucaccgagaugcugcagaaggaguacauggagcggcaggggaagacgccccugggccucguggaccuguucguguucagcaccuccuucuaccugaucagcaucuuccugcaccucgucaagaucccgacccaccgccacaucguggggaaguccugccccaagccccaccggcugaaccacaugggcaucugcagcugcgggcuguacaagcagcccggcgugccggucaaguggaagcgcugaggacuagucccuguucccagagcccacuuuuuuuucuuuuuuugaaauaaaauagccugucuuucagaucuaaaaaaaaaaaaaaaaaaaaaaaaaaaaaaaaaaaaaaaaaaaaaaaaaaaaaaaaaaaaaaaaaaaaaaaaaaaaaaaaaaaaaaaaaaaaaaaaaaaa

SEQ ID NO: 28865 - RNA, 1743 nt, Artificial Sequence
  mRNA product Design a-2 (A100) comprising derived and/or modified sequence from LASV(LM765-SLE-2012;Clade IV)__AIT17814__GPCmut5 (opt1)
aggagaguccgcucagccagguugcagaagcggcuuagcguguguccuaaucuucucucugcguguagguaggccugugccgcaaacaagcuuaccaugggccagaucgugaccuucuuccaggaggucccccacgugaucgaggaggugaugaacaucguccugaucgcccucagcauccuggccgugcugaaggggcucuacaacuucgcgaccugcggccugguggggcuggucacguuccuccugcugugcggccgcuccugcaccaccagccucuacaaggggguguacgagcugcagacccuggagcucaacauggagacgcugaacaugaccaugccgcuguccugcaccaagaacaacagccaccacuacaucauggugggcaacgagaccggccucgagcugacgcugaccaacaccuccaucaucgaccacaaguucugcaaccucagcgacgcccaccggaagaaccuguacgaccacgcccugauguccaucaucagcaccuuccaccucuccauccccaacuucaaccaguacgaggccaugagcugcgacuucaacgggggcaagaucuccguccaguacaaccugagccacuccuacgccaaggacgcggccgaccacugcgggacgguggccaacggcgugcugcagaccuucaugcgcauggccuggggcgggagcuacaucgcgcucgacuccggcugcgggcgcugggacugcaucaugaccagcuaccaguaccugaucauccagaacaccacgugggaggaccacugccaguucucccggcccagccccaucggcuaccuggggcuccugucccagcgcacccgggacaucuacaucagccgccggcugcucggcaccuucaccuggacgcugagcgacuccgagggcaaggacacccccgggggcuacugccugacccgcuggaugcucaucgaggccgagcugaagugcuucgggaacaccgccgucgccaagugcaacgagaagcacgacgaggaguucugcgacaugcugcggcuguucgacuucaacaagcaggccauccagcgccugaaggcgcccgcccagaugagcauccagcugaucaacaaggccgugaacgcccucaucaacgaccagcugaucaugaagaaccaccuccgggacaucaugugcauccccuacugcaacuacuccaaguacugguaccucaaccacacgaccaccgggaagaccagccugcccaagugcuggcugguguccaacggcagcuaccucaacgagacgcacuucuccgacgacaucgagcagcaggccgacaacaugaucaccgagaugcugcagaaggaguacauggagcgccagggcaagaccccgcuggggcucgucgaccuguucguguucagcaccuccuucuaccugaucagcaucuuccugcaccucgugaagaucccgacgcaccggcacaucgucggcaagcccugccccaagccccaccgccugaaccacauggggaucugcuccugcggccuguacaagcagccgggggugcccgugaaguggaagcggugaggacuagucccuguucccagagcccacuuuuuuuucuuuuuuugaaauaaaauagccugucuuucagaucuaaaaaaaaaaaaaaaaaaaaaaaaaaaaaaaaaaaaaaaaaaaaaaaaaaaaaaaaaaaaaaaaaaaaaaaaaaaaaaaaaaaaaaaaaaaaaaaaaaaa

SEQ ID NO: 28866 - RNA, 1743 nt, Artificial Sequence
  mRNA product Design a-2 (A100) comprising derived and/or modified sequence from LASV(LM776-SLE-2012;Clade IV)__AIT17824__GPCmut5 (opt1)
aggagaguccgcucagccagguugcagaagcggcuuagcguguguccuaaucuucucucugcguguagguaggccugugccgcaaacaagcuuaccaugggccagaucgugaccuucuuccaggaggucccccacgugaucgaggaggugaugaacaucguccugaucgcccucagcauccuggccgugcugaaggggcucuacaacuucgcgaccugcggccugguggggcuggucacguuccuccugcugugcggccgcuccugcaccaccagcguguacaaggggguguacgagcuccagacccuggagcugaacauggagacgcucaacaugaccaugccgcuguccugcaccaagaacaacagccaccacuacaucauggucggcaacgagaccggccuggagcucacgcugaccaacaccuccaucaucaaccacaaguucugcaaccugagcgacgcccacaagaagaaccucuacgaccacgcccugauguccaucaucagcaccuuccaccuguccauccccaacuucaaccaguacgaggccaugagcugcgacuucaacgggggcaagaucuccgugcaguacaaccucagccacuccuacgccggggacgcggccaaccacugcggcacgguggccaacgggguccugcagaccuucaugcggauggccuggggcggcagcuacaucgcgcuggacuccgggugcggcaagugggacugcaucaugaccagcuaccaguaccucaucauccagaacaccacgugggaggaccacugccaguucucccgccccagccccaucggguaccugggccugcucucccagcggacccgcgacaucuacaucagccggcgccugcugggcaccuucaccuggacgcucagcgacuccgaggggaaggacaccccgggcggguacugccugacccgguggaugcugaucgaggccgagcucaagugcuucggcaacaccgccguggccaagugcaacgagaagcacgacgaggaguucugcgacaugcugcgccuguucgacuucaacaagcaggccauccagcggcucaaggcgcccgcccagaugagcauccagcugaucaacaaggccgugaacgcccugaucaacgaccagcucaucaugaagaaccaccuccgcgacaucaugugcauccccuacugcaacuacuccaaguacugguaccugaaccacacgaccaccggcaagaccagccugcccaagugcuggcuggucuccaacggcagcuaccugaacgagacgcacuucuccgacgacaucgagcagcaggccgacaacaugaucaccgagaugcuccagaaggaguacauggagcggcaggggaagacgccccugggccugguggaccucuucguguucagcaccuccuucuaccugaucagcaucuuccugcaccuggucaagaucccgacccaccgccacaucguggggaaguccugccccaagccccaccggcucaaccacaugggcaucugcagcugcgggcuguacaagcagcccggcgugccgguccgcuggaagcggugaggacuagucccuguucccagagcccacuuuuuuuucuuuuuuugaaauaaaauagccugucuuucagaucuaaaaaaaaaaaaaaaaaaaaaaaaaaaaaaaaaaaaaaaaaaaaaaaaaaaaaaaaaaaaaaaaaaaaaaaaaaaaaaaaaaaaaaaaaaaaaaaaaaaa

SEQ ID NO: 28867 - RNA, 1743 nt, Artificial Sequence
  mRNA product Design a-2 (A100) comprising derived and/or modified sequence from LASV(Mad39;Clade IV)__ANH09722__GPCmut5 (opt1)
aggagaguccgcucagccagguugcagaagcggcuuagcguguguccuaaucuucucucugcguguagguaggccugugccgcaaacaagcuuaccaugggccagaucgugaccuucuuccaggaggucccccacgugaucgaggaggugaugaacaucguccugaucgcccucagcauccuggccgugcugaaggggcucuacaacguggcgaccugcggccugaucgggcuggucacguuccuccugcugugcggccgcuccugcaccaccacccucuacaaggggguguacgagcugcaggcccuggagcucaacauggagacgcugaacaugaccaugccgcugagcugcaccaagaacaacucccaccacuacauccgggugggcaacgagaccggccucgagcugacgcugaccaacaccagccucaucaaccacaaguucugcaaccuguccgacgcccacaagaagaaccuguacgaccacgcccucaugagcaucaucuccaccuuccaccugagcauccccaacuucaaccaguacgaggccauguccugcgacuucaacgacgggaagaucagcguccaguacaaccugucccacacguacgcgggcgacaccgccaaccacugcgggaccguggccaacggcgugcuccagaccuucaugcgcauggccuggggcgggagcuacaucgcgcuggacuccggcugcgggggcugggacugcaucaugacgagcuaccaguaccugaucauccagaacaccaccugggaggaccacugccaguucucccggcccagccccaucggguaccucggccugcugucccagcggacccgcgacaucuacaucagccggcgccuccugggcacguucaccuggacccuguccgacagcgaggggaaggacaccccgggcggguacugccucacgcgguggaugcugaucgaggccgagcugaagugcuucggcaacaccgccgucgccaagugcaacgagaagcacgacgaggaguucugcgacaugcuccgccuguucgacuucaacaagcaggccauccagcggcugaaggcgcccgcccagaugagcauccagcucaucaacaaggccgugaacgcccugaucaacgaccagcugaucaugaagaaccaccuccgcgacaucaugugcauccccuacugcaacuacuccaaguacugguaccugaaccacaccgugaccggcaagacgagccugcccaagugcuggcucgucuccaacggcagcuaccugaacgagacccacuucuccgacgacaucgagcagcaggccgacaacaugaucaccgagaugcugcagaaggaguacauggagcggcaggggaagacgccccucggccugguggaccuguucguguucagcaccuccuucuaccugaucagcaucuuccuccaccuggucaagaucccgacccaccgccacgugguggggaagcccugccccaagccccaccggcugaaccacaugggcaucugcuccugcggguucuacaagcagccgggcguccccgugcgcuggaagcggugaggacuagucccuguucccagagcccacuuuuuuuucuuuuuuugaaauaaaauagccugucuuucagaucuaaaaaaaaaaaaaaaaaaaaaaaaaaaaaaaaaaaaaaaaaaaaaaaaaaaaaaaaaaaaaaaaaaaaaaaaaaaaaaaaaaaaaaaaaaaaaaaaaaaa

SEQ ID NO: 28868 - RNA, 1743 nt, Artificial Sequence
  mRNA product Design a-2 (A100) comprising derived and/or modified sequence from LASV(Z0947-SLE-2011;Clade IV)__AIT17840__GPCmut5 (opt1)
aggagaguccgcucagccagguugcagaagcggcuuagcguguguccuaaucuucucucugcguguagguaggccugugccgcaaacaagcuuaccaugggccagaucgugaccuucuuccaggaggucccccacgugaucgaggaggugaugaacaucguccugaucgcccucagcauccuggccgugcugaaggggcucuacaacuucgcgaccugcggccugguggggcuggucacguuccuccugcugugcggccgcuccugcaccaucagccucuacaaggggguguacgagcugcagacccuggagcucaacauggagacccugaacaugacgaugccgcuguccugcaccaagaacaacagccaccacuacaucauggugggcaacgagaccggccucgagcugacccugacgaacaccuccaucaucaaccacaaguucugcaaccucagcgacgcccacaagaagaaccuguacgaccacgcccugauguccaucaucagcaccuuccaccucuccauccccaacuucaaccaguacgaggccaugagcugcgacuucaacgggggcaagaucuccguccaguacaaccugagccacuccuacgccggggacgcggccaaccacugcggcaccguggccaacggggugcugcagacguucaugcggauggccuggggcggcagcuacaucgcgcucgacuccgggugcgaccggugggacugcaucaugaccagcuaccaguaccugaucauccagaacaccaccugggaggaccacugccaguucucccgccccagccccaucggcuaccuggggcuccugucccagcggacgcgcgacaucuacaucagccggcgccugcucggcaccuucaccuggacccugagcgacuccgagggcaaggacacgcccgggggcuacugccugacccgguggaugcucaucgaggccgagcugaagugcuucgggaacaccgccgucgccaagugcaacgagaagcacgacgaggaguucugcgacaugcugcgccucuucgacuucaacaagcaggccauccagcggcugaaggcgcccgcccagaugagcauccagcugaucaacaaggccgugaacgcccucaucaacgaccagcugaucaugaagaaccaccuccgcgacaucaugugcauccccuacugcaacuacuccaaguacugguaccugaaccacaccacgaccgggaagaccagccugcccaagugcuggcugguguccaacggcagcuaccucaacgagacccacuucuccgacgacaucgagcagcaggccgacaacaugaucacggagaugcugcagaaggaguacauggagcggcagggcaagaccccgcuggggcucgucgaccuguucguguucagcaccuccuucuaccugaucagcaucuuccugcaccucgugaagaucccgacccaccgccacaucgucggcaagcccugccccaagccccaccggcugaaccacauggggaucugcuccugcggccuguacaagcagccgggggugcccgugaaguggaagcgcugaggacuagucccuguucccagagcccacuuuuuuuucuuuuuuugaaauaaaauagccugucuuucagaucuaaaaaaaaaaaaaaaaaaaaaaaaaaaaaaaaaaaaaaaaaaaaaaaaaaaaaaaaaaaaaaaaaaaaaaaaaaaaaaaaaaaaaaaaaaaaaaaaaaaa

SEQ ID NO: 28869 - RNA, 1743 nt, Artificial Sequence
  mRNA product Design a-2 (A100) comprising derived and/or modified sequence from LASV(Josiah;Clade IV)__NP_694870__GPCmut5 (opt1)
aggagaguccgcucagccagguugcagaagcggcuuagcguguguccuaaucuucucucugcguguagguaggccugugccgcaaacaagcuuaccaugggccagaucgugaccuucuuccaggaggucccccacgugaucgaggaggugaugaacaucguccugaucgcccucagcgugcuggccgugcugaaggggcucuacaacuucgcgaccugcggccuggucgggcuggugacguuccuccugcugugcggccgcuccugcaccaccagccucuacaaggggguguacgagcugcagacccuggagcucaacauggagacgcugaacaugaccaugccgcuguccugcaccaagaacaacagccaccacuacaucauggucggcaacgagaccggccucgagcugacgcugaccaacaccuccaucaucaaccacaaguucugcaaccucagcgacgcccacaagaagaaccuguacgaccacgcccugauguccaucaucagcaccuuccaccucuccauccccaacuucaaccaguacgaggccaugagcugcgacuucaacgggggcaagaucuccgugcaguacaaccugagccacuccuacgccggggacgcggccaaccacugcggcacgguggccaacgggguccugcagaccuucaugcggauggccuggggcggcagcuacaucgcgcucgacuccgggugcggcaacugggacugcaucaugaccagcuaccaguaccugaucauccagaacaccacgugggaggaccacugccaguucucccgccccagccccaucggguaccugggccuccugucccagcggacccgcgacaucuacaucagccggcgccugcucggcaccuucaccuggacgcugagcgacuccgaggggaaggacaccccgggcggguacugccugacccgguggaugcucaucgaggccgagcugaagugcuucggcaacaccgccguggccaagugcaacgagaagcacgacgaggaguucugcgacaugcugcgccucuucgacuucaacaagcaggccauccagcggcugaaggcgcccgcccagaugagcauccagcugaucaacaaggccgugaacgcccucaucaacgaccagcugaucaugaagaaccaccuccgcgacaucaugugcauccccuacugcaacuacuccaaguacugguaccugaaccacacgaccaccgggcggaccagccugcccaagugcuggcuggucuccaacggcagcuaccucaacgagacgcacuucuccgacgacaucgagcagcaggccgacaacaugaucaccgagaugcugcagaaggaguacauggagcgccagggcaagaccccgcuggggcugguggaccucuucguguucagcaccuccuucuaccugaucagcaucuuccugcaccucgucaagauccccacgcaccggcacaucgugggcaaguccugccccaagccccaccgccugaaccacauggggaucugcagcugcggccuguacaagcagccgggggugcccgucaaguggaagcggugaggacuagucccuguucccagagcccacuuuuuuuucuuuuuuugaaauaaaauagccugucuuucagaucuaaaaaaaaaaaaaaaaaaaaaaaaaaaaaaaaaaaaaaaaaaaaaaaaaaaaaaaaaaaaaaaaaaaaaaaaaaaaaaaaaaaaaaaaaaaaaaaaaaaa

SEQ ID NO: 28870 - RNA, 1740 nt, Artificial Sequence
  mRNA product Design a-2 (A100) comprising derived and/or modified sequence from LASV(LP;Clade I)__AAF86701__GPCmut5 (opt1)
aggagaguccgcucagccagguugcagaagcggcuuagcguguguccuaaucuucucucugcguguagguaggccugugccgcaaacaagcuuaccaugggccagaucaucaccuucuuccaggaggugccccacgucaucgaggaggugaugaacaucgugcugaucgcccucagccugcuggccauccucaaggggcuguacaacaucgcgaccugcggcaucaucgggcuggucgccuuccucuuccugugcggcaaguccugcagccugacgcucaagggcggguacgagcugcagacccuggagcucaacauggagacccugaacaugaccaugccgcuguccugcacgaagaacagcucccaccacuacauccgcgugggcaacgagaccgggcucgagcugacccugaccaacacgagcaucaucaaccacaaguucugcaaccucuccgacgcccacaagaagaaccuguacgaccacgcccugaugagcaucaucuccaccuuccaccucagcauccccaacuucaaccaguacgaggccauguccugcgacuucaacggcgggaagaucagcgugcaguacaaccugucccacagcuacgcgggcgacgccgccgagcacugcgggaccgucgccaacggcgugcugcagaccuucaugcggauggcguggggcgggcgcuacaucgcccucgacuccggcugcgggaacugggacugcaucaugacgagcuaccaguaccugaucauccagaacaccaccugggaggaccacugccaguucucccggcccagccccaucggcuaccugggccuccugucccagcgcacccgggacaucuacaucagccgccggcugcucgggacguucaccuggacccugagcgacuccgagggcaacgagacccccgggggcuacugccugacgcgcuggaugcucaucgaggccgagcugaagugcuucgggaacaccgccguggccaagugcaacgagaagcacgacgaggaguucugcgacaugcugcggcuguucgacuucaacaagcaggcgauccgccggcugaaggccccggcccagaugagcauccagcugaucaacaaggccgucaacgcccucaucaacgaccagcugaucaugaagaaccaccuccgcgacaucaugugcauccccuacugcaacuacuccaaguacugguaccucaaccacaccagcuccggccggaccagccugcccaagugcuggcugaucuccaacggcagcuaccucaacgagacgcaguucuccgacgacaucgagcagcaggcggacaacaugaucaccgagaugcugcagaaggaguacaucgagcgccaggggaagaccccgcugggccugguggacaucuucaucuucagcaccuccuucuaccucaucagcaucuuccugcaccugaucaagauccccacgcaccggcacaucguggggaagcccugccccaagccgcaccgccucaaccacaugggcgucugcuccugcgggcuguacaagcaccccggcgugcccaccaaguggaagcggugaggacuagucccuguucccagagcccacuuuuuuuucuuuuuuugaaauaaaauagccugucuuucagaucuaaaaaaaaaaaaaaaaaaaaaaaaaaaaaaaaaaaaaaaaaaaaaaaaaaaaaaaaaaaaaaaaaaaaaaaaaaaaaaaaaaaaaaaaaaaaaaaaaaaa

SEQ ID NO: 28871 - RNA, 1740 nt, Artificial Sequence
  mRNA product Design a-2 (A100) comprising derived and/or modified sequence from LASV(803213;Clade II)__AAF86703__GPCmut5 (opt1)
aggagaguccgcucagccagguugcagaagcggcuuagcguguguccuaaucuucucucugcguguagguaggccugugccgcaaacaagcuuaccaugggccagaucaucaccuucuuccaggaggugccccacgucaucgaggaggugaugaacaucgugcugaucgcccucagccugcuggccauccucaaggggaucuacaacgucgcgaccugcggccuguucgggcugaucuccuuccuccugcugugcggccgcagcugcuccgugacguacaaggggguguacgagcuccagacccuggagcugaacauggccaaccucaacaugaccaugccgcugagcugcaccaagaacaacucccaccacuacaucauggucggcaacgagacgggccuggagcucacccugaccaacaccagcaucaucaaccacaaguucugcaaccuguccgacgcccacaagaagaaccucuacgaccacgcccugaugagcaucaucuccacguuccaccugagcauccccaacuucaaccaguacgaggccauguccugcgacuucaacgggggcaagaucagcgugcaguacaaccucucccacagcuucgcgguggacgccgccaaccacugcgggaccaucgccaacggcguccugcagaccuucaugcggauggcguggggcggguccuacaucgcccuggacagcggcugcgggaacugggacugcaucaugaccuccuaccaguaccucaucauccagaacacgaccugggaggaccacugccaguucagccgccccucccccaucggcuaccuggggcugcucagccagcggacccgcgacaucuacaucagccggcgccugcugggcaccuucacguggacccucuccgacagcgagggcaacgaggcccccgggggcuacugccugacccgguggaugcugaucgaggccgagcucaagugcuucgggaacaccgccguggcgaagugcaacgagaagcacgacgaggaguucugcgacaugcugcgccuguucgacuucaacaagcaggccaucaagcggcucaagacgccggcccagauguccauccagcugaucaacaaggccgugaacgcccugaucaacgaccagcucaucaugaagaaccaccuccgcgacaucaugugcauccccuacugcaacuacagccgguacugguaccugaaccacaccgucaccggcaagaccucccugccccgcugcuggcuggugagcaacggguccuaccugaacgagacgcacuucagcgacgacaucgagcagcaggcggacaacaugaucaccgagaugcuccagaaggaguacauggaccggcagggcaagaccccgcugggccugguggaccuguucgucuucuccaccagcuucuaccucaucuccaucuuccugcaccuggugaagauccccacgcaccgccacaucguggggaagcccugccccaagccgcaccggcucaaccacaugggcaucugcagcugcgggcuguacaagcaccccggcguccccgugaaguggaagcgcugaggacuagucccuguucccagagcccacuuuuuuuucuuuuuuugaaauaaaauagccugucuuucagaucuaaaaaaaaaaaaaaaaaaaaaaaaaaaaaaaaaaaaaaaaaaaaaaaaaaaaaaaaaaaaaaaaaaaaaaaaaaaaaaaaaaaaaaaaaaaaaaaaaaaa

SEQ ID NO: 28872 - RNA, 1740 nt, Artificial Sequence
  mRNA product Design a-2 (A100) comprising derived and/or modified sequence from LASV(GA391;Clade III)__CAA36645__GPCmut5 (opt1)
aggagaguccgcucagccagguugcagaagcggcuuagcguguguccuaaucuucucucugcguguagguaggccugugccgcaaacaagcuuaccaugggccagaucgugaccuucuuccaggaggucccccacgugaucgaggaggugaugaacaucguccugaucgcccucagcauccuggccauccugaaggggcucuacaacguggcgaccugcggccugaucgggcuggugacguuccuccugcuguccggccgcagcugcucccucaucuacaaggggaccuacgagcugcagacccuggagcucaacauggagacccugaacaugacgaugccgcugagcugcaccaagaacaacucccaccacuacauccgggucggcaacgagaccggccucgagcugacccugacgaacaccagcauccucaaccacaaguucugcaaccuguccgacgcccacaagcgcaaccuguacgaccacagccucauguccaucaucagcaccuuccaccuguccauccccaacuucaaccaguacgaggccaugagcugcgacuucaacgggggcaagaucaccgugcaguacaaccugucccacagcuucgccguggacgccgcggggcacugcggcacgcucgccaacgggguccugcagaccuucaugcggauggccuggggcggcuccuacaucgcccuggacagcgggugcggcaacugggacugcaucaugaccuccuaccaguaccucaucauccagaacaccacgugggacgaccacugccaguucagccgccccucccccaucggguaccugggccugcucagccagcggacccgcgacaucuacaucagccggcgccugcugggcaccuucaccuggacgcucuccgacagcgaggggaacgagaccccgggcggguacugccugacccgguggaugcugaucgaggcggagcucaagugcuucggcaacaccgccguggccaagugcaacgagaagcacgacgaggaguucugcgacaugcugcgccuguucgacuucaacaagcaggccauccggcgccucaagacgcccgcccagauguccauccagcugaucaacaaggcggugaacgcccugaucaacgaccagcucaucaugaagaaccaccuccgggacaucaugugcauccccuacugcaacuacagccgcuacugguaccugaaccacaccuccaccgggaagaccagccugccccggugcuggcugaucuccaacggcagcuaccugaacgagacgaaguucuccgacgacaucgagcagcaggccgacaacaugaucaccgagaugcugcagaaggaguacaucgaccgccagggcaagaccccgcucgggcuggucgaccuguucguguucagcaccuccuucuaccucaucagcaucuuccugcaccuggugaagauccccacgcaccggcacaucgucggcaagcccugccccaagccgcaccgccucaaccacauggggaucugcuccugcggccuguacaagcagcccggggugcccgugcgguggaagcgcugaggacuagucccuguucccagagcccacuuuuuuuucuuuuuuugaaauaaaauagccugucuuucagaucuaaaaaaaaaaaaaaaaaaaaaaaaaaaaaaaaaaaaaaaaaaaaaaaaaaaaaaaaaaaaaaaaaaaaaaaaaaaaaaaaaaaaaaaaaaaaaaaaaaaa

SEQ ID NO: 28873 - RNA, 1743 nt, Artificial Sequence
  mRNA product Design a-2 (A100) comprising derived and/or modified sequence from LASV(AV;Clade V)__CCA30314__GPCmut5 (opt1)
aggagaguccgcucagccagguugcagaagcggcuuagcguguguccuaaucuucucucugcguguagguaggccugugccgcaaacaagcuuaccaugggccagaucgugaccuucuuccaggaggucccccacgugaucgaggaggugaugaacaucguccugaucgcccucagcauccuggccgugcugaaggggcucuacaacaucgcgaccugcggccugaucgggcugaucacguuccuccugcugugcggccgcuccugcagcuccaaccucuacaaggggguguacgagcugcagagccuggaccucaacauggagacccugaacaugaccaugccgcuguccugcaccaagaacaacagccaccacuacauccgggucggcaacgacacgggccucgagcugacccugaccaacaccuccauccucaaccacaaguucugcaaccugagcgacgcccacaagaaggaccuguacgaccacgcccucauguccaucaucagcacguuccaccuguccauccccaacuucaaccaguacgaggccaugagcugcgacuucaacgggggcaagaucuccgugcaguacaaccugagccacuccuacgccaucgacgcggccaaccacugcgggaccguggccaacggcauccuccagaccuucaugcgcauggccuggggcgggagcuacaucgcgcuggacuccggcugcgggaacugggacugcaucaugaccagcuaccaguaccugaucauccagaacacgaccugggagaaccacugccaguucucccggcccagccccaucggcuaccucgggcugcugagccagcgcacccgggacaucuacaucucccgccggcuccugggcaccuucacguggacccugagcgacuccgagggcaacgccacccccgggggcuacugccucacccgcuggaugcugaucgaggccgagcugaagugcuucgggaacacggccgucgccaagugcaacgagaagcacgacgaggaguucugcgacaugcuccggcuguucgacuucaacaagcaggcgaucagccgccugaaguccccggcccagaugagcauccagcucaucaacaaggccgugaacgcccugaucaacgaccagcugaucaugaagaaccaccuccgggacaucaugugcauccccuacugcaacuacuccaaguacugguaccugaaccacaccaucaccggcaagaccagccugcccaagugcuggcucguguccaacgggagcuaccugaacgagacgcacuucuccgacgacaucgagcagcaggccgacaacaugaucaccgagaugcugcagaaggaguacauggagcgccagggcaagaccccgcugggccucgucgaccuguucguguucagcaccuccuucuaccugaucagcaucuuccuccggcuggugaagauccccacgcaccgccacaucgucgggaagcccugccccaagccgcaccggcugaaccacaugggcaucugcuccugcgggcucuacaagcagcccggcgugcccgugcgcuggaagcggugaggacuagucccuguucccagagcccacuuuuuuuucuuuuuuugaaauaaaauagccugucuuucagaucuaaaaaaaaaaaaaaaaaaaaaaaaaaaaaaaaaaaaaaaaaaaaaaaaaaaaaaaaaaaaaaaaaaaaaaaaaaaaaaaaaaaaaaaaaaaaaaaaaaaa

SEQ ID NO: 28874 - RNA, 1740 nt, Artificial Sequence
  mRNA product Design a-2 (A100) comprising derived and/or modified sequence from LASV(Togo/2016/7082;Clade VI)__AMR44577__GPCmut5 (opt1)
aggagaguccgcucagccagguugcagaagcggcuuagcguguguccuaaucuucucucugcguguagguaggccugugccgcaaacaagcuuaccaugggccagaucaucaccuucuuccaggaggugccccacgucaucgaggaggugaugaacaucgugcugaucgcccucagccugcuggccauccucaagggggucuacaacguggcgaccugcggcaucaucgggcuggugacguuccuguuccucugcggccgcuccugcagccugaucuacaagggguccuacgagcugcagacccucgagcugaacauggagacccugaacaugaccaugccgcucagcugcacgaagaacuccagccaccacuacauccgggucggcaacgagaccggccuggagcugacccucaccaacacguccaucaucaaccacaaguucugcaaccugagcgacgcccacaagcgcaaccuguacgaccacgcccucauguccauccugagcaccuuccaccuguccauccccaacuucaaccaguacgaggccaugagcugcgacuucaacgggggcaagaucuccgugcaguacaaccucagccacgccuacgcgguggacgccgccgagcacugcgggaccgucgccaacggcgugcugcagaccuucaugcggauggcguggggcggguccuacaucgcccuggacagcggcugcgggaacugggacugcaucaugacguccuaccaguaccucaucauccagaacaccaccugggaggaccacugccaguucagccgccccucccccaucggcuaccuggggcugcucagccagcggacccgcgacaucuacaucagccggcgccugcugggcacguucaccuggacccucuccgacagcgagggcaacgagacccccgggggcuacugccugacgcgguggaugcugaucgaggccgagcucaagugcuucgggaacaccgccguggccaagugcaacgagaagcacgacgaggaguucugcgacaugcugcgccuguucgacuucaacaagcaggcgauccagcggcucaaguccccggcccagaugagcauccagcugaucaacaaggccgucaacgcccugaucaacgaccagcucaucaugaagaaccaccuccgcgacaugaugugcauccccuacugcaacuacuccaaguacugguaccugaaccacaccagcuccggccggaccagccugcccaagugcuggcugguguccaacgggagcuaccugaacgagacgcacuucuccgacgacaucgagcagcaggccgacaacaugaucaccgagaugcuccagaaggaguacaucgaccgccagggcaagaccccgcugggccugguggaccuguucgucuucagcaccuccuucuaccucaucagcaucuuccugcaccugaucaagauccccacgcaccggcacaucguggggaagcccugccccaagccgcaccgccucaaccacaugggcaucugcuccugcgggcuguacaagcagcccggcgugcccacccgguggaagcgcugaggacuagucccuguucccagagcccacuuuuuuuucuuuuuuugaaauaaaauagccugucuuucagaucuaaaaaaaaaaaaaaaaaaaaaaaaaaaaaaaaaaaaaaaaaaaaaaaaaaaaaaaaaaaaaaaaaaaaaaaaaaaaaaaaaaaaaaaaaaaaaaaaaaaa

SEQ ID NO: 28875 - RNA, 1740 nt, Artificial Sequence
  mRNA product Design a-2 (A100) comprising derived and/or modified sequence from LASV(KAK-428;Clade n.d. (VII))__ANH09740__GPCmut5 (opt1)
aggagaguccgcucagccagguugcagaagcggcuuagcguguguccuaaucuucucucugcguguagguaggccugugccgcaaacaagcuuaccaugggccagaucgugaccuucuuccaggaggucccccacgugaucgaggaggugaugaacaucguccugaucgcccucagccugcuggccauccucaaggggcuguacaacuucgcgaccugcggcgugaucgggcugaucacguuccuccugcugugcggccgcuccugcagcgccaccuacaaggggcaguacgagcuccagacccuggagcugaacauggagucccucaacaugaccaugccgcugagcugcacgaagaacaacucccaccacuacauccgggccggcaacaacaccggccuggagcucacccugaccaacacgagcaucaucucccacaaguucugcaaccugagcgacgcccacaagaagaaccucuacgaccacacccugauguccaucaucaccaccuuccaccugagcauccccaacuucaaccaguacgaggccauguccugcgacuucaacgggggcaagaucagcauccaguacaaccucucccacagcuacgcgggggacgccgcccagcacugcggcacgguggccaacgggguccugcagaccuucaugcgcauggcguggggcggcuccuaccuggcccucgacagcgggugccggggcugggacugcaucaucuccagcuaccaguaccugaucauccagaacaccaccugggacgaccacugccaguucucccgccccagccccaucggguaccugggcuucgugagccagaagacgcgggacaucuacaucucccgccggcuccugggcaccuucaccuggacccugagcgacuccgaggggcacgacaugccgggcggguacugccucacgcgcuggaugcugaucgaggccgaccugaagugcuucggcaacaccgccguggccaagugcaacgagaagcacgacgaggaguucugcgacauguggcggcuguucgacuucaacaagcaggcgauccagcgccugaaggcccccgcccagaugaacauccagcugaucaacaaggccgucaacgcccucaucaacgaccagcugaugaugaagaaccaccuccgggacaucaugugcauccccuacugcaacuacagcaaguucugguaccucaacaacaccaccacggggcgcaccucccugccccggugcuggcugaucagcaacggcuccuaccucaacgagacccacuucagcgacgacaucgagcagcaggcggacaacaugaucaccgagaugcugcagaaggaguacauggaccgccagggcaagacgccgcuggggcucguggaccuguucguguucuccaccagcuucuaccugaucaccaucuuccugcaccucgucaagauccccacccaccggcacaucgugggcaagcccugccccaagccgcaccgccugaaccacauggggaucugcuccugcggccuguacaagcagcccggggugcccguccgguggaagcgcugaggacuagucccuguucccagagcccacuuuuuuuucuuuuuuugaaauaaaauagccugucuuucagaucuaaaaaaaaaaaaaaaaaaaaaaaaaaaaaaaaaaaaaaaaaaaaaaaaaaaaaaaaaaaaaaaaaaaaaaaaaaaaaaaaaaaaaaaaaaaaaaaaaaaa

SEQ ID NO: 28876 - RNA, 1740 nt, Artificial Sequence; identical to SEQ ID NO: 28870
  mRNA product Design a-2 (A100) comprising derived and/or modified sequence from LASV(Pinneo-NIG-1969;Clade I)__AIT17836__GPCmut5 (opt1)

SEQ ID NO: 28877 - RNA, 1740 nt, Artificial Sequence
  mRNA product Design a-2 (A100) comprising derived and/or modified sequence from LASV(ISTH0009-NIG-2011;Clade II)__AIT17404__GPCmut5 (opt1)
aggagaguccgcucagccagguugcagaagcggcuuagcguguguccuaaucuucucucugcguguagguaggccugugccgcaaacaagcuuaccaugggccagaucaucaccuucuuccaggaggugccccacgucaucgaggaggugaugaacaucgugcugaucgcccucagccugcuggccauccucaaggggaucuacaacgucgcgaccugcggccuguucgggcugguguccuuccuccugcugugcggccgcagcugcuccacgaccuacaaggggguguacgagcuccagacccuggagcuggacauggccagccucaacaugaccaugccgcuguccugcacgaagaacaacagccaccacuacaucauggucggcaacgagaccggccuggagcucacccugaccaacacguccaucaucaaccacaaguucugcaaccugagcgacgcccacaagaagaaccucuacgaccacgcccugauguccaucaucagcaccuuccaccuguccauccccaacuucaaccaguacgaggccaugagcugcgacuucaacgggggcaagaucuccgugcaguacaaccucagccacgcguacgccguggacgccgccaaccacugcgggaccaucgcgaacggcguccugcagaccuucaugcggauggccuggggcggguccuacaucgcccuggacagcggcugcggguccugggacugcaucaugacgagcuaccaguaccucaucauccagaacaccaccugggaggaccacugccaguucucccgccccagccccaucggcuaccuggggcugcucagccagcggacccgcgacaucuacaucucccggcgccugcugggcacguucaccuggacccucagcgacuccgagggcaacgagacccccgggggcuacugccugacgcgguggaugcugaucgaggccgagcucaagugcuucgggaacaccgccguggcgaagugcaacgagaagcacgacgaggaguucugcgacaugcugcgccuguucgacuucaacaagcaggccauccggcgccucaagaccccggcccagaugagcauccagcugaucaacaaggccgugaacgcccugaucaacgaccagcucaucaugaagaaccaccuccgggacaucaugugcauccccuacugcaacuacuccaaguacugguaccugaaccacaccgucacgggcaagaccagccugccccgcugcuggcugguguccaacgggagcuaccugaacgagacccacuucuccgacgacaucgagcagcaggcggacaacaugaucaccgagcuccugcagaaggaguacauggaccggcagggcaagacgccgcugggccugguggaccucuucgucuucagcaccuccuucuaccugaucagcaucuuccugcaccucaucaagauccccacccaccgccacaucaccgggaagcccugccccaagccgcaccggcugaaccacaugggcaucugcuccugcgggcuguacaagcaccccggcgugcccgugaaguggaagcgcugaggacuagucccuguucccagagcccacuuuuuuuucuuuuuuugaaauaaaauagccugucuuucagaucuaaaaaaaaaaaaaaaaaaaaaaaaaaaaaaaaaaaaaaaaaaaaaaaaaaaaaaaaaaaaaaaaaaaaaaaaaaaaaaaaaaaaaaaaaaaaaaaaaaaa

SEQ ID NO: 28878 - RNA, 1740 nt, Artificial Sequence
  mRNA product Design a-2 (A100) comprising derived and/or modified sequence from LASV(ISTH2010-NIG-2012;Clade II)__AIT17482__GPCmut5 (opt1)
aggagaguccgcucagccagguugcagaagcggcuuagcguguguccuaaucuucucucugcguguagguaggccugugccgcaaacaagcuuaccaugggccagaucaucaccuucuuccaggaggugccccacgucaucgaggaggugaugaacaucgugcugaucgcccucagccugcuggccauccucaaggggaucuacaacgucgcgaccugcggccuguucgggcugguguccuuccuccugcugugcggccgcagcugcuccacgaccuacaaggggguguacgagcuccagacccuggagcuggacauggccagccucaacaugaccaugccgcuguccugcacgaagaacaacagccaccacuacaucauggucggcaacgagaccggccuggagcucacccugaccaacacguccaucaucaaccacaaguucugcaaccugagcgacgcccacaagaagaaccucuacgaccacgcccugauguccaucaucagcaccuuccaccuguccauccccaacuucaaccaguacgaggccaugagcugcgacuucaacgggggcaagaucuccgugcaguacaaccucagccacgcguacgccguggacgccgccaaccacugcgggaccaucgcgaacggcguccugcagaccuucaugcggauggccuggggcggguccuacaucgcccuggacagcggcugcggguccugggacugcaucaugacgagcuaccaguaccucaucauccagaacaucaccugggaggaccacugccaguucucccgccccagccccaucggcuaccuggggcugcucagccagcggacccgcgacaucuacaucucccggcgccugcugggcaccuucacguggacccucagcgacuccgagggcaacgagacccccgggggcuacugccugacccgguggaugcugaucgaggccgagcucaagugcuucgggaacacggccguggcgaagugcaacgagaagcacgacgaggaguucugcgacaugcugcgccuguucgacuucaacaagcaggccauccggcgccucaagaccccggcccagaugagcauccagcugaucaacaaggccgugaacgcccugaucaacgaccagcucaucaugaagaaccaccuccgggacaucaugugcauccccuacugcaacuacuccaaguacugguaccugaaccacaccgucaccggcaagacgagccugccccgcugcuggcugguguccaacgggagcuaccugaacgagacccacuucuccgacgacaucgagcagcaggcggacaacaugaucaccgagcuccugcagaaggaguacaucgaccggcagggcaagaccccgcugggccugguggaccucuucgucuucagcacguccuucuaccugaucagcaucuuccugcaccucgugaagauccccacccaccgccacguggucgggaagcccugccccaagccgcaccggcugaaccacaugggcaucugcuccugcgggcuguacaagcaccccggcgugcccgugaaguggaagcgcugaggacuagucccuguucccagagcccacuuuuuuuucuuuuuuugaaauaaaauagccugucuuucagaucuaaaaaaaaaaaaaaaaaaaaaaaaaaaaaaaaaaaaaaaaaaaaaaaaaaaaaaaaaaaaaaaaaaaaaaaaaaaaaaaaaaaaaaaaaaaaaaaaaaaa

SEQ ID NO: 28879 - RNA, 1740 nt, Artificial Sequence
  mRNA product Design a-2 (A100) comprising derived and/or modified sequence from LASV(Lassa virus/H.sapiens-wt/NGA/2015/ISTH_0543;Clade II)__AVO03639__GPCmut5 (opt1)
aggagaguccgcucagccagguugcagaagcggcuuagcguguguccuaaucuucucucugcguguagguaggccugugccgcaaacaagcuuaccaugggccagaucaucaccuucuuccaggaggugccccacgucaucgaggaggugaugaacaucgugcugaucgcccucagccugcuggccauccucaaggggaucuacaacgucgcgaccugcggccuguucgggcugguguccuuccuccugcugugcggccgcagcugcuccacgaccuacaaggggguguacgagcuccagacccuggagcuggacauggccaaccucaacaugaccaugccgcugagcugcacgaagaacaacucccaccacuacaucauggucggcaacgagaccggccuggagcucacccugaccaacacgagcaucaucaaccacaaguucugcaaccuguccgacgcccacaagaagaaccucuacgaccacgcccugaugagcaucaucuccaccuuccaccugagcauccccaacuucaaccaguacgaggccauguccugcgacuucaacgggggcaagaucagcgugcaguacaaccucucccacaccuacgcgguggacgccgccaaccacugcgggaccaucgccaacggcguccugcagacguucaugcggauggcguggggcgggagcuacaucgcccuggacuccggcugcgggagcugggacugcaucaugaccuccuaccaguaccucgugauccagaacaccaccugggaggaccacugccaguucagccgccccucccccaucggcuaccuggggcugcucagccagcggacgcgcgacaucuacaucagccggcgccugcugggcaccuucaccuggacccucuccgacagcgagggcaacgagacgcccgggggcuacugccugacccgguggaugcugaucgaggccgagcucaagugcuucgggaacaccgccguggccaagugcaacgagaagcacgacgaggaguucugcgacaugcugcgccuguucgacuucaacaagcaggcgauccggcgccucaagaccccggcccagauguccauccagcugaucaacaaggccgucaacgcccugaucaacgaccagcucaucaugaagaaccaccuccgggacaucaugugcauccccuacugcaacuacagcaaguacugguaccugaaccacacggugaccggcaagaccucccugccccgcugcuggcuggugagcaacggguccuaccugaacgagacccacuucagcgacgacaucgagcagcaggccgacaacaugaucacggagcuccugcagaaggaguacaucgaccggcagggcaagaccccgcugggccuggucgaccucuucguguucuccaccagcuucuaccugaucuccaucuuccugcaccucgugaagauccccacccaccgccacaucacggggaagcccugccccaagccgcaccggcugaaccacaugggcaucugcagcugcgggcuguacaagcaccccggcguccccgugaaguggaagcgcugaggacuagucccuguucccagagcccacuuuuuuuucuuuuuuugaaauaaaauagccugucuuucagaucuaaaaaaaaaaaaaaaaaaaaaaaaaaaaaaaaaaaaaaaaaaaaaaaaaaaaaaaaaaaaaaaaaaaaaaaaaaaaaaaaaaaaaaaaaaaaaaaaaaaa

SEQ ID NO: 28880 - RNA, 1740 nt, Artificial Sequence
  mRNA product Design a-2 (A100) comprising derived and/or modified sequence from LASV(Lassa virus/H.sapiens-wt/NGA/2016/ISTH_0009;Clade II)__AVO03571__GPCmut5 (opt1)
aggagaguccgcucagccagguugcagaagcggcuuagcguguguccuaaucuucucucugcguguagguaggccugugccgcaaacaagcuuaccaugggccagaucaucaccuucuuccaggaggugccccacgucaucgaggaggugaugaacaucgugcugaucgcccucagccugcuggccauccucaaggggaucuacaacgucgcgaccugcggccugcuggggcucguguccuuccugcugcucugcggccgcagcugcuccacgaccuacaaggggguguacgagcugcagacccuggagcucgacauggccagccugaacaugaccaugccgcuguccugcacgaagaacaacagccaccacuacaucauggucggcaacgagaccggccucgagcugacccugaccaacacguccaucaucaaccacaaguucugcaaccucagcgacgcccacaagaagaaccuguacgaccacgcccugauguccaucaucagcaccuuccaccucuccauccccaacuucaaccaguacgaggccaugagcugcgacuucaacgggggccggaucuccgugcaguacaaccugagccacuccuacgcgguggacgccgccaaccacugcgggaccaucgccaacggcguccugcagaccuucaugcgcauggcguggggcgggagcuacaucgcccucgacuccggcugcgggagcugggacugcaucaugacguccuaccaguaccugaucauccagaacaccaccugggaggaccacugccaguucagccggcccagccccaucggcuaccuggggcuccugucccagcgcacccgggacaucuacaucagccgccggcugcucggcacguucaccuggacccuguccgacagcgagggcaacgagacccccgggggcuacugccugacgcgcuggaugcucaucgaggccgagcugaagugcuucgggaacaccgccguggccaagugcaacgagaagcacgacgaggaguucugcgacaugcugcggcuguucgacuucaacaagcaggcgauccgccggcugaagaccccggcccagauguccauccagcugaucaacaaggccgugaacgcccucaucaacgaccagcugaucaugaagaaccaccuccgcgacaucaugugcauccccuacugcaacuacagcaaguacugguaccucaaccacaccgucacgggcaagaccucccugccccggugcuggcuggugagcaacggguccuaccucaacgagacccacuucagcgacgacaucgagcagcaggccgacaacaugaucaccgagcugcugcagaaggaguacaucgaccgccagggcaagacgccgcugggccucguggaccuguucgucuucuccaccagcuucuaccugaucuccaucuuccuccaccuggugaagauccccacccaccggcacaucaccgggaagcccugccccaagccgcaccgccugaaccacaugggcaucugcagcugcgggcucuacaaccaccccggcgugcccgucaaguggaagcggugaggacuagucccuguucccagagcccacuuuuuuuucuuuuuuugaaauaaaauagccugucuuucagaucuaaaaaaaaaaaaaaaaaaaaaaaaaaaaaaaaaaaaaaaaaaaaaaaaaaaaaaaaaaaaaaaaaaaaaaaaaaaaaaaaaaaaaaaaaaaaaaaaaaaa

SEQ ID NO: 28881 - RNA, 1740 nt, Artificial Sequence
  mRNA product Design a-2 (A100) comprising derived and/or modified sequence from LASV(Lassa virus/H.sapiens-wt/NGA/2016/ISTH_0017;Clade II)__AVO03567__GPCmut5 (opt1)
aggagaguccgcucagccagguugcagaagcggcuuagcguguguccuaaucuucucucugcguguagguaggccugugccgcaaacaagcuuaccaugggccagaucaucaccuucuuccaggaggugccccacgucaucgaggaggugaugaacaucgugcugaucgcccucagccugcuggccauccucaaggggaucuacaacgucgcgaccugcggccuguucgggcugguguccuuccuccugcugugcggccgcagcugcuccacgaccuacaaggggguguacgagcuccagacccuggagcuggacauggccagccucaacaugaccaugccgcuguccugcacgaagaacaacagccaccacuacaucauggucggcaacgagaccggccuggagcucacccugaccaacacguccaucaucaaccacaaguucugcaaccugagcgacgcccacaagaagaaccucuacgaccacgcccugauguccaucaucagcaccuuccaccuguccauccccaacuucaaccaguacgaggccaugagcugcgacuucaacgggggcaagaucuccgugcaguacaaccucagccacaccuacgcgaucgacgccgccaaccacugcgggaccaucgccaacggcgugcugcagacguucaugcggauggcguggggcggguccuacaucgcccuggacagcggcugcggguccugggacugcaucaugaccagcuaccaguaccucaucauccagaacaccaccugggaggaccacugccaguucucccgccccagccccaucggcuaccuggggcugcucagccagcggacgcgcgacaucuacaucucccggcgccugcugggcaccuucaccuggacccucagcgacuccgagggcaacgagacgcccgggggcuacugccugacccgguggaugcugaucgaggccgagcucaagugcuucgggaacaccgccgucgccaagugcaacgagaagcacgacgaggaguucugcgacaugcugcgccuguucgacuucaacaagcaggcgauccggcgccucaagaccccggcccagaugagcauccagcugaucaacaaggccgugaacgcccugaucaacgaccagcucaucaugaagaaccaccuccgggacaucaugugcauccccuacugcaacuacuccaaguacugguaccugaaccacacggugaccggcaagaccagccugccccgcugcuggcuggucuccaacgggagcuaccugaacgagacccacuucuccgacgacaucgagcagcaggccgacaacaugaucacggagcuccugcagaaggaguacauggaccggcagggcaagaccccgcugggccugguggaccucuucguguucagcaccuccuucuaccugaucagcaucuuccugcaccucguccgcauccccacccaccggcacgugaucgggaagcccugccccaagccgcaccgccugaaccacaugggcaucugcuccugcgggcuguacaagcaccccggcgugcccgucaaguggaagcggugaggacuagucccuguucccagagcccacuuuuuuuucuuuuuuugaaauaaaauagccugucuuucagaucuaaaaaaaaaaaaaaaaaaaaaaaaaaaaaaaaaaaaaaaaaaaaaaaaaaaaaaaaaaaaaaaaaaaaaaaaaaaaaaaaaaaaaaaaaaaaaaaaaaaa

SEQ ID NO: 28882 - RNA, 1740 nt, Artificial Sequence
  mRNA product Design a-2 (A100) comprising derived and/or modified sequence from LASV(Lassa virus/H.sapiens-wt/NGA/2018/ISTH_0959;Clade II)__AVV65099__GPCmut5 (opt1)
aggagaguccgcucagccagguugcagaagcggcuuagcguguguccuaaucuucucucugcguguagguaggccugugccgcaaacaagcuuaccaugggccagaucaucaccuucuuccaggaggugccccacgucaucgaggaggugaugaacaucgugcugaucgcccucagccugcuggccauccucaaggggaucuacaacgucgugaccugcggccuguucgggcugguguccuuccuccugcugugcggccgcagcugcuccacgaccuacaagggggucuacgagcuccagacccuggagcuggacauggcgagccucaacaugaccaugccgcuguccugcacgaagaacaacagccaccacuacaucauggugggcaacgagaccggccuggagcucacccugaccaacacguccaucaucaaccacaaguucugcaaccugagcgacgcccacaagaagaaccucuacgaccacgcccugauguccaucaucagcaccuuccaccuguccauccccaacuucaaccaguacgaggccaugagcugcgacuucaacgggggcaagaucuccgugcaguacaaccucagccacgccuacgcgaucgacgccgccaaccacugcgggaccaucgccaacggcguccugcagaccuucaugcggauggcguggggcggguccuacaucgcccuggacagcggcugcggguccugggacugcaucaugacgagcuaccaguaccucaucauccagaacaccaccugggaggaccacugccaguucucccgccccagccccaucggcuaccuggggcugcucagccagcggacccgcgacaucuacaucucccggcgccugcugggcacguucaccuggacccucagcgacuccgagggcaacgagacccccgggggcuacugccugacgcgguggaugcugaucgaggccgagcucaagugcuucgggaacaccgccguggccaagugcaacgagaagcacgacgaggaguucugcgacaugcugcgccuguucgacuucaacaagcaggcgauccggcgccucaagaccccggcccagaugagcauccagcugaucaacaaggccgugaacgcccugaucaacgaccagcucaucaugaagaaccaccuccgggacaucaugugcauccccuacugcaacuacuccaaguacugguaccugaaccacaccgucacgggcaagaccagccugccccgcugcuggcugguguccaacgggagcuaccugaacgagacccacuucuccgacgacaucgagcagcaggccgacaacaugaucaccgagcuccugcagaaggaguacaucgaccggcagggcaagacgccgcugggccugguggaccucuucgucuucagcaccuccuucuaccugaucagcaucuuccugcaccucgugaagauccccacccaccgccacgugaucgggaagcccugccccaagccgcaccggcugaaccacaugggcaucugcuccugcgggcuguacaagcaccccggcguccccgugaaguggaagcgcugaggacuagucccuguucccagagcccacuuuuuuuucuuuuuuugaaauaaaauagccugucuuucagaucuaaaaaaaaaaaaaaaaaaaaaaaaaaaaaaaaaaaaaaaaaaaaaaaaaaaaaaaaaaaaaaaaaaaaaaaaaaaaaaaaaaaaaaaaaaaaaaaaaaaa

SEQ ID NO: 28883 - RNA, 1740 nt, Artificial Sequence
  mRNA product Design a-2 (A100) comprising derived and/or modified sequence from LASV(LASV003-NIG-2008;Clade II)__AIT17580__GPCmut5 (opt1)
aggagaguccgcucagccagguugcagaagcggcuuagcguguguccuaaucuucucucugcguguagguaggccugugccgcaaacaagcuuaccaugggccagaucaucaccuucuuccaggaggugccccacgucaucgaggaggugaugaacaucgugcugaucgcccucagccugcuggccauccucaaggggaucuacaacgucgcgaccugcggccuguucgggcugguguccuuccuccugcugugcggccgcagcugcuccacgaccuacaaggggguguacgagcuccagacccuggagcuggacauggccagccucaacaugaccaugccgcuguccugcacgaagaacaacagccaccacuacaucauggucggcaacgagaccggccuggagcucacccugaccaacacguccaucaucaaccacaaguucugcaaccugagcgacgcccacaagaagaaccucuacgaccacgcccugauguccaucaucagcaccuuccaccuguccauccccaacuucaaccaguacgaggccaugagcugcgacuucaacgggggcaagaucuccgugcaguacaaccucagccacaccuacgcgguggacgccgccaaccacugcgggaccaucgccaacggcguccugcagacguucaugcggauggcguggggcggguccuacaucgcccuggacagcggcugcggguccugggacugcaucaugaccagcuaccaguaccucaucauccagaacaccaccugggaggaccacugccaguucucccgccccagccccaucggcuaccuggggcugcucagccagcggacgcgcgacaucuacaucucccggcgccugcugggcaccuucaccuggacccucagcgacuccgagagcaacgagacgccgggcggguacugccugacccgguggaugcugaucgaggccgagcucaagugcuucggcaacaccgccguggccaagugcaacgagaagcacgacgaggaguucugcgacaugcugcgccuguucgacuucaacaagcaggcgauccggcgccucaaggcccccgcccagauguccauccagcugaucaacaaggccgugaacgcccugaucaacgaccagcucaucaugaagaaccaccuccgggacaucaugugcauccccuacugcaacuacagcaaguacugguaccugaaccacaccgucacggggcgcaccucccugccccggugcuggcuggugagcaacggcuccuaccugaacgagacccacuucagcgacgacaucgagcagcaggcggacaacaugaucaccgagcuccugcagaaggaguacauggaccgccaggggaagacgccgcugggccugguggaccucuucgucuucuccaccagcuucuaccugaucuccaucuuccugcaccucgugaagauccccacccaccggcacgugaucggcaagcccugccccaagccgcaccgccugaaccacauggggaucugcagcugcggccuguacaagcaccccgggguccccgugaaguggaagcggugaggacuagucccuguucccagagcccacuuuuuuuucuuuuuuugaaauaaaauagccugucuuucagaucuaaaaaaaaaaaaaaaaaaaaaaaaaaaaaaaaaaaaaaaaaaaaaaaaaaaaaaaaaaaaaaaaaaaaaaaaaaaaaaaaaaaaaaaaaaaaaaaaaaaa

SEQ ID NO: 28884 - RNA, 1740 nt, Artificial Sequence
  mRNA product Design a-2 (A100) comprising derived and/or modified sequence from LASV(LASV035-NIG-2009;Clade II)__AIT17588__GPCmut5 (opt1)
aggagaguccgcucagccagguugcagaagcggcuuagcguguguccuaaucuucucucugcguguagguaggccugugccgcaaacaagcuuaccaugggccagaucaucaccuucuuccaggaggugccccacgucaucgaggaggugaugaacaucgugcugaucgcccucagccugcuggccauccucaaggggaucuacaacgucgcgaccugcggccuguucgggcugguguccuuccuccugcugugcggccgcagcugcuccacgaccuacaaggggguguacgagcuccagacccuggagcuggacauggccagccucaacaugaccaugccgcuguccugcacgaagaacaacagccaccacuacaucauggucggcaacgagaccggccuggagcucacccugaccaacacguccaucaucaaccacaaguucugcaaccugagcgacgcccacaagaagaaccucuacgaccacgcccugauguccaucaucagcaccuuccaccuguccauccccaacuucaaccaguacgaggccaugagcugcgacuucaacgggggcaagaucuccgugcaguacaaccucagccacgcguacgccguggacgccgccaaccacugcgggaccaucgcgaacggcguccugcagaccuucaugcggauggccuggggcggguccuacaucgcccuggacagcggcugcggguccugggacugcaucaugacgagcuaccaguaccucaucauccagaacaccaccugggaggaccacugccaguucucccgccccagccccaucggcuaccuggggcugcucagccagcggacccgcgacaucuacaucucccggcgccugcugggcacguucaccuggacccucagcgacuccgagggcaacgagacccccgggggcuacugccugacgcgguggaugcugaucgaggccgagcucaagugcuucgggaacaccgccguggcgaagugcaacgagaagcacgacgaggaguucugcgacaugcugcgccuguucgacuucaacaagcaggccauccggcgccucaaggccccggcccagaugagcauccagcugaucaacaaggccgugaacgcgcugaucaacgaccagcucaucaugaagaaccaccuccgggacaucaugugcauccccuacugcaacuacuccaaguacugguaccugaaccacaccgucaccggcaagacgagccugccccgcugcuggcugguguccaacgggagcuaccugaacgagacccacuucuccgacgacaucgagcagcaggccgacaacaugaucaccgagcuccugcagaaggaguacaucgaccggcagggcaagaccccgcugggccugguggaccucuucgucuucagcacguccuucuaccugaucagcaucuuccugcaccucgugaagauccccacccaccgccacgugaucgggaagcccugccccaagccgcaccggcugaaccacaugggcaucugcuccugcgggcuguacaagcaccccggcguccccgugaaguggaagcgcugaggacuagucccuguucccagagcccacuuuuuuuucuuuuuuugaaauaaaauagccugucuuucagaucuaaaaaaaaaaaaaaaaaaaaaaaaaaaaaaaaaaaaaaaaaaaaaaaaaaaaaaaaaaaaaaaaaaaaaaaaaaaaaaaaaaaaaaaaaaaaaaaaaaaa

SEQ ID NO: 28885 - RNA, 1740 nt, Artificial Sequence
  mRNA product Design a-2 (A100) comprising derived and/or modified sequence from LASV(LASV1000-NIG-2009;Clade II)__AIT17782__GPCmut5 (opt1)
aggagaguccgcucagccagguugcagaagcggcuuagcguguguccuaaucuucucucugcguguagguaggccugugccgcaaacaagcuuaccaugggccagaucaucaccuucuuccaggaggugccccacgucaucgaggaggugaugaacaucgugcugaucgcccucagccugcuggccauccucaaggggaucuacaacgucgcgaccugcggccuguucgggcugguguccuuccuccugcugugcggccgcagcugcuccacgaccuacaaggggguguacgagcuccagacccuggagcuggacauggccagccucaacaugaccaugccgcuguccugcacgaagaacaacagccaccacuacaucauggucggcaacgagaccggccuggagcucacccugaccaacacguccaucaucaaccacaaguucugcaaccugagcgacgcccacaagaagaaccucuacgaccacgcccugauguccaucaucagcaccuuccaccuguccauccccaacuucaaccaguacgaggccaugagcugcgacuucaacgggggcaagaucuccgugcaguacaaccucagccacaccuacgcgguggacgccgccaaccacugcgggaccaucgccaacggcguccugcagacguucaugcggauggcguggggcggguccuacaucgcccuggacagcggcugcggguccugggacugcaucaugaccagcuaccaguaccucaucauccagaacaccaccugggaggaccacugccaguucucccgccccagccccaucggcuaccuggggcugcucagccagcggacgcgcgacaucuacaucucccggcgccugcugggcaccuucaccuggacccucagcgacuccgagggcaacgagacgcccgggggcuacugccugacccgguggaugcugaucgaggccgagcucaagugcuucgggaacaccgccguggccaagugcaacgagaagcacgacgaggaguucugcgacaugcugcgccuguucgacuucaacaagcaggcgaucaagcggcucaagaccccggcccagaugagcauccagcugaucaacaaggccgugaacgcccugaucaacgaccagcucaucaugaagaaccaccuccgcgacaucaugugcauccccuacugcaacuacuccaaguacugguaccugaaccacacggucaccggcaagaccagccugccccggugcuggcugguguccaacgggagcuaccugaacgagacccacuucuccgacgacaucgagcagcaggccgacaacaugaucacggagcuccugcagaaggaguacaucgaccgccagggcaagaccccgcugggccugguggaccucuucgucuucagcaccuccuucuaccugaucagcaucuuccugcaccucgugaagauccccacccaccggcacguggucgggaagcccugccccaagccgcaccgccugaaccacaugggcaucugcuccugcgggcuguacaagcaccccggcgugcccgugaaguggaagcggugaggacuagucccuguucccagagcccacuuuuuuuucuuuuuuugaaauaaaauagccugucuuucagaucuaaaaaaaaaaaaaaaaaaaaaaaaaaaaaaaaaaaaaaaaaaaaaaaaaaaaaaaaaaaaaaaaaaaaaaaaaaaaaaaaaaaaaaaaaaaaaaaaaaaa

SEQ ID NO: 28886 - RNA, 1740 nt, Artificial Sequence
  mRNA product Design a-2 (A100) comprising derived and/or modified sequence from LASV(LASV221-NIG-2010;Clade II)__AIT17624__GPCmut5 (opt1)
aggagaguccgcucagccagguugcagaagcggcuuagcguguguccuaaucuucucucugcguguagguaggccugugccgcaaacaagcuuaccaugggccagaucaucaccuucuuccaggaggugccccacgucaucgaggaggugaugaacaucgugcugaucgcccucagccugcuggccauccucaaggggaucuacaacgucgcgaccugcggccuguucgggcugguguccuuccuccugcugugcggccgcagcugcuccacgaccuacaaggggguguacgagcuccagacccuggagcuggacauggccagccucaacaugaccaugccgcuguccugcacgaagaacaacagccaccacuacaucauggucggcaacgagaccggccuggagcucacccugaccaacacguccaucaucaaccacaaguucugcaaccugagcgacgcccacaagaagaaccucuacgaccacgcccugauguccaucaucagcaccuuccaccuguccauccccaacuucaaccaguacgaggccaugagcugcgacuucaacgggggcaagaucuccgugcaguacaaccucagccacaccuacgcgaucgacgccgccaaccacugcgggaccaucgccaacggcgugcugcagacguucaugcggauggcguggggcggguccuacaucgcccuggacagcggcugcggguccugggacugcaucaugaccagcuaccaguaccucaucauccagaacaccaccugggaggaccacugccaguucucccgccccagccccaucggcuaccuggggcugcucagccagcggacgcgcgacaucuacaucucccggcgccugcugggcaccuucaccuggacccucagcgacuccgagggcaacgagacgcccgggggcuacugccugacccgguggaugcugaucgaggccgagcucaagugcuucgggaacaccgccgucgccaagugcaacgagaagcacgacgaggaguucugcgacaugcugcgccuguucgacuucaacaagcaggcgauccggcgccucaagaccccggcccagaugagcauccagcugaucaacaaggccgugaacgcccugaucaacgaccagcucaucaugaagaaccaccuccgggacaucaugugcauccccuacugcaacuacuccaaguacugguaccugaaccacacggugaccggcaagaccagccugccccgcugcuggcuggucuccaacgggagcuaccugaacgagacccacuucuccgacgacaucgagcagcaggccgacaacaugaucacggagaugcuccagaaggaguacauggaccggcagggcaagaccccgcugggccugguggaccuguucguguucagcaccuccuucuaccucaucagcaucuuccugcaccuggucaagauccccacccaccgccacgugaucgggaagcccugccccaagccgcaccggcucaaccacaugggcaucugcuccugcgggcuguacaagcaccccggcgugcccgucaaguggaagcgcugaggacuagucccuguucccagagcccacuuuuuuuucuuuuuuugaaauaaaauagccugucuuucagaucuaaaaaaaaaaaaaaaaaaaaaaaaaaaaaaaaaaaaaaaaaaaaaaaaaaaaaaaaaaaaaaaaaaaaaaaaaaaaaaaaaaaaaaaaaaaaaaaaaaaa

SEQ ID NO: 28887 - RNA, 1740 nt, Artificial Sequence
  mRNA product Design a-2 (A100) comprising derived and/or modified sequence from LASV(LASV237-NIG-2010;Clade II)__AIT17638__GPCmut5 (opt1)
aggagaguccgcucagccagguugcagaagcggcuuagcguguguccuaaucuucucucugcguguagguaggccugugccgcaaacaagcuuaccaugggccagaucaucaccuucuuccaggaggugccccacgucaucgaggaggugaugaacaucgugcugaucgcccucagccugcuggccauccucaaggggaucuacaacgucgcgaccugcggccuguucgggcugguguccuuccuccugcugugcggccgcagcugcuccacgaccuacaaggggguguacgagcuccagacccuggagcuggacauggccagccucaacaugaccaugccgcuguccugcacgaagaacaacagccaccacuacaucauggucggcaacgagaccggccuggagcucacccugaccaacacguccaucaucaaccacaaguucugcaaccugagcgacgcccacaagaaggaccucuacgaccacgcccugauguccaucaucagcaccuuccaccuguccauccccaacuucaaccaguacgaggccaugagcugcgacuucaacgggggcaagaucuccgugcaguacaaccucagccacaccuacgcgguggacgccgccaaccacugcgggaccaucgccaacggcguccugcagacguucaugcggauggcguggggcggguccuacaucgcccuggacagcggcugcggguccugggacugcaucaugaccagcuaccaguaccucaucauccagaacaccaccugggaggaccacugccaguucucccgccccagccccaucggcuaccuggggcugcucagccagcggacgcgcgacaucuacaucucccggcgccugcugggcaccuucaccuggacccucagcgacuccgagggcaacgagacgcccgggggcuacugccugacccgguggaugcugaucgaggccgagcucaagugcuucgggaacaccgccguggccaagugcaacgagaagcacgacgaggaguucugcgacaugcugcgccuguucgacuucaacaagcaggcgauccggcgccucaagaccccggcccagaugagcauccagcugaucaacaaggccgugaacgcccugaucaacgaccagcucaucaugaagaaccaccuccgggacaucaugugcauccccuacugcaacuacuccaaguacugguaccugaaccacacggucaccggcaagaccagccugccccgcugcuggcugguguccaacgggagcuaccugaacgagacccacuucuccgacgacaucgagcagcaggccgacaacaugaucacggagcuccugcagaaggaguacauggaccggcagggcaagaccccgcugggccugguggaccucuucgucuucagcaccuccuucuaccugaucagcaucuuccugcaccucaucaagauccccacccaccgccacaucacggggaagcccugccccaagccgcaccggcugaaccacaugggcaucugcuccugcgggcuguacaagcaccccggcgugcccgugaaguggaagcgcugaggacuagucccuguucccagagcccacuuuuuuuucuuuuuuugaaauaaaauagccugucuuucagaucuaaaaaaaaaaaaaaaaaaaaaaaaaaaaaaaaaaaaaaaaaaaaaaaaaaaaaaaaaaaaaaaaaaaaaaaaaaaaaaaaaaaaaaaaaaaaaaaaaaaa

SEQ ID NO: 28888 - RNA, 1740 nt, Artificial Sequence
  mRNA product Design a-2 (A100) comprising derived and/or modified sequence from LASV(LASV253-NIG-2011;Clade II)__AIT17670__GPCmut5 (opt1)
aggagaguccgcucagccagguugcagaagcggcuuagcguguguccuaaucuucucucugcguguagguaggccugugccgcaaacaagcuuaccaugggccagaucaucaccuucuuccaggaggugccccacgucaucgaggaggugaugaacaucgugcugaucgcccucagccugcuggccauccucaaggggaucuacaacgucgcgaccugcggccuguucgggcugguguccuuccuccugcugugcggccgcagcugcuccacgaccuacaaggggguguacgagcuccagacccuggagcuggacauggccagccucaacaugaccaugccgcuguccugcacgaagaacaacagccaccacuacaucauggucggcaacgagaccggccuggagcucacccugaccaacacguccaucaucaaccacaaguucugcaaccugagcgacgcccacaagaagaaccucuacgaccacgcccugauguccaucaucagcaccuuccaccuguccauccccaacuucaaccaguacgaggccaugagcugcgacuucaacgggggcaagaucuccgugcaguacaaccucagccacaccuacgcgguggacgccgccaaccacugcgggaccaucgccaacggcguccugcagacguucaugcggauggcguggggcggguccuacaucgcccuggacagcggcugcggguccugggacugcaucaugaccagcuaccaguaccucaucauccagaacaccaccugggaggaccacugccaguucucccgccccagccccaucggcuaccuggggcugcucagccagcggacgcgcgacaucuacaucucccggcgccugcugggcaccuucaccuggacccucagcgacuccgagggcaacgagacgcccgggggcuacugccugacccgguggaugcugaucgaggccgagcucaagugcuucgggaacaccgccguggccaagugcaacgagaagcacgacgaggaguucugcgacaugcugcgccuguucgacuucaacaagcaggcgauccggcgccucaaggccccggcccagaugagcauccagcugaucaacaaggccgugaacgcccugaucaacgaccagcucaucaugaagaaccaccuccgggacaucaugugcauccccuacugcaacuacuccaaguacugguaccugaaccacaccgucacgggccgcaccagccugccccggugcuggcugguguccaacgggagcuaccugaacgagacccacuucuccgacgacaucgagcagcaggcggacaacaugaucaccgagcuccugcagaaggaguacaucgaccgccagggcaagacgccgcugggccugguggaccucuucgucuucagcaccuccuucuaccugaucagcaucuuccugcaccucgugaagauccccacccaccggcacaucaucgggaagcccugccccaagccgcaccgccugaaccacaugggcaucugcuccugcgggcuguacaagcaccccggcgugcccgucaaguggaagcggugaggacuagucccuguucccagagcccacuuuuuuuucuuuuuuugaaauaaaauagccugucuuucagaucuaaaaaaaaaaaaaaaaaaaaaaaaaaaaaaaaaaaaaaaaaaaaaaaaaaaaaaaaaaaaaaaaaaaaaaaaaaaaaaaaaaaaaaaaaaaaaaaaaaaa

SEQ ID NO: 28889 - RNA, 1740 nt, Artificial Sequence
  mRNA product Design a-2 (A100) comprising derived and/or modified sequence from LASV(LASV254-NIG-2011;Clade II)__AIT17674__GPCmut5 (opt1)
aggagaguccgcucagccagguugcagaagcggcuuagcguguguccuaaucuucucucugcguguagguaggccugugccgcaaacaagcuuaccaugggccagaucaucaccuucuuccaggaggugccccacgucaucgaggaggugaugaacaucgugcugaucgcccucagccugcuggccauccucaaggggaucuacaacgucgcgaccugcggccuguucgggcugguguccuuccuccugcugugcggccgcagcugcuccacgaccuacaaggggguguacgagcuccagacccuggagcuggacaugaccaaccucaacaugacgaugccgcugagcugcaccaagaacaacucccaccacuacaucauggucggcaacgagaccggccuggagcucacccugacgaacaccagcaucaucaaccacaaguucugcaaccuguccgacgcccacaagaagaaccucuacaaccacgcccugaugagcaucaucuccaccuuccaccugagcauccccaacuucaaccaguacgaggccauguccugcgacuucaacgggggcaagaucagcgugcaguacaaccucucccacagcuacgccguggacgcggccaaccacugcgggaccaucgccaacggcguccugcagacguucaugcggauggccuggggcggguccuacaucgcgcuggacagcggcugcgggaacugggacugcaucaugaccuccuaccaguaccucaucauccagaacaccaccugggaggaccacugccaguucagccgccccucccccaucggcuaccuggggcugcucagccagcggacgcgcgacaucuacaucagccggcgccugcugggcaccuucaccuggacccucuccgacagcgagggcaacgagacgcccgggggcuacugccugacccgguggaugcugaucgaggccgagcucaagugcuucgggaacaccgccguggccaagugcaacgagaagcacgacgaggaguucugcgacaugcugcgccuguucgacuucaacaagcaggccauccggcgccucaagaccccggcgcaggccaacauccagcugaucaacaaggccgugaacgcccugaucaacgaccagcucaucaugaagaaccaccuccgggacaucaugugcauccccuacugcaacuacuccaaguacugguaccugaaccacacggucaccggcaagaccagccugccccgcugcuggcugguguccaacgggagcuaccugaacgagacccacuucuccgacgacaucgagcagcaggccgacaacaugaucacggagcuccugcagaaggaguacauggaccggcagggcaagaccccgcugggccugguggaccucuucgucuucagcaccuccuucuaccugaucagcaucuuccugcaccucgugaagauccccacccaccgccacgugaucgggaagcccugccccaagccgcaccggcugaaccacaugggcaucugcuccugcgggcuguacaagcaccccggcguccccgugaaguggaagcgcugaggacuagucccuguucccagagcccacuuuuuuuucuuuuuuugaaauaaaauagccugucuuucagaucuaaaaaaaaaaaaaaaaaaaaaaaaaaaaaaaaaaaaaaaaaaaaaaaaaaaaaaaaaaaaaaaaaaaaaaaaaaaaaaaaaaaaaaaaaaaaaaaaaaaa

SEQ ID NO: 28890 - RNA, 1740 nt, Artificial Sequence
  mRNA product Design a-2 (A100) comprising derived and/or modified sequence from LASV(Nig08-A19;Clade III)__ADU56618__GPCmut5 (opt1)
aggagaguccgcucagccagguugcagaagcggcuuagcguguguccuaaucuucucucugcguguagguaggccugugccgcaaacaagcuuaccaugggccagaucgugaccuucuuccaggaggucccccacgugaucgaggaggugaugaacaucguccugaucgcccucagcauccuggccauccugaaggggcucuacaacaucgcgaccugcggccugaucgggcuggugacguuccuccugcuguccggccgcagcugcuccaugaccuacaaggggguguacgagcuccagacccuggagcugaacaugaacacccucaacaugacgaugccgcugagcugcaccaagaacaacucccaccacuacaucauggucggcaacgagaccggccuggagcucacccugacgaacaccagccugcuccaccacaaguucugcaaccuguccgacgcccacaagaagaaccuguacgaccacacccucaugagcaucaucuccaccuuccaccugagcauccccaacuucaaccaguacgaggccauguccugcgacuucaacgggggcaagaucacggugcaguacaaccugagccacuccuacgccaucgacgccgcgaaccacugcgggaccguggccaacggcguccuccagaccuucaugcggauggccuggggcgggagcuacaucgcccuggacuccggcugcgggaagugggacugcaucaugaccagcuaccaguaccugaucauccagaacacgaccugggaggaccacugccaguucucccgccccagccccaucggcuaccucgggcugcugucccagcggacccgcgacaucuacaucagccggcgccuccugggcaccuucacguggacccugagcgacuccgagggcaacgagacccccgggggcuacugccucacccgguggaugcugaucgaggcggagcugaagugcuucgggaacacggccguggccaagugcaacgagaagcacgacgaggaguucugcgacaugcuccgccuguucgacuucaacaagcaggccauccggcgccugaaggccccggcgcagaugagcauccagcucaucaacaaggccgugaacgcccugaucaacgaccagcugaucaugaagaaccaccuccgggacaucaugugcauccccuacugcaacuacuccaaguacugguaccugaaccacaccagcaccggccgcaccucccugccccggugcuggcucgucagcaacggguccuaccugaacgagacgcacuucagcgacgacaucgagcagcaggccgacaacaugaucaccgagaugcugcagaaggaguaccuggaccgccagggcaagaccccgcucggccugguggaccuguucguguucuccaccagcuucuaccucaucuccaucuuccugcaccuggucaagauccccacgcaccggcacaucguggggaagcccugccccaagccgcaccgccucaaccacaugggcaucugcagcugcgggcuguacaagcagcccggcgugcccguccgguggaagcgcugaggacuagucccuguucccagagcccacuuuuuuuucuuuuuuugaaauaaaauagccugucuuucagaucuaaaaaaaaaaaaaaaaaaaaaaaaaaaaaaaaaaaaaaaaaaaaaaaaaaaaaaaaaaaaaaaaaaaaaaaaaaaaaaaaaaaaaaaaaaaaaaaaaaaa

SEQ ID NO: 28891 - RNA, 1743 nt, Artificial Sequence
  mRNA product Design a-2 (A100) comprising derived and/or modified sequence from LASV(G1180-SLE-2010;Clade IV)__AIT17168__GPCmut5 (opt1)
aggagaguccgcucagccagguugcagaagcggcuuagcguguguccuaaucuucucucugcguguagguaggccugugccgcaaacaagcuuaccaugggccagaucgugaccuucuuccaggaggucccccacgugaucgaggaggugaugaacaucguccugaucgcccucagcauccuggccgugcugaaggggcucuacaacuucgcgaccugcggccugguggggcugcucacguuccugcugcucugcggccgcuccugcaccgccagccgguacaagggggucuacgagcugcagacccuggagcucaacauggagacccugaacaugacgaugccgcuguccugcaccaagaacaacagccaccacuacaucauggugggcaacgagaccggccucgagcugacccugacgaacaccuccaucaucaaccacaaguucugcaaccucagcgacgcccacaagaagaaccuguacgaccacgcccugauguccaucaucagcaccuuccaccucuccauccccaacuucaaccaguacgaggccaugagcugcgacuucaacgggggcaagaucuccgugcaguacaaccugagccacuccuacgcgggggacgccgccaaccacugcggcaccgucgccaacggggugcugcagacguucaugcgcauggcguggggcggcagcuacaucgcccucgacuccgggugcggcagcugggacugcaucaugaccuccuaccaguaccugaucauccagaacaccaccugggaggaccacugccaguucagccggcccucccccaucggguaccugggccuccugagccagcgcacgcgggacaucuacaucagccgccggcugcucggcaccuucaccuggacccuguccgacagcgaggggaaggacacgccgggcggguacugccugacccgcuggaugcucaucgaggccgagcugaagugcuucggcaacaccgccguggccaagugcaacgagaagcacgacgaggaguucugcgacaugcugcggcuguucgacuucaacaagcaggcgauccagcgccugaaggcccccgcccagauguccauccagcugaucaacaaggccgucaacgcccucaucaacgaccagcugaucaugaagaaccaccuccgggacaucaugugcauccccuacugcaacuacagcaaguacugguaccucaaccacaccacgaccgggaagaccucccugcccaagugcuggcuggugagcaacggcuccuaccucaacgagacccacuucagcgacgacaucgagcagcaggcggacaacaugaucacggagaugcugcagaaggaguacauggagcgccagggcaagaccccgcuggggcugguggaccucuucgucuucuccaccagcuucuaccugaucuccaucuuccugcaccucgugaagauccccacccaccggcacaucgugggcaagagcugccccaagccccaccgccugaaccacauggggaucugcuccugcggccuguacaagcagccggggguccccgugaaguggaagcggugaggacuagucccuguucccagagcccacuuuuuuuucuuuuuuugaaauaaaauagccugucuuucagaucuaaaaaaaaaaaaaaaaaaaaaaaaaaaaaaaaaaaaaaaaaaaaaaaaaaaaaaaaaaaaaaaaaaaaaaaaaaaaaaaaaaaaaaaaaaaaaaaaaaaa

SEQ ID NO: 28892 - RNA, 1743 nt, Artificial Sequence
  mRNA product Design a-2 (A100) comprising derived and/or modified sequence from LASV(G1442-SLE-2011;Clade IV)__AIT17180__GPCmut5 (opt1)
aggagaguccgcucagccagguugcagaagcggcuuagcguguguccuaaucuucucucugcguguagguaggccugugccgcaaacaagcuuaccaugggccagaucgugaccuucuuccaggaggucccccacgugaucgaggaggugaugaacaucguccugaucgcccucagcauccuggccgugcugaaggggcucuacaacguggcgaccugcggccugaucgggcuggucacguuccuccugcugugcggccgcuccugcaccaccacccucuacaaggggguguacgagcugcagacgcuggagcucaacauggagacccugaacaugaccaugccgcugagcugcaccaagaacaacucccaccacuacauccgggugggcaacgagacgggccucgagcugacccugaccaacaccagcaucaucaaccacaaguucugcaaccucuccgacgcccacaagaagaaccuguacgaccacgcccugaugagcaucaucuccacguuccaccucagcauccccaacuucaaccaguacgaggccauguccugcgacuucaacgggggcaagaucagcguccaguacaaccugucccacagcuacgccggggacgcggccaaccacugcggcaccguggccaacggggugcugcagaccuucaugcgcauggccuggggcggcuccuacaucgcgcucgacagcgggugcggcaacugggacugcaucaugaccuccuaccaguaccugaucauccagaacacgaccugggacgaccacugccaguucagccggcccucccccaucggguaccugggccuccugagccagcgcacccgggacgucuacaucucccgccggcugcucggcaccuucacguggacccugagcgacagcgaggggaaggacaccccgggcggguacugccugacccgcuggaugcucaucgaggccgagcugaagugcuucggcaacacggccguggccaagugcaacgagaagcacgacgaggaguucugcgacaugcugcggcuguucgacuucaacaagcaggccauccagcgccugaaggcgcccgcccagauguccauccagcugaucaacaaggccgugaacgcccucaucaacgaccagcugaucaugaagaaccaccuccgggacaucaugugcauccccuacugcaacuacagcaaguacugguaccucaacaacaccgccaccgggaagaccucccugcccaagugcuggcugaucagcaacggcuccuaccucaacgagacgcacuucagcgacgacaucgagcaggaggcggacaacaugaucaccgagaugcugcagaaggaguacauggagcgccagggcaagaccccgcuggggcuggucgaccucuucguguucuccaccagcuucuaccugaucuccaucuuccugcaccucgugaagauccccacgcaccggcacaucgucggcaagagcugccccaagccccaccgccugaaccacauggggaucugcuccugcggccuguacaagcagccgggggugcccgugcgguggaagcgcugaggacuagucccuguucccagagcccacuuuuuuuucuuuuuuugaaauaaaauagccugucuuucagaucuaaaaaaaaaaaaaaaaaaaaaaaaaaaaaaaaaaaaaaaaaaaaaaaaaaaaaaaaaaaaaaaaaaaaaaaaaaaaaaaaaaaaaaaaaaaaaaaaaaaa

SEQ ID NO: 28893 - RNA, 1743 nt, Artificial Sequence
  mRNA product Design a-2 (A100) comprising derived and/or modified sequence from LASV(G3010-SLE-2013;Clade IV)__AIT17344__GPCmut5 (opt1)
aggagaguccgcucagccagguugcagaagcggcuuagcguguguccuaaucuucucucugcguguagguaggccugugccgcaaacaagcuuaccaugggccagaucgugaccuucuuccaggaggucccccacgugaucgaggaggugaugaacaucguccugaucgcccucagcauccuggccgugcugaaggggcucuacaacuucgcgaccugcggccugguggggcuggucacguuccuccugcugugcggccgcuccugcaccaccagccucuacaaggggguguacgagcugcagacccuggagcucaacauggagacgcugaacaugaccaugccgcuguccugcaccaagaacaacagccaccacuacaucauggugggcaacgagaccggccucgagcugacgcugaccaacaccuccaucaucaaccacaaguucugcaaccucagcgacgcccacaagaagaaccuguacaaccacgcccugauguccaucaucagcaccuuccaccucuccauccccaacuucaaccaguacgaggccaugagcugcgacuucaacgggggcaagaucuccguccaguacaaccugagccacuccuacgccggggacgcggccagccacugcggcacgguggccaacggggugcugcagaccuucaugcggauggccuggggcggcuccuacaucgcgcucgacagcgggugcggcaagugggacugcaucaugaccuccuaccaguaccugaucauccagaacaccacgugggaggaccacugccaguucagccgccccucccccaucggguaccugggccuccugagccagcggacccgcgacaucuacaucagccggcgccugcucggcaccuucaccuggacgcuguccgacagcgaggggaaggacaccccgggcggguacugccugacccgguggaugcucaucgaggccgagcugaagugcuucggcaacaccgccgucgccaagugcaacgagaagcacgacgaggaguucugcgacaugcugcgccucuucgacuucaacaagcaggccauccagcggcugaagacgcccgcgcagauguccauccagcugaucaacaaggccgugaacgcccucaucaacgaccagcugaucaugaagaaccaccuccgcgacaucaugugcauccccuacugcaacuacagcaaguacugguaccugaaccacaccaccaccgggaagacgucccugcccaagugcuggcuggugagcaacggcuccuaccucaacgagacccacuucagcgacgacaucgagcagcaggccgacaacaugaucaccgagaugcugcagaaggaguacauggagcggcagggcaagaccccgcuggggcuggucgaccucuucguguucuccacgagcuucuaccugaucuccaucuuccugcaccucgugaagauccccacccaccgccacaucgucggcaagagcugccccaagccccaccggcugaaccacauggggaucugcuccugcggccuguacaagcagccgggggugcccgugcgcuggaagcggugaggacuagucccuguucccagagcccacuuuuuuuucuuuuuuugaaauaaaauagccugucuuucagaucuaaaaaaaaaaaaaaaaaaaaaaaaaaaaaaaaaaaaaaaaaaaaaaaaaaaaaaaaaaaaaaaaaaaaaaaaaaaaaaaaaaaaaaaaaaaaaaaaaaaa

SEQ ID NO: 28894 - RNA, 1743 nt, Artificial Sequence
  mRNA product Design a-2 (A100) comprising derived and/or modified sequence from LASV(G502-SLE-2009;Clade IV)__AIT17126__GPCmut5 (opt1)
aggagaguccgcucagccagguugcagaagcggcuuagcguguguccuaaucuucucucugcguguagguaggccugugccgcaaacaagcuuaccaugggccagaucgugaccuucuuccaggaggucccccacgugaucgaggaggugaugaacaucguccugaucgcccucagcauccuggccgugcugaaggggcucuacaacuucgcgaccugcggccugguggggcugcucacguuccugcugcucugcggccgcuccugcaccaccgggcuguacaagggcgucuacgagcugcagacccucgagcugaacauggagacgcugaacaugaccaugccgcucagcugcaccaagaacaacucccaccacuacaucauggugggcaacgagaccgggcuggagcugacgcucaccaacaccagcaucaucaaccacaaguucugcaaccuguccgacgcccacaagaagaaccuguacgaccacgcccucaugagcaucaucuccaccuuccaccugagcauccccaacuucaaccaguacgaggccauguccugcgacuucaacggcgggaagaucagcgugcaguacaaccugucccacagcuacgccggcgacgcggccgaccacugcgggacggucgccaacggcgugcuccagaccuucaugcggauggccuggggcggguccuacaucgcgcuggacagcggcugcgggcgcugggacugcaucaugaccuccuaccaguaccugaucauccagaacaccacgugggaggaccacugccaguucagccggcccucccccaucggcuaccucggccugcugagccagcgcacccgggacaucuacaucucccgccggcuccuggggaccuucaccuggacgcugagcgacagcgagggcaaggacacccccgggggcuacugccucacccgcuggaugcugaucgaggccgagcugaagugcuucgggaacaccgccguggccaagugcaacgagaagcacgacgaggaguucugcgacaugcuccggcuguucgacuucaacaagcaggccauccagcgccugaaggcgccggcccagauguccauccagcucaucaacaaggccgucaacgcccugaucaacgaccagcuggugaugaagaaccaccuccgggacaucaugugcauccccuacugcaacuacagccgcuacugguaccugaaccacacgaccaccggccggaccucccugcccaagugcuggcucgugagcaacggcuccuaccugaacgagacgcacuucagcgacgacaucgagcagcaggccgacaacaugaucaccgagaugcugcagaaggaguacauggagcgccaggggaagaccccgcugggccucgucgaccuguucguguucuccaccagcuucuaccugaucuccaucuuccuccaccuggugaagauccccacgcaccggcacaucgucggcaagagcugccccaagccccaccgccugaaccacauggggaucugcuccugcgggcucuacaagcagccgggcgugcccgugaaguggaagcggugaggacuagucccuguucccagagcccacuuuuuuuucuuuuuuugaaauaaaauagccugucuuucagaucuaaaaaaaaaaaaaaaaaaaaaaaaaaaaaaaaaaaaaaaaaaaaaaaaaaaaaaaaaaaaaaaaaaaaaaaaaaaaaaaaaaaaaaaaaaaaaaaaaaaa

SEQ ID NO: 28895 - RNA, 1743 nt, Artificial Sequence
  mRNA product Design a-2 (A100) comprising derived and/or modified sequence from LASV(G733-SLE-2010;Clade IV)__AIT17154__GPCmut5 (opt1)
aggagaguccgcucagccagguugcagaagcggcuuagcguguguccuaaucuucucucugcguguagguaggccugugccgcaaacaagcuuaccaugggccagaucgugaccuucuuccaggaggucccccacgugaucgaggaggugaugaacaucguccugaucgcccucagcauccuggccgugcugaaggggcucuacaacuucgcgaccugcggcaucguggggcuggucuccuuccugcuccugugcggccgcagcugcacgaccucccuguacaaggggguguacgagcuccagacccuggagcugaacauggagacccucaacaugacgaugccgcugagcugcaccaagaacaacucccaccacuacaucauggugggcaacgagaccggccuggagcucacccugacgaacaccagcaucaucaaccacaaguucugcaaccuguccgacgcccacaagaagaaccucuacgaccacgcccugaugagcaucaucuccaccuuccaccugagcauccccaacuucaaccaguacgaggccauguccugcgacuucaacgggggcaagaucagcguccaguacaaccucucccacagcuacgccggggacgcggccaaccacugcggcaccaucgccaacggggugcugcagacguucaugcggauggccuggggcggcuccuacaucgcgcuggacagcgggugcgaccgcugggacugcaucaugaccuccuaccaguaccucaucauccagaacaccaccugggaggaccacugccaguucagccggcccucccccaucggcuaccuggggcugcucagccagcgcacgcgggacaucuacaucagccgccggcugcugggcaccuucaccuggacccucuccgacagcgagggcaaggacacgcccgggggcuacugccugacccgcuggaugcugaucgaggccgagcucaagugcuucgggaacaccgccguggccaagugcaacgagaagcacgacgaggaguucugcgacaugcugcggcuguucgacuucaacaagcaggccauccagcgccucaaggcgccggcccagauguccauccagcugaucaacaaggccgucaacgcccugaucaacgaccagcucaucaugaagaaccaccuccgggacaucaugugcauccccuacugcaacuacagcaaguacugguaccugaaccacaccacgaccggcaagaccucccugcccaagugcuggcuggugagcaacggguccuaccugaacgagacccacuucagcgacgacaucgagcagcaggccgacaacaugaucacggagaugcuccagaaggaguacauggagcgccagggcaagaccccgcugggccugguggaccuguucgucuucuccaccagcuucuaccucaucuccaucuuccugcaccuggugaagauccccacccaccggcacguggucggcaagagcugccccaagccccaccgccucaaccacauggggaucugcuccugcgggcuguacggccagccgggggugcccgugaaguggaagcggugaggacuagucccuguucccagagcccacuuuuuuuucuuuuuuugaaauaaaauagccugucuuucagaucuaaaaaaaaaaaaaaaaaaaaaaaaaaaaaaaaaaaaaaaaaaaaaaaaaaaaaaaaaaaaaaaaaaaaaaaaaaaaaaaaaaaaaaaaaaaaaaaaaaaa

SEQ ID NO: 28896 - RNA, 1743 nt, Artificial Sequence
  mRNA product Design a-2 (A100) comprising derived and/or modified sequence from MOPV/LASV reassortant(IGS-1;Clade IV)__AFY05576__GPCmut5 (opt1)
aggagaguccgcucagccagguugcagaagcggcuuagcguguguccuaaucuucucucugcguguagguaggccugugccgcaaacaagcuuaccaugggccagaucgugaccuucuuccaggaggucccccacgugaucgaggaggugaugaacaucguccugaucgcccucagcgugcuggccgugcugaaggggcucuacaacuucgcgaccugcggccuggucgggcuggugacguuccuccugcugugcggccgcuccugcaccaccagccucuacaaggggguguacgagcugcagacccuggagcucaacauggagacgcugaacaugaccaugccgcuguccugcaccaagaacaacagccaccacuacaucauggucggcaacgagaccggccucgagcugacgcugaccaacaccuccaucaucaaccacaaguucugcaaccucagcgacgcccacaagaagaaccuguacgaccacgcccugauguccaucaucagcaccuuccaccucuccauccccaacuucaaccaguacgaggccaugagcugcgacuucaacgggggcaagaucuccgugcaguacaaccugagccacuccuacgccggggacgcggccaaccacugcggcacgguggccaacgggguccugcagaccuucaugcggauggccuggggcggcagcuacaucgcgcucgacuccgggugcggcaacugggacugcaucaugaccagcuaccaguaccugaucauccagaacaccacgugggaggaccacugccaguucucccgccccagccccaucggguaccugggccuccugucccagcggacccgcgacaucuacaucagccggcgccugcucggcaccuucaccuggacgcugagcgacuccgagggggaggacaccccgggcggguacugccugacccgguggaugcucaucgaggccgagcugaagugcuucggcaacaccgccguggccaagugcaacgagaagcacgacgaggaguucugcgacaugcugcgccucuucgacuucaacaagcaggccauccagcggcugaaggcgcccgcccagaugagcauccagcugaucaacaaggccgugaacgcccucaucaacgaccagcugaucaugaagaaccaccuccgcgacaucaugugcauccccuacugcaacuacuccaaguacugguaccugaaccacacgaccaccgggcggaccagccugcccaagugcuggcuggucuccaacggcagcuaccucaacgagacgcacuucuccgacgacaucgagcagcaggccgacaacaugaucaccgagaugcugcagaaggaguacauggagcgccagggcaagaccccgcuggggcugguggaccucuucguguucagcaccuccuucuaccugaucagcaucuuccugcaccucgucaagauccccacgcaccggcacaucgugggcaaguccugccccaagccccaccgccugaaccacauggggaucugcagcugcggccuguacaagcagccgggggugcccgucaaguggaagcggugaggacuagucccuguucccagagcccacuuuuuuuucuuuuuuugaaauaaaauagccugucuuucagaucuaaaaaaaaaaaaaaaaaaaaaaaaaaaaaaaaaaaaaaaaaaaaaaaaaaaaaaaaaaaaaaaaaaaaaaaaaaaaaaaaaaaaaaaaaaaaaaaaaaaa

SEQ ID NO: 28897 - RNA, 1743 nt, Artificial Sequence
  mRNA product Design a-2 (A100) comprising derived and/or modified sequence from LASV(LM765-SLE-2012;Clade IV)__AIT17814__GPCmut5 (opt1)
aggagaguccgcucagccagguugcagaagcggcuuagcguguguccuaaucuucucucugcguguagguaggccugugccgcaaacaagcuuaccaugggccagaucgugaccuucuuccaggaggucccccacgugaucgaggaggugaugaacaucguccugaucgcccucagcauccuggccgugcugaaggggcucuacaacuucgcgaccugcggccugguggggcuggucacguuccuccugcugugcggccgcuccugcaccaccagccucuacaaggggguguacgagcugcagacccuggagcucaacauggagacgcugaacaugaccaugccgcuguccugcaccaagaacaacagccaccacuacaucauggugggcaacgagaccggccucgagcugacgcugaccaacaccuccaucaucgaccacaaguucugcaaccucagcgacgcccaccggaagaaccuguacgaccacgcccugauguccaucaucagcaccuuccaccucuccauccccaacuucaaccaguacgaggccaugagcugcgacuucaacgggggcaagaucuccguccaguacaaccugagccacuccuacgccaaggacgcggccgaccacugcgggacgguggccaacggcgugcugcagaccuucaugcgcauggccuggggcgggagcuacaucgcgcucgacuccggcugcgggcggugggacugcaucaugaccagcuaccaguaccugaucauccagaacaccacgugggaggaccacugccaguucucccgccccagccccaucggcuaccuggggcuccugucccagcggacccgcgacaucuacaucagccggcgccugcucggcaccuucaccuggacgcugagcgacuccgagggcaaggacacccccgggggcuacugccugacccgguggaugcucaucgaggccgagcugaagugcuucgggaacaccgccgucgccaagugcaacgagaagcacgacgaggaguucugcgacaugcugcgccucuucgacuucaacaagcaggccauccagcggcugaaggcgccggcccagaugagcauccagcugaucaacaaggccgugaacgcccucaucaacgaccagcugaucaugaagaaccaccuccgcgacaucaugugcauccccuacugcaacuacuccaaguacugguaccugaaccacacgaccaccggcaagaccagccugcccaagugcuggcugguguccaacgggagcuaccucaacgagacgcacuucuccgacgacaucgagcagcaggccgacaacaugaucaccgagaugcugcagaaggaguacauggagcggcagggcaagaccccgcugggccuggucgaccucuucguguucagcaccuccuucuaccugaucagcaucuuccugcaccucgugaagauccccacgcaccgccacaucgucgggaagcccugccccaagccgcaccggcugaaccacaugggcaucugcuccugcgggcuguacaagcagcccggcgugcccgugaaguggaagcgcugaggacuagucccuguucccagagcccacuuuuuuuucuuuuuuugaaauaaaauagccugucuuucagaucuaaaaaaaaaaaaaaaaaaaaaaaaaaaaaaaaaaaaaaaaaaaaaaaaaaaaaaaaaaaaaaaaaaaaaaaaaaaaaaaaaaaaaaaaaaaaaaaaaaaa

SEQ ID NO: 28898 - RNA, 1743 nt, Artificial Sequence
  mRNA product Design a-2 (A100) comprising derived and/or modified sequence from LASV(LM776-SLE-2012;Clade IV)__AIT17824__GPCmut5 (opt1)
aggagaguccgcucagccagguugcagaagcggcuuagcguguguccuaaucuucucucugcguguagguaggccugugccgcaaacaagcuuaccaugggccagaucgugaccuucuuccaggaggucccccacgugaucgaggaggugaugaacaucguccugaucgcccucagcauccuggccgugcugaaggggcucuacaacuucgcgaccugcggccugguggggcuggucacguuccuccugcugugcggccgcuccugcaccaccagcguguacaaggggguguacgagcuccagacccuggagcugaacauggagacgcucaacaugaccaugccgcuguccugcaccaagaacaacagccaccacuacaucauggucggcaacgagaccggccuggagcucacgcugaccaacaccuccaucaucaaccacaaguucugcaaccugagcgacgcccacaagaagaaccucuacgaccacgcccugauguccaucaucagcaccuuccaccuguccauccccaacuucaaccaguacgaggccaugagcugcgacuucaacgggggcaagaucuccgugcaguacaaccucagccacuccuacgccggggacgcggccaaccacugcggcacgguggccaacgggguccugcagaccuucaugcggauggccuggggcggcagcuacaucgcgcuggacuccgggugcggcaagugggacugcaucaugaccagcuaccaguaccucaucauccagaacaccacgugggaggaccacugccaguucucccgccccagccccaucggguaccugggccugcucucccagcggacccgcgacaucuacaucagccggcgccugcugggcaccuucaccuggacgcucagcgacuccgaggggaaggacaccccgggcggguacugccugacccgguggaugcugaucgaggccgagcucaagugcuucggcaacaccgccguggccaagugcaacgagaagcacgacgaggaguucugcgacaugcugcgccuguucgacuucaacaagcaggccauccagcggcucaaggcgcccgcccagaugagcauccagcugaucaacaaggccgugaacgcccugaucaacgaccagcucaucaugaagaaccaccuccgcgacaucaugugcauccccuacugcaacuacuccaaguacugguaccugaaccacacgaccaccgggaagaccagccugcccaagugcuggcuggucuccaacggcagcuaccugaacgagacgcacuucuccgacgacaucgagcagcaggccgacaacaugaucaccgagaugcuccagaaggaguacauggagcggcagggcaagaccccgcuggggcugguggaccuguucguguucagcaccuccuucuaccucaucagcaucuuccugcaccuggucaagauccccacgcaccgccacaucgugggcaaguccugccccaagccccaccggcucaaccacauggggaucugcagcugcggccuguacaagcagccgggggugcccguccgcuggaagcggugaggacuagucccuguucccagagcccacuuuuuuuucuuuuuuugaaauaaaauagccugucuuucagaucuaaaaaaaaaaaaaaaaaaaaaaaaaaaaaaaaaaaaaaaaaaaaaaaaaaaaaaaaaaaaaaaaaaaaaaaaaaaaaaaaaaaaaaaaaaaaaaaaaaaa

SEQ ID NO: 28899 - RNA, 1743 nt, Artificial Sequence
  mRNA product Design a-2 (A100) comprising derived and/or modified sequence from LASV(Mad39;Clade IV)__ANH09722__GPCmut5 (opt1)
aggagaguccgcucagccagguugcagaagcggcuuagcguguguccuaaucuucucucugcguguagguaggccugugccgcaaacaagcuuaccaugggccagaucgugaccuucuuccaggaggucccccacgugaucgaggaggugaugaacaucguccugaucgcccucagcauccuggccgugcugaaggggcucuacaacguggcgaccugcggccugaucgggcuggucacguuccuccugcugugcggccgcuccugcaccaccacccucuacaaggggguguacgagcugcaggcccuggagcucaacauggagacgcugaacaugaccaugccgcugagcugcaccaagaacaacucccaccacuacauccgggugggcaacgagaccggccucgagcugacgcugaccaacaccagccucaucaaccacaaguucugcaaccuguccgacgcccacaagaagaaccuguacgaccacgcccucaugagcaucaucuccaccuuccaccugagcauccccaacuucaaccaguacgaggccauguccugcgacuucaacgacgggaagaucagcguccaguacaaccugucccacacguacgcgggcgacaccgccaaccacugcgggaccguggccaacggcgugcuccagaccuucaugcgcauggccuggggcgggagcuacaucgcgcuggacuccggcugcgggggcugggacugcaucaugacgagcuaccaguaccugaucauccagaacaccaccugggaggaccacugccaguucucccggcccagccccaucggguaccucggccugcugucccagcgcacccgggacaucuacaucagccgccggcuccugggcacguucaccuggacccuguccgacagcgaggggaaggacaccccgggcggguacugccucacgcgcuggaugcugaucgaggccgagcugaagugcuucggcaacaccgccgucgccaagugcaacgagaagcacgacgaggaguucugcgacaugcuccggcuguucgacuucaacaagcaggccauccagcgccugaaggcgcccgcccagaugagcauccagcucaucaacaaggccgugaacgcccugaucaacgaccagcugaucaugaagaaccaccuccgggacaucaugugcauccccuacugcaacuacuccaaguacugguaccugaaccacaccgugaccgggaagacgagccugcccaagugcuggcucgucuccaacggcagcuaccugaacgagacccacuucuccgacgacaucgagcagcaggccgacaacaugaucaccgagaugcugcagaaggaguacauggagcgccagggcaagaccccgcuggggcucguggaccuguucguguucagcacguccuucuaccugaucagcaucuuccuccaccuggucaagauccccacccaccggcacguggugggcaagcccugccccaagccgcaccgccugaaccacauggggaucugcuccugcggcuucuacaagcagcccgggguccccgugcgguggaagcgcugaggacuagucccuguucccagagcccacuuuuuuuucuuuuuuugaaauaaaauagccugucuuucagaucuaaaaaaaaaaaaaaaaaaaaaaaaaaaaaaaaaaaaaaaaaaaaaaaaaaaaaaaaaaaaaaaaaaaaaaaaaaaaaaaaaaaaaaaaaaaaaaaaaaaa

SEQ ID NO: 28900 - RNA, 1743 nt, Artificial Sequence
  mRNA product Design a-2 (A100) comprising derived and/or modified sequence from LASV(Z0947-SLE-2011;Clade IV)__AIT17840__GPCmut5 (opt1)
aggagaguccgcucagccagguugcagaagcggcuuagcguguguccuaaucuucucucugcguguagguaggccugugccgcaaacaagcuuaccaugggccagaucgugaccuucuuccaggaggucccccacgugaucgaggaggugaugaacaucguccugaucgcccucagcauccuggccgugcugaaggggcucuacaacuucgcgaccugcggccugguggggcuggucacguuccuccugcugugcggccgcuccugcaccaucagccucuacaaggggguguacgagcugcagacccuggagcucaacauggagacccugaacaugacgaugccgcuguccugcaccaagaacaacagccaccacuacaucauggugggcaacgagaccggccucgagcugacccugacgaacaccuccaucaucaaccacaaguucugcaaccucagcgacgcccacaagaagaaccuguacgaccacgcccugauguccaucaucagcaccuuccaccucuccauccccaacuucaaccaguacgaggccaugagcugcgacuucaacgggggcaagaucuccguccaguacaaccugagccacuccuacgccggggacgcggccaaccacugcggcaccguggccaacggggugcugcagacguucaugcggauggccuggggcggcagcuacaucgcgcucgacuccgggugcgaccgcugggacugcaucaugaccagcuaccaguaccugaucauccagaacaccaccugggaggaccacugccaguucucccggcccagccccaucggcuaccuggggcuccugucccagcgcacgcgggacaucuacaucagccgccggcugcucggcaccuucaccuggacccugagcgacuccgagggcaaggacacgcccgggggcuacugccugacccgcuggaugcucaucgaggccgagcugaagugcuucgggaacaccgccgucgccaagugcaacgagaagcacgacgaggaguucugcgacaugcugcggcuguucgacuucaacaagcaggccauccagcgccugaaggcgccggcccagaugagcauccagcugaucaacaaggccgugaacgcccucaucaacgaccagcugaucaugaagaaccaccuccgggacaucaugugcauccccuacugcaacuacuccaaguacugguaccucaaccacaccacgaccggcaagaccagccugcccaagugcuggcugguguccaacgggagcuaccucaacgagacccacuucuccgacgacaucgagcagcaggccgacaacaugaucacggagaugcugcagaaggaguacauggagcgccagggcaagaccccgcugggccuggucgaccucuucguguucagcaccuccuucuaccugaucagcaucuuccugcaccucgugaagauccccacccaccggcacaucgucgggaagcccugccccaagccgcaccgccugaaccacaugggcaucugcuccugcgggcuguacaagcagcccggcgugcccgugaaguggaagcggugaggacuagucccuguucccagagcccacuuuuuuuucuuuuuuugaaauaaaauagccugucuuucagaucuaaaaaaaaaaaaaaaaaaaaaaaaaaaaaaaaaaaaaaaaaaaaaaaaaaaaaaaaaaaaaaaaaaaaaaaaaaaaaaaaaaaaaaaaaaaaaaaaaaaa

SEQ ID NO: 28901 - RNA, 1743 nt, Artificial Sequence
  mRNA product Design a-2 (A100) comprising derived and/or modified sequence from LASV(Josiah;Clade IV)__NP_694870__GPCmut5 (opt4)
aggagaguccgcucagccagguugcagaagcggcuuagcguguguccuaaucuucucucugcguguagguaggccugugccgcaaacaagcuuaccaugggccagaucgugaccuucuuccaggaggugccccacgugaucgaggaggugaugaacaucgugcugaucgcccugagcgugcuggccgugcugaagggccuguacaacuucgccaccugcggccuggugggccuggugaccuuccugcugcugugcggcagaagcugcaccaccagccuguacaagggcguguacgagcugcagacccuggagcugaacauggagacccugaacaugaccaugccccugagcugcaccaagaacaacagccaccacuacaucauggugggcaacgagaccggccuggagcugacccugaccaacaccagcaucaucaaccacaaguucugcaaccugagcgacgcccacaagaagaaccuguacgaccacgcccugaugagcaucaucagcaccuuccaccugagcauccccaacuucaaccaguacgaggccaugagcugcgacuucaacggcggcaagaucagcgugcaguacaaccugagccacagcuacgccggcgacgccgccaaccacugcggcaccguggccaacggcgugcugcagaccuucaugagaauggccuggggcggcagcuacaucgcccuggacagcggcugcggcaacugggacugcaucaugaccagcuaccaguaccugaucauccagaacaccaccugggaggaccacugccaguucagcagacccagccccaucggcuaccugggccugcugagccagagaaccagagacaucuacaucagcagaagacugcugggcaccuucaccuggacccugagcgacagcgagggcaaggacacccccggcggcuacugccugaccagauggaugcugaucgaggccgagcugaagugcuucggcaacaccgccguggccaagugcaacgagaagcacgacgaggaguucugcgacaugcugagacuguucgacuucaacaagcaggccauccagagacugaaggcccccgcccagaugagcauccagcugaucaacaaggccgugaacgcccugaucaacgaccagcugaucaugaagaaccaccugagagacaucaugugcauccccuacugcaacuacagcaaguacugguaccugaaccacaccaccaccggcagaaccagccugcccaagugcuggcuggugagcaacggcagcuaccugaacgagacccacuucagcgacgacaucgagcagcaggccgacaacaugaucaccgagaugcugcagaaggaguacauggagagacagggcaagaccccccugggccugguggaccuguucguguucagcaccagcuucuaccugaucagcaucuuccugcaccuggugaagauccccacccacagacacaucgugggcaagagcugccccaagccccacagacugaaccacaugggcaucugcagcugcggccuguacaagcagcccggcgugcccgugaaguggaagagaugaggacuagucccuguucccagagcccacuuuuuuuucuuuuuuugaaauaaaauagccugucuuucagaucuaaaaaaaaaaaaaaaaaaaaaaaaaaaaaaaaaaaaaaaaaaaaaaaaaaaaaaaaaaaaaaaaaaaaaaaaaaaaaaaaaaaaaaaaaaaaaaaaaaaa

SEQ ID NO: 28902 - RNA, 1740 nt, Artificial Sequence
  mRNA product Design a-2 (A100) comprising derived and/or modified sequence from LASV(LP;Clade I)__AAF86701__GPCmut5 (opt4)
aggagaguccgcucagccagguugcagaagcggcuuagcguguguccuaaucuucucucugcguguagguaggccugugccgcaaacaagcuuaccaugggccagaucaucaccuucuuccaggaggugccccacgugaucgaggaggugaugaacaucgugcugaucgcccugagccugcuggccauccugaagggccuguacaacaucgccaccugcggcaucaucggccugguggccuuccuguuccugugcggcaagagcugcagccugacccugaagggcggcuacgagcugcagacccuggagcugaacauggagacccugaacaugaccaugccccugagcugcaccaagaacagcagccaccacuacaucagagugggcaacgagaccggccuggagcugacccugaccaacaccagcaucaucaaccacaaguucugcaaccugagcgacgcccacaagaagaaccuguacgaccacgcccugaugagcaucaucagcaccuuccaccugagcauccccaacuucaaccaguacgaggccaugagcugcgacuucaacggcggcaagaucagcgugcaguacaaccugagccacagcuacgccggcgacgccgccgagcacugcggcaccguggccaacggcgugcugcagaccuucaugagaauggccuggggcggcagauacaucgcccuggacagcggcugcggcaacugggacugcaucaugaccagcuaccaguaccugaucauccagaacaccaccugggaggaccacugccaguucagcagacccagccccaucggcuaccugggccugcugagccagagaaccagagacaucuacaucagcagaagacugcugggcaccuucaccuggacccugagcgacagcgagggcaacgagacccccggcggcuacugccugaccagauggaugcugaucgaggccgagcugaagugcuucggcaacaccgccguggccaagugcaacgagaagcacgacgaggaguucugcgacaugcugagacuguucgacuucaacaagcaggccaucagaagacugaaggcccccgcccagaugagcauccagcugaucaacaaggccgugaacgcccugaucaacgaccagcugaucaugaagaaccaccugagagacaucaugugcauccccuacugcaacuacagcaaguacugguaccugaaccacaccagcagcggcagaaccagccugcccaagugcuggcugaucagcaacggcagcuaccugaacgagacccaguucagcgacgacaucgagcagcaggccgacaacaugaucaccgagaugcugcagaaggaguacaucgagagacagggcaagaccccccugggccugguggacaucuucaucuucagcaccagcuucuaccugaucagcaucuuccugcaccugaucaagauccccacccacagacacaucgugggcaagcccugccccaagccccacagacugaaccacaugggcgugugcagcugcggccuguacaagcaccccggcgugcccaccaaguggaagagaugaggacuagucccuguucccagagcccacuuuuuuuucuuuuuuugaaauaaaauagccugucuuucagaucuaaaaaaaaaaaaaaaaaaaaaaaaaaaaaaaaaaaaaaaaaaaaaaaaaaaaaaaaaaaaaaaaaaaaaaaaaaaaaaaaaaaaaaaaaaaaaaaaaaaa

SEQ ID NO: 28903 - RNA, 1740 nt, Artificial Sequence
  mRNA product Design a-2 (A100) comprising derived and/or modified sequence from LASV(803213;Clade II)__AAF86703__GPCmut5 (opt4)
aggagaguccgcucagccagguugcagaagcggcuuagcguguguccuaaucuucucucugcguguagguaggccugugccgcaaacaagcuuaccaugggccagaucaucaccuucuuccaggaggugccccacgugaucgaggaggugaugaacaucgugcugaucgcccugagccugcuggccauccugaagggcaucuacaacguggccaccugcggccuguucggccugaucagcuuccugcugcugugcggcagaagcugcagcgugaccuacaagggcguguacgagcugcagacccuggagcugaacauggccaaccugaacaugaccaugccccugagcugcaccaagaacaacagccaccacuacaucauggugggcaacgagaccggccuggagcugacccugaccaacaccagcaucaucaaccacaaguucugcaaccugagcgacgcccacaagaagaaccuguacgaccacgcccugaugagcaucaucagcaccuuccaccugagcauccccaacuucaaccaguacgaggccaugagcugcgacuucaacggcggcaagaucagcgugcaguacaaccugagccacagcuucgccguggacgccgccaaccacugcggcaccaucgccaacggcgugcugcagaccuucaugagaauggccuggggcggcagcuacaucgcccuggacagcggcugcggcaacugggacugcaucaugaccagcuaccaguaccugaucauccagaacaccaccugggaggaccacugccaguucagcagacccagccccaucggcuaccugggccugcugagccagagaaccagagacaucuacaucagcagaagacugcugggcaccuucaccuggacccugagcgacagcgagggcaacgaggcccccggcggcuacugccugaccagauggaugcugaucgaggccgagcugaagugcuucggcaacaccgccguggccaagugcaacgagaagcacgacgaggaguucugcgacaugcugagacuguucgacuucaacaagcaggccaucaagagacugaagacccccgcccagaugagcauccagcugaucaacaaggccgugaacgcccugaucaacgaccagcugaucaugaagaaccaccugagagacaucaugugcauccccuacugcaacuacagcagauacugguaccugaaccacaccgugaccggcaagaccagccugcccagaugcuggcuggugagcaacggcagcuaccugaacgagacccacuucagcgacgacaucgagcagcaggccgacaacaugaucaccgagaugcugcagaaggaguacauggacagacagggcaagaccccccugggccugguggaccuguucguguucagcaccagcuucuaccugaucagcaucuuccugcaccuggugaagauccccacccacagacacaucgugggcaagcccugccccaagccccacagacugaaccacaugggcaucugcagcugcggccuguacaagcaccccggcgugcccgugaaguggaagagaugaggacuagucccuguucccagagcccacuuuuuuuucuuuuuuugaaauaaaauagccugucuuucagaucuaaaaaaaaaaaaaaaaaaaaaaaaaaaaaaaaaaaaaaaaaaaaaaaaaaaaaaaaaaaaaaaaaaaaaaaaaaaaaaaaaaaaaaaaaaaaaaaaaaaa

SEQ ID NO: 28904 - RNA, 1740 nt, Artificial Sequence
  mRNA product Design a-2 (A100) comprising derived and/or modified sequence from LASV(GA391;Clade III)__CAA36645__GPCmut5 (opt4)
aggagaguccgcucagccagguugcagaagcggcuuagcguguguccuaaucuucucucugcguguagguaggccugugccgcaaacaagcuuaccaugggccagaucgugaccuucuuccaggaggugccccacgugaucgaggaggugaugaacaucgugcugaucgcccugagcauccuggccauccugaagggccuguacaacguggccaccugcggccugaucggccuggugaccuuccugcugcugagcggcagaagcugcagccugaucuacaagggcaccuacgagcugcagacccuggagcugaacauggagacccugaacaugaccaugccccugagcugcaccaagaacaacagccaccacuacaucagagugggcaacgagaccggccuggagcugacccugaccaacaccagcauccugaaccacaaguucugcaaccugagcgacgcccacaagagaaaccuguacgaccacagccugaugagcaucaucagcaccuuccaccugagcauccccaacuucaaccaguacgaggccaugagcugcgacuucaacggcggcaagaucaccgugcaguacaaccugagccacagcuucgccguggacgccgccggccacugcggcacccuggccaacggcgugcugcagaccuucaugagaauggccuggggcggcagcuacaucgcccuggacagcggcugcggcaacugggacugcaucaugaccagcuaccaguaccugaucauccagaacaccaccugggacgaccacugccaguucagcagacccagccccaucggcuaccugggccugcugagccagagaaccagagacaucuacaucagcagaagacugcugggcaccuucaccuggacccugagcgacagcgagggcaacgagacccccggcggcuacugccugaccagauggaugcugaucgaggccgagcugaagugcuucggcaacaccgccguggccaagugcaacgagaagcacgacgaggaguucugcgacaugcugagacuguucgacuucaacaagcaggccaucagaagacugaagacccccgcccagaugagcauccagcugaucaacaaggccgugaacgcccugaucaacgaccagcugaucaugaagaaccaccugagagacaucaugugcauccccuacugcaacuacagcagauacugguaccugaaccacaccagcaccggcaagaccagccugcccagaugcuggcugaucagcaacggcagcuaccugaacgagaccaaguucagcgacgacaucgagcagcaggccgacaacaugaucaccgagaugcugcagaaggaguacaucgacagacagggcaagaccccccugggccugguggaccuguucguguucagcaccagcuucuaccugaucagcaucuuccugcaccuggugaagauccccacccacagacacaucgugggcaagcccugccccaagccccacagacugaaccacaugggcaucugcagcugcggccuguacaagcagcccggcgugcccgugagauggaagagaugaggacuagucccuguucccagagcccacuuuuuuuucuuuuuuugaaauaaaauagccugucuuucagaucuaaaaaaaaaaaaaaaaaaaaaaaaaaaaaaaaaaaaaaaaaaaaaaaaaaaaaaaaaaaaaaaaaaaaaaaaaaaaaaaaaaaaaaaaaaaaaaaaaaaa

SEQ ID NO: 28905 - RNA, 1743 nt, Artificial Sequence
  mRNA product Design a-2 (A100) comprising derived and/or modified sequence from LASV(AV;Clade V)__CCA30314__GPCmut5 (opt4)
aggagaguccgcucagccagguugcagaagcggcuuagcguguguccuaaucuucucucugcguguagguaggccugugccgcaaacaagcuuaccaugggccagaucgugaccuucuuccaggaggugccccacgugaucgaggaggugaugaacaucgugcugaucgcccugagcauccuggccgugcugaagggccuguacaacaucgccaccugcggccugaucggccugaucaccuuccugcugcugugcggcagaagcugcagcagcaaccuguacaagggcguguacgagcugcagagccuggaccugaacauggagacccugaacaugaccaugccccugagcugcaccaagaacaacagccaccacuacaucagagugggcaacgacaccggccuggagcugacccugaccaacaccagcauccugaaccacaaguucugcaaccugagcgacgcccacaagaaggaccuguacgaccacgcccugaugagcaucaucagcaccuuccaccugagcauccccaacuucaaccaguacgaggccaugagcugcgacuucaacggcggcaagaucagcgugcaguacaaccugagccacagcuacgccaucgacgccgccaaccacugcggcaccguggccaacggcauccugcagaccuucaugagaauggccuggggcggcagcuacaucgcccuggacagcggcugcggcaacugggacugcaucaugaccagcuaccaguaccugaucauccagaacaccaccugggagaaccacugccaguucagcagacccagccccaucggcuaccugggccugcugagccagagaaccagagacaucuacaucagcagaagacugcugggcaccuucaccuggacccugagcgacagcgagggcaacgccacccccggcggcuacugccugaccagauggaugcugaucgaggccgagcugaagugcuucggcaacaccgccguggccaagugcaacgagaagcacgacgaggaguucugcgacaugcugagacuguucgacuucaacaagcaggccaucagcagacugaagagccccgcccagaugagcauccagcugaucaacaaggccgugaacgcccugaucaacgaccagcugaucaugaagaaccaccugagagacaucaugugcauccccuacugcaacuacagcaaguacugguaccugaaccacaccaucaccggcaagaccagccugcccaagugcuggcuggugagcaacggcagcuaccugaacgagacccacuucagcgacgacaucgagcagcaggccgacaacaugaucaccgagaugcugcagaaggaguacauggagagacagggcaagaccccccugggccugguggaccuguucguguucagcaccagcuucuaccugaucagcaucuuccugagacuggugaagauccccacccacagacacaucgugggcaagcccugccccaagccccacagacugaaccacaugggcaucugcagcugcggccuguacaagcagcccggcgugcccgugagauggaagagaugaggacuagucccuguucccagagcccacuuuuuuuucuuuuuuugaaauaaaauagccugucuuucagaucuaaaaaaaaaaaaaaaaaaaaaaaaaaaaaaaaaaaaaaaaaaaaaaaaaaaaaaaaaaaaaaaaaaaaaaaaaaaaaaaaaaaaaaaaaaaaaaaaaaaa

SEQ ID NO: 28906 - RNA, 1740 nt, Artificial Sequence
  mRNA product Design a-2 (A100) comprising derived and/or modified sequence from LASV(Togo/2016/7082;Clade VI)__AMR44577__GPCmut5 (opt4)
aggagaguccgcucagccagguugcagaagcggcuuagcguguguccuaaucuucucucugcguguagguaggccugugccgcaaacaagcuuaccaugggccagaucaucaccuucuuccaggaggugccccacgugaucgaggaggugaugaacaucgugcugaucgcccugagccugcuggccauccugaagggcguguacaacguggccaccugcggcaucaucggccuggugaccuuccuguuccugugcggcagaagcugcagccugaucuacaagggcagcuacgagcugcagacccuggagcugaacauggagacccugaacaugaccaugccccugagcugcaccaagaacagcagccaccacuacaucagagugggcaacgagaccggccuggagcugacccugaccaacaccagcaucaucaaccacaaguucugcaaccugagcgacgcccacaagagaaaccuguacgaccacgcccugaugagcauccugagcaccuuccaccugagcauccccaacuucaaccaguacgaggccaugagcugcgacuucaacggcggcaagaucagcgugcaguacaaccugagccacgccuacgccguggacgccgccgagcacugcggcaccguggccaacggcgugcugcagaccuucaugagaauggccuggggcggcagcuacaucgcccuggacagcggcugcggcaacugggacugcaucaugaccagcuaccaguaccugaucauccagaacaccaccugggaggaccacugccaguucagcagacccagccccaucggcuaccugggccugcugagccagagaaccagagacaucuacaucagcagaagacugcugggcaccuucaccuggacccugagcgacagcgagggcaacgagacccccggcggcuacugccugaccagauggaugcugaucgaggccgagcugaagugcuucggcaacaccgccguggccaagugcaacgagaagcacgacgaggaguucugcgacaugcugagacuguucgacuucaacaagcaggccauccagagacugaagagccccgcccagaugagcauccagcugaucaacaaggccgugaacgcccugaucaacgaccagcugaucaugaagaaccaccugagagacaugaugugcauccccuacugcaacuacagcaaguacugguaccugaaccacaccagcagcggcagaaccagccugcccaagugcuggcuggugagcaacggcagcuaccugaacgagacccacuucagcgacgacaucgagcagcaggccgacaacaugaucaccgagaugcugcagaaggaguacaucgacagacagggcaagaccccccugggccugguggaccuguucguguucagcaccagcuucuaccugaucagcaucuuccugcaccugaucaagauccccacccacagacacaucgugggcaagcccugccccaagccccacagacugaaccacaugggcaucugcagcugcggccuguacaagcagcccggcgugcccaccagauggaagagaugaggacuagucccuguucccagagcccacuuuuuuuucuuuuuuugaaauaaaauagccugucuuucagaucuaaaaaaaaaaaaaaaaaaaaaaaaaaaaaaaaaaaaaaaaaaaaaaaaaaaaaaaaaaaaaaaaaaaaaaaaaaaaaaaaaaaaaaaaaaaaaaaaaaaa

SEQ ID NO: 28907 - RNA, 1740 nt, Artificial Sequence
  mRNA product Design a-2 (A100) comprising derived and/or modified sequence from LASV(KAK-428;Clade n.d. (VII))__ANH09740__GPCmut5 (opt4)
aggagaguccgcucagccagguugcagaagcggcuuagcguguguccuaaucuucucucugcguguagguaggccugugccgcaaacaagcuuaccaugggccagaucgugaccuucuuccaggaggugccccacgugaucgaggaggugaugaacaucgugcugaucgcccugagccugcuggccauccugaagggccuguacaacuucgccaccugcggcgugaucggccugaucaccuuccugcugcugugcggcagaagcugcagcgccaccuacaagggccaguacgagcugcagacccuggagcugaacauggagagccugaacaugaccaugccccugagcugcaccaagaacaacagccaccacuacaucagagccggcaacaacaccggccuggagcugacccugaccaacaccagcaucaucagccacaaguucugcaaccugagcgacgcccacaagaagaaccuguacgaccacacccugaugagcaucaucaccaccuuccaccugagcauccccaacuucaaccaguacgaggccaugagcugcgacuucaacggcggcaagaucagcauccaguacaaccugagccacagcuacgccggcgacgccgcccagcacugcggcaccguggccaacggcgugcugcagaccuucaugagaauggccuggggcggcagcuaccuggcccuggacagcggcugcagaggcugggacugcaucaucagcagcuaccaguaccugaucauccagaacaccaccugggacgaccacugccaguucagcagacccagccccaucggcuaccugggcuucgugagccagaagaccagagacaucuacaucagcagaagacugcugggcaccuucaccuggacccugagcgacagcgagggccacgacaugcccggcggcuacugccugaccagauggaugcugaucgaggccgaccugaagugcuucggcaacaccgccguggccaagugcaacgagaagcacgacgaggaguucugcgacauguggagacuguucgacuucaacaagcaggccauccagagacugaaggcccccgcccagaugaacauccagcugaucaacaaggccgugaacgcccugaucaacgaccagcugaugaugaagaaccaccugagagacaucaugugcauccccuacugcaacuacagcaaguucugguaccugaacaacaccaccaccggcagaaccagccugcccagaugcuggcugaucagcaacggcagcuaccugaacgagacccacuucagcgacgacaucgagcagcaggccgacaacaugaucaccgagaugcugcagaaggaguacauggacagacagggcaagaccccccugggccugguggaccuguucguguucagcaccagcuucuaccugaucaccaucuuccugcaccuggugaagauccccacccacagacacaucgugggcaagcccugccccaagccccacagacugaaccacaugggcaucugcagcugcggccuguacaagcagcccggcgugcccgugagauggaagagaugaggacuagucccuguucccagagcccacuuuuuuuucuuuuuuugaaauaaaauagccugucuuucagaucuaaaaaaaaaaaaaaaaaaaaaaaaaaaaaaaaaaaaaaaaaaaaaaaaaaaaaaaaaaaaaaaaaaaaaaaaaaaaaaaaaaaaaaaaaaaaaaaaaaaa

SEQ ID NO: 28908 - RNA, 1740 nt, Artificial Sequence; identical to SEQ ID NO: 28902
  mRNA product Design a-2 (A100) comprising derived and/or modified sequence from LASV(Pinneo-NIG-1969;Clade I)__AIT17836__GPCmut5 (opt4)

SEQ ID NO: 28909 - RNA, 1740 nt, Artificial Sequence
  mRNA product Design a-2 (A100) comprising derived and/or modified sequence from LASV(ISTH0009-NIG-2011;Clade II)__AIT17404__GPCmut5 (opt4)
aggagaguccgcucagccagguugcagaagcggcuuagcguguguccuaaucuucucucugcguguagguaggccugugccgcaaacaagcuuaccaugggccagaucaucaccuucuuccaggaggugccccacgugaucgaggaggugaugaacaucgugcugaucgcccugagccugcuggccauccugaagggcaucuacaacguggccaccugcggccuguucggccuggugagcuuccugcugcugugcggcagaagcugcagcaccaccuacaagggcguguacgagcugcagacccuggagcuggacauggccagccugaacaugaccaugccccugagcugcaccaagaacaacagccaccacuacaucauggugggcaacgagaccggccuggagcugacccugaccaacaccagcaucaucaaccacaaguucugcaaccugagcgacgcccacaagaagaaccuguacgaccacgcccugaugagcaucaucagcaccuuccaccugagcauccccaacuucaaccaguacgaggccaugagcugcgacuucaacggcggcaagaucagcgugcaguacaaccugagccacgccuacgccguggacgccgccaaccacugcggcaccaucgccaacggcgugcugcagaccuucaugagaauggccuggggcggcagcuacaucgcccuggacagcggcugcggcagcugggacugcaucaugaccagcuaccaguaccugaucauccagaacaccaccugggaggaccacugccaguucagcagacccagccccaucggcuaccugggccugcugagccagagaaccagagacaucuacaucagcagaagacugcugggcaccuucaccuggacccugagcgacagcgagggcaacgagacccccggcggcuacugccugaccagauggaugcugaucgaggccgagcugaagugcuucggcaacaccgccguggccaagugcaacgagaagcacgacgaggaguucugcgacaugcugagacuguucgacuucaacaagcaggccaucagaagacugaagacccccgcccagaugagcauccagcugaucaacaaggccgugaacgcccugaucaacgaccagcugaucaugaagaaccaccugagagacaucaugugcauccccuacugcaacuacagcaaguacugguaccugaaccacaccgugaccggcaagaccagccugcccagaugcuggcuggugagcaacggcagcuaccugaacgagacccacuucagcgacgacaucgagcagcaggccgacaacaugaucaccgagcugcugcagaaggaguacauggacagacagggcaagaccccccugggccugguggaccuguucguguucagcaccagcuucuaccugaucagcaucuuccugcaccugaucaagauccccacccacagacacaucaccggcaagcccugccccaagccccacagacugaaccacaugggcaucugcagcugcggccuguacaagcaccccggcgugcccgugaaguggaagagaugaggacuagucccuguucccagagcccacuuuuuuuucuuuuuuugaaauaaaauagccugucuuucagaucuaaaaaaaaaaaaaaaaaaaaaaaaaaaaaaaaaaaaaaaaaaaaaaaaaaaaaaaaaaaaaaaaaaaaaaaaaaaaaaaaaaaaaaaaaaaaaaaaaaaa

SEQ ID NO: 28910 - RNA, 1740 nt, Artificial Sequence
  mRNA product Design a-2 (A100) comprising derived and/or modified sequence from LASV(ISTH2010-NIG-2012;Clade II)__AIT17482__GPCmut5 (opt4)
aggagaguccgcucagccagguugcagaagcggcuuagcguguguccuaaucuucucucugcguguagguaggccugugccgcaaacaagcuuaccaugggccagaucaucaccuucuuccaggaggugccccacgugaucgaggaggugaugaacaucgugcugaucgcccugagccugcuggccauccugaagggcaucuacaacguggccaccugcggccuguucggccuggugagcuuccugcugcugugcggcagaagcugcagcaccaccuacaagggcguguacgagcugcagacccuggagcuggacauggccagccugaacaugaccaugccccugagcugcaccaagaacaacagccaccacuacaucauggugggcaacgagaccggccuggagcugacccugaccaacaccagcaucaucaaccacaaguucugcaaccugagcgacgcccacaagaagaaccuguacgaccacgcccugaugagcaucaucagcaccuuccaccugagcauccccaacuucaaccaguacgaggccaugagcugcgacuucaacggcggcaagaucagcgugcaguacaaccugagccacgccuacgccguggacgccgccaaccacugcggcaccaucgccaacggcgugcugcagaccuucaugagaauggccuggggcggcagcuacaucgcccuggacagcggcugcggcagcugggacugcaucaugaccagcuaccaguaccugaucauccagaacaucaccugggaggaccacugccaguucagcagacccagccccaucggcuaccugggccugcugagccagagaaccagagacaucuacaucagcagaagacugcugggcaccuucaccuggacccugagcgacagcgagggcaacgagacccccggcggcuacugccugaccagauggaugcugaucgaggccgagcugaagugcuucggcaacaccgccguggccaagugcaacgagaagcacgacgaggaguucugcgacaugcugagacuguucgacuucaacaagcaggccaucagaagacugaagacccccgcccagaugagcauccagcugaucaacaaggccgugaacgcccugaucaacgaccagcugaucaugaagaaccaccugagagacaucaugugcauccccuacugcaacuacagcaaguacugguaccugaaccacaccgugaccggcaagaccagccugcccagaugcuggcuggugagcaacggcagcuaccugaacgagacccacuucagcgacgacaucgagcagcaggccgacaacaugaucaccgagcugcugcagaaggaguacaucgacagacagggcaagaccccccugggccugguggaccuguucguguucagcaccagcuucuaccugaucagcaucuuccugcaccuggugaagauccccacccacagacacguggugggcaagcccugccccaagccccacagacugaaccacaugggcaucugcagcugcggccuguacaagcaccccggcgugcccgugaaguggaagagaugaggacuagucccuguucccagagcccacuuuuuuuucuuuuuuugaaauaaaauagccugucuuucagaucuaaaaaaaaaaaaaaaaaaaaaaaaaaaaaaaaaaaaaaaaaaaaaaaaaaaaaaaaaaaaaaaaaaaaaaaaaaaaaaaaaaaaaaaaaaaaaaaaaaaa

SEQ ID NO: 28911 - RNA, 1740 nt, Artificial Sequence
  mRNA product Design a-2 (A100) comprising derived and/or modified sequence from LASV(Lassa virus/H.sapiens-wt/NGA/2015/ISTH_0543;Clade II)__AVO03639__GPCmut5 (opt4)
aggagaguccgcucagccagguugcagaagcggcuuagcguguguccuaaucuucucucugcguguagguaggccugugccgcaaacaagcuuaccaugggccagaucaucaccuucuuccaggaggugccccacgugaucgaggaggugaugaacaucgugcugaucgcccugagccugcuggccauccugaagggcaucuacaacguggccaccugcggccuguucggccuggugagcuuccugcugcugugcggcagaagcugcagcaccaccuacaagggcguguacgagcugcagacccuggagcuggacauggccaaccugaacaugaccaugccccugagcugcaccaagaacaacagccaccacuacaucauggugggcaacgagaccggccuggagcugacccugaccaacaccagcaucaucaaccacaaguucugcaaccugagcgacgcccacaagaagaaccuguacgaccacgcccugaugagcaucaucagcaccuuccaccugagcauccccaacuucaaccaguacgaggccaugagcugcgacuucaacggcggcaagaucagcgugcaguacaaccugagccacaccuacgccguggacgccgccaaccacugcggcaccaucgccaacggcgugcugcagaccuucaugagaauggccuggggcggcagcuacaucgcccuggacagcggcugcggcagcugggacugcaucaugaccagcuaccaguaccuggugauccagaacaccaccugggaggaccacugccaguucagcagacccagccccaucggcuaccugggccugcugagccagagaaccagagacaucuacaucagcagaagacugcugggcaccuucaccuggacccugagcgacagcgagggcaacgagacccccggcggcuacugccugaccagauggaugcugaucgaggccgagcugaagugcuucggcaacaccgccguggccaagugcaacgagaagcacgacgaggaguucugcgacaugcugagacuguucgacuucaacaagcaggccaucagaagacugaagacccccgcccagaugagcauccagcugaucaacaaggccgugaacgcccugaucaacgaccagcugaucaugaagaaccaccugagagacaucaugugcauccccuacugcaacuacagcaaguacugguaccugaaccacaccgugaccggcaagaccagccugcccagaugcuggcuggugagcaacggcagcuaccugaacgagacccacuucagcgacgacaucgagcagcaggccgacaacaugaucaccgagcugcugcagaaggaguacaucgacagacagggcaagaccccccugggccugguggaccuguucguguucagcaccagcuucuaccugaucagcaucuuccugcaccuggugaagauccccacccacagacacaucaccggcaagcccugccccaagccccacagacugaaccacaugggcaucugcagcugcggccuguacaagcaccccggcgugcccgugaaguggaagagaugaggacuagucccuguucccagagcccacuuuuuuuucuuuuuuugaaauaaaauagccugucuuucagaucuaaaaaaaaaaaaaaaaaaaaaaaaaaaaaaaaaaaaaaaaaaaaaaaaaaaaaaaaaaaaaaaaaaaaaaaaaaaaaaaaaaaaaaaaaaaaaaaaaaaa

SEQ ID NO: 28912 - RNA, 1740 nt, Artificial Sequence
  mRNA product Design a-2 (A100) comprising derived and/or modified sequence from LASV(Lassa virus/H.sapiens-wt/NGA/2016/ISTH_0009;Clade II)__AVO03571__GPCmut5 (opt4)
aggagaguccgcucagccagguugcagaagcggcuuagcguguguccuaaucuucucucugcguguagguaggccugugccgcaaacaagcuuaccaugggccagaucaucaccuucuuccaggaggugccccacgugaucgaggaggugaugaacaucgugcugaucgcccugagccugcuggccauccugaagggcaucuacaacguggccaccugcggccugcugggccuggugagcuuccugcugcugugcggcagaagcugcagcaccaccuacaagggcguguacgagcugcagacccuggagcuggacauggccagccugaacaugaccaugccccugagcugcaccaagaacaacagccaccacuacaucauggugggcaacgagaccggccuggagcugacccugaccaacaccagcaucaucaaccacaaguucugcaaccugagcgacgcccacaagaagaaccuguacgaccacgcccugaugagcaucaucagcaccuuccaccugagcauccccaacuucaaccaguacgaggccaugagcugcgacuucaacggcggcagaaucagcgugcaguacaaccugagccacagcuacgccguggacgccgccaaccacugcggcaccaucgccaacggcgugcugcagaccuucaugagaauggccuggggcggcagcuacaucgcccuggacagcggcugcggcagcugggacugcaucaugaccagcuaccaguaccugaucauccagaacaccaccugggaggaccacugccaguucagcagacccagccccaucggcuaccugggccugcugagccagagaaccagagacaucuacaucagcagaagacugcugggcaccuucaccuggacccugagcgacagcgagggcaacgagacccccggcggcuacugccugaccagauggaugcugaucgaggccgagcugaagugcuucggcaacaccgccguggccaagugcaacgagaagcacgacgaggaguucugcgacaugcugagacuguucgacuucaacaagcaggccaucagaagacugaagacccccgcccagaugagcauccagcugaucaacaaggccgugaacgcccugaucaacgaccagcugaucaugaagaaccaccugagagacaucaugugcauccccuacugcaacuacagcaaguacugguaccugaaccacaccgugaccggcaagaccagccugcccagaugcuggcuggugagcaacggcagcuaccugaacgagacccacuucagcgacgacaucgagcagcaggccgacaacaugaucaccgagcugcugcagaaggaguacaucgacagacagggcaagaccccccugggccugguggaccuguucguguucagcaccagcuucuaccugaucagcaucuuccugcaccuggugaagauccccacccacagacacaucaccggcaagcccugccccaagccccacagacugaaccacaugggcaucugcagcugcggccuguacaaccaccccggcgugcccgugaaguggaagagaugaggacuagucccuguucccagagcccacuuuuuuuucuuuuuuugaaauaaaauagccugucuuucagaucuaaaaaaaaaaaaaaaaaaaaaaaaaaaaaaaaaaaaaaaaaaaaaaaaaaaaaaaaaaaaaaaaaaaaaaaaaaaaaaaaaaaaaaaaaaaaaaaaaaaa

SEQ ID NO: 28913 - RNA, 1740 nt, Artificial Sequence
  mRNA product Design a-2 (A100) comprising derived and/or modified sequence from LASV(Lassa virus/H.sapiens-wt/NGA/2016/ISTH_0017;Clade II)__AVO03567__GPCmut5 (opt4)
aggagaguccgcucagccagguugcagaagcggcuuagcguguguccuaaucuucucucugcguguagguaggccugugccgcaaacaagcuuaccaugggccagaucaucaccuucuuccaggaggugccccacgugaucgaggaggugaugaacaucgugcugaucgcccugagccugcuggccauccugaagggcaucuacaacguggccaccugcggccuguucggccuggugagcuuccugcugcugugcggcagaagcugcagcaccaccuacaagggcguguacgagcugcagacccuggagcuggacauggccagccugaacaugaccaugccccugagcugcaccaagaacaacagccaccacuacaucauggugggcaacgagaccggccuggagcugacccugaccaacaccagcaucaucaaccacaaguucugcaaccugagcgacgcccacaagaagaaccuguacgaccacgcccugaugagcaucaucagcaccuuccaccugagcauccccaacuucaaccaguacgaggccaugagcugcgacuucaacggcggcaagaucagcgugcaguacaaccugagccacaccuacgccaucgacgccgccaaccacugcggcaccaucgccaacggcgugcugcagaccuucaugagaauggccuggggcggcagcuacaucgcccuggacagcggcugcggcagcugggacugcaucaugaccagcuaccaguaccugaucauccagaacaccaccugggaggaccacugccaguucagcagacccagccccaucggcuaccugggccugcugagccagagaaccagagacaucuacaucagcagaagacugcugggcaccuucaccuggacccugagcgacagcgagggcaacgagacccccggcggcuacugccugaccagauggaugcugaucgaggccgagcugaagugcuucggcaacaccgccguggccaagugcaacgagaagcacgacgaggaguucugcgacaugcugagacuguucgacuucaacaagcaggccaucagaagacugaagacccccgcccagaugagcauccagcugaucaacaaggccgugaacgcccugaucaacgaccagcugaucaugaagaaccaccugagagacaucaugugcauccccuacugcaacuacagcaaguacugguaccugaaccacaccgugaccggcaagaccagccugcccagaugcuggcuggugagcaacggcagcuaccugaacgagacccacuucagcgacgacaucgagcagcaggccgacaacaugaucaccgagcugcugcagaaggaguacauggacagacagggcaagaccccccugggccugguggaccuguucguguucagcaccagcuucuaccugaucagcaucuuccugcaccuggugagaauccccacccacagacacgugaucggcaagcccugccccaagccccacagacugaaccacaugggcaucugcagcugcggccuguacaagcaccccggcgugcccgugaaguggaagagaugaggacuagucccuguucccagagcccacuuuuuuuucuuuuuuugaaauaaaauagccugucuuucagaucuaaaaaaaaaaaaaaaaaaaaaaaaaaaaaaaaaaaaaaaaaaaaaaaaaaaaaaaaaaaaaaaaaaaaaaaaaaaaaaaaaaaaaaaaaaaaaaaaaaaa

SEQ ID NO: 28914 - RNA, 1740 nt, Artificial Sequence
  mRNA product Design a-2 (A100) comprising derived and/or modified sequence from LASV(Lassa virus/H.sapiens-wt/NGA/2018/ISTH_0959;Clade II)__AVV65099__GPCmut5 (opt4)
aggagaguccgcucagccagguugcagaagcggcuuagcguguguccuaaucuucucucugcguguagguaggccugugccgcaaacaagcuuaccaugggccagaucaucaccuucuuccaggaggugccccacgugaucgaggaggugaugaacaucgugcugaucgcccugagccugcuggccauccugaagggcaucuacaacguggugaccugcggccuguucggccuggugagcuuccugcugcugugcggcagaagcugcagcaccaccuacaagggcguguacgagcugcagacccuggagcuggacauggccagccugaacaugaccaugccccugagcugcaccaagaacaacagccaccacuacaucauggugggcaacgagaccggccuggagcugacccugaccaacaccagcaucaucaaccacaaguucugcaaccugagcgacgcccacaagaagaaccuguacgaccacgcccugaugagcaucaucagcaccuuccaccugagcauccccaacuucaaccaguacgaggccaugagcugcgacuucaacggcggcaagaucagcgugcaguacaaccugagccacgccuacgccaucgacgccgccaaccacugcggcaccaucgccaacggcgugcugcagaccuucaugagaauggccuggggcggcagcuacaucgcccuggacagcggcugcggcagcugggacugcaucaugaccagcuaccaguaccugaucauccagaacaccaccugggaggaccacugccaguucagcagacccagccccaucggcuaccugggccugcugagccagagaaccagagacaucuacaucagcagaagacugcugggcaccuucaccuggacccugagcgacagcgagggcaacgagacccccggcggcuacugccugaccagauggaugcugaucgaggccgagcugaagugcuucggcaacaccgccguggccaagugcaacgagaagcacgacgaggaguucugcgacaugcugagacuguucgacuucaacaagcaggccaucagaagacugaagacccccgcccagaugagcauccagcugaucaacaaggccgugaacgcccugaucaacgaccagcugaucaugaagaaccaccugagagacaucaugugcauccccuacugcaacuacagcaaguacugguaccugaaccacaccgugaccggcaagaccagccugcccagaugcuggcuggugagcaacggcagcuaccugaacgagacccacuucagcgacgacaucgagcagcaggccgacaacaugaucaccgagcugcugcagaaggaguacaucgacagacagggcaagaccccccugggccugguggaccuguucguguucagcaccagcuucuaccugaucagcaucuuccugcaccuggugaagauccccacccacagacacgugaucggcaagcccugccccaagccccacagacugaaccacaugggcaucugcagcugcggccuguacaagcaccccggcgugcccgugaaguggaagagaugaggacuagucccuguucccagagcccacuuuuuuuucuuuuuuugaaauaaaauagccugucuuucagaucuaaaaaaaaaaaaaaaaaaaaaaaaaaaaaaaaaaaaaaaaaaaaaaaaaaaaaaaaaaaaaaaaaaaaaaaaaaaaaaaaaaaaaaaaaaaaaaaaaaaa

SEQ ID NO: 28915 - RNA, 1740 nt, Artificial Sequence
  mRNA product Design a-2 (A100) comprising derived and/or modified sequence from LASV(LASV003-NIG-2008;Clade II)__AIT17580__GPCmut5 (opt4)
aggagaguccgcucagccagguugcagaagcggcuuagcguguguccuaaucuucucucugcguguagguaggccugugccgcaaacaagcuuaccaugggccagaucaucaccuucuuccaggaggugccccacgugaucgaggaggugaugaacaucgugcugaucgcccugagccugcuggccauccugaagggcaucuacaacguggccaccugcggccuguucggccuggugagcuuccugcugcugugcggcagaagcugcagcaccaccuacaagggcguguacgagcugcagacccuggagcuggacauggccagccugaacaugaccaugccccugagcugcaccaagaacaacagccaccacuacaucauggugggcaacgagaccggccuggagcugacccugaccaacaccagcaucaucaaccacaaguucugcaaccugagcgacgcccacaagaagaaccuguacgaccacgcccugaugagcaucaucagcaccuuccaccugagcauccccaacuucaaccaguacgaggccaugagcugcgacuucaacggcggcaagaucagcgugcaguacaaccugagccacaccuacgccguggacgccgccaaccacugcggcaccaucgccaacggcgugcugcagaccuucaugagaauggccuggggcggcagcuacaucgcccuggacagcggcugcggcagcugggacugcaucaugaccagcuaccaguaccugaucauccagaacaccaccugggaggaccacugccaguucagcagacccagccccaucggcuaccugggccugcugagccagagaaccagagacaucuacaucagcagaagacugcugggcaccuucaccuggacccugagcgacagcgagagcaacgagacccccggcggcuacugccugaccagauggaugcugaucgaggccgagcugaagugcuucggcaacaccgccguggccaagugcaacgagaagcacgacgaggaguucugcgacaugcugagacuguucgacuucaacaagcaggccaucagaagacugaaggcccccgcccagaugagcauccagcugaucaacaaggccgugaacgcccugaucaacgaccagcugaucaugaagaaccaccugagagacaucaugugcauccccuacugcaacuacagcaaguacugguaccugaaccacaccgugaccggcagaaccagccugcccagaugcuggcuggugagcaacggcagcuaccugaacgagacccacuucagcgacgacaucgagcagcaggccgacaacaugaucaccgagcugcugcagaaggaguacauggacagacagggcaagaccccccugggccugguggaccuguucguguucagcaccagcuucuaccugaucagcaucuuccugcaccuggugaagauccccacccacagacacgugaucggcaagcccugccccaagccccacagacugaaccacaugggcaucugcagcugcggccuguacaagcaccccggcgugcccgugaaguggaagagaugaggacuagucccuguucccagagcccacuuuuuuuucuuuuuuugaaauaaaauagccugucuuucagaucuaaaaaaaaaaaaaaaaaaaaaaaaaaaaaaaaaaaaaaaaaaaaaaaaaaaaaaaaaaaaaaaaaaaaaaaaaaaaaaaaaaaaaaaaaaaaaaaaaaaa

SEQ ID NO: 28916 - RNA, 1740 nt, Artificial Sequence
  mRNA product Design a-2 (A100) comprising derived and/or modified sequence from LASV(LASV035-NIG-2009;Clade II)__AIT17588__GPCmut5 (opt4)
aggagaguccgcucagccagguugcagaagcggcuuagcguguguccuaaucuucucucugcguguagguaggccugugccgcaaacaagcuuaccaugggccagaucaucaccuucuuccaggaggugccccacgugaucgaggaggugaugaacaucgugcugaucgcccugagccugcuggccauccugaagggcaucuacaacguggccaccugcggccuguucggccuggugagcuuccugcugcugugcggcagaagcugcagcaccaccuacaagggcguguacgagcugcagacccuggagcuggacauggccagccugaacaugaccaugccccugagcugcaccaagaacaacagccaccacuacaucauggugggcaacgagaccggccuggagcugacccugaccaacaccagcaucaucaaccacaaguucugcaaccugagcgacgcccacaagaagaaccuguacgaccacgcccugaugagcaucaucagcaccuuccaccugagcauccccaacuucaaccaguacgaggccaugagcugcgacuucaacggcggcaagaucagcgugcaguacaaccugagccacgccuacgccguggacgccgccaaccacugcggcaccaucgccaacggcgugcugcagaccuucaugagaauggccuggggcggcagcuacaucgcccuggacagcggcugcggcagcugggacugcaucaugaccagcuaccaguaccugaucauccagaacaccaccugggaggaccacugccaguucagcagacccagccccaucggcuaccugggccugcugagccagagaaccagagacaucuacaucagcagaagacugcugggcaccuucaccuggacccugagcgacagcgagggcaacgagacccccggcggcuacugccugaccagauggaugcugaucgaggccgagcugaagugcuucggcaacaccgccguggccaagugcaacgagaagcacgacgaggaguucugcgacaugcugagacuguucgacuucaacaagcaggccaucagaagacugaaggcccccgcccagaugagcauccagcugaucaacaaggccgugaacgcccugaucaacgaccagcugaucaugaagaaccaccugagagacaucaugugcauccccuacugcaacuacagcaaguacugguaccugaaccacaccgugaccggcaagaccagccugcccagaugcuggcuggugagcaacggcagcuaccugaacgagacccacuucagcgacgacaucgagcagcaggccgacaacaugaucaccgagcugcugcagaaggaguacaucgacagacagggcaagaccccccugggccugguggaccuguucguguucagcaccagcuucuaccugaucagcaucuuccugcaccuggugaagauccccacccacagacacgugaucggcaagcccugccccaagccccacagacugaaccacaugggcaucugcagcugcggccuguacaagcaccccggcgugcccgugaaguggaagagaugaggacuagucccuguucccagagcccacuuuuuuuucuuuuuuugaaauaaaauagccugucuuucagaucuaaaaaaaaaaaaaaaaaaaaaaaaaaaaaaaaaaaaaaaaaaaaaaaaaaaaaaaaaaaaaaaaaaaaaaaaaaaaaaaaaaaaaaaaaaaaaaaaaaaa

SEQ ID NO: 28917 - RNA, 1740 nt, Artificial Sequence
  mRNA product Design a-2 (A100) comprising derived and/or modified sequence from LASV(LASV1000-NIG-2009;Clade II)__AIT17782__GPCmut5 (opt4)
aggagaguccgcucagccagguugcagaagcggcuuagcguguguccuaaucuucucucugcguguagguaggccugugccgcaaacaagcuuaccaugggccagaucaucaccuucuuccaggaggugccccacgugaucgaggaggugaugaacaucgugcugaucgcccugagccugcuggccauccugaagggcaucuacaacguggccaccugcggccuguucggccuggugagcuuccugcugcugugcggcagaagcugcagcaccaccuacaagggcguguacgagcugcagacccuggagcuggacauggccagccugaacaugaccaugccccugagcugcaccaagaacaacagccaccacuacaucauggugggcaacgagaccggccuggagcugacccugaccaacaccagcaucaucaaccacaaguucugcaaccugagcgacgcccacaagaagaaccuguacgaccacgcccugaugagcaucaucagcaccuuccaccugagcauccccaacuucaaccaguacgaggccaugagcugcgacuucaacggcggcaagaucagcgugcaguacaaccugagccacaccuacgccguggacgccgccaaccacugcggcaccaucgccaacggcgugcugcagaccuucaugagaauggccuggggcggcagcuacaucgcccuggacagcggcugcggcagcugggacugcaucaugaccagcuaccaguaccugaucauccagaacaccaccugggaggaccacugccaguucagcagacccagccccaucggcuaccugggccugcugagccagagaaccagagacaucuacaucagcagaagacugcugggcaccuucaccuggacccugagcgacagcgagggcaacgagacccccggcggcuacugccugaccagauggaugcugaucgaggccgagcugaagugcuucggcaacaccgccguggccaagugcaacgagaagcacgacgaggaguucugcgacaugcugagacuguucgacuucaacaagcaggccaucaagagacugaagacccccgcccagaugagcauccagcugaucaacaaggccgugaacgcccugaucaacgaccagcugaucaugaagaaccaccugagagacaucaugugcauccccuacugcaacuacagcaaguacugguaccugaaccacaccgugaccggcaagaccagccugcccagaugcuggcuggugagcaacggcagcuaccugaacgagacccacuucagcgacgacaucgagcagcaggccgacaacaugaucaccgagcugcugcagaaggaguacaucgacagacagggcaagaccccccugggccugguggaccuguucguguucagcaccagcuucuaccugaucagcaucuuccugcaccuggugaagauccccacccacagacacguggugggcaagcccugccccaagccccacagacugaaccacaugggcaucugcagcugcggccuguacaagcaccccggcgugcccgugaaguggaagagaugaggacuagucccuguucccagagcccacuuuuuuuucuuuuuuugaaauaaaauagccugucuuucagaucuaaaaaaaaaaaaaaaaaaaaaaaaaaaaaaaaaaaaaaaaaaaaaaaaaaaaaaaaaaaaaaaaaaaaaaaaaaaaaaaaaaaaaaaaaaaaaaaaaaaa

SEQ ID NO: 28918 - RNA, 1740 nt, Artificial Sequence
  mRNA product Design a-2 (A100) comprising derived and/or modified sequence from LASV(LASV221-NIG-2010;Clade II)__AIT17624__GPCmut5 (opt4)
aggagaguccgcucagccagguugcagaagcggcuuagcguguguccuaaucuucucucugcguguagguaggccugugccgcaaacaagcuuaccaugggccagaucaucaccuucuuccaggaggugccccacgugaucgaggaggugaugaacaucgugcugaucgcccugagccugcuggccauccugaagggcaucuacaacguggccaccugcggccuguucggccuggugagcuuccugcugcugugcggcagaagcugcagcaccaccuacaagggcguguacgagcugcagacccuggagcuggacauggccagccugaacaugaccaugccccugagcugcaccaagaacaacagccaccacuacaucauggugggcaacgagaccggccuggagcugacccugaccaacaccagcaucaucaaccacaaguucugcaaccugagcgacgcccacaagaagaaccuguacgaccacgcccugaugagcaucaucagcaccuuccaccugagcauccccaacuucaaccaguacgaggccaugagcugcgacuucaacggcggcaagaucagcgugcaguacaaccugagccacaccuacgccaucgacgccgccaaccacugcggcaccaucgccaacggcgugcugcagaccuucaugagaauggccuggggcggcagcuacaucgcccuggacagcggcugcggcagcugggacugcaucaugaccagcuaccaguaccugaucauccagaacaccaccugggaggaccacugccaguucagcagacccagccccaucggcuaccugggccugcugagccagagaaccagagacaucuacaucagcagaagacugcugggcaccuucaccuggacccugagcgacagcgagggcaacgagacccccggcggcuacugccugaccagauggaugcugaucgaggccgagcugaagugcuucggcaacaccgccguggccaagugcaacgagaagcacgacgaggaguucugcgacaugcugagacuguucgacuucaacaagcaggccaucagaagacugaagacccccgcccagaugagcauccagcugaucaacaaggccgugaacgcccugaucaacgaccagcugaucaugaagaaccaccugagagacaucaugugcauccccuacugcaacuacagcaaguacugguaccugaaccacaccgugaccggcaagaccagccugcccagaugcuggcuggugagcaacggcagcuaccugaacgagacccacuucagcgacgacaucgagcagcaggccgacaacaugaucaccgagaugcugcagaaggaguacauggacagacagggcaagaccccccugggccugguggaccuguucguguucagcaccagcuucuaccugaucagcaucuuccugcaccuggugaagauccccacccacagacacgugaucggcaagcccugccccaagccccacagacugaaccacaugggcaucugcagcugcggccuguacaagcaccccggcgugcccgugaaguggaagagaugaggacuagucccuguucccagagcccacuuuuuuuucuuuuuuugaaauaaaauagccugucuuucagaucuaaaaaaaaaaaaaaaaaaaaaaaaaaaaaaaaaaaaaaaaaaaaaaaaaaaaaaaaaaaaaaaaaaaaaaaaaaaaaaaaaaaaaaaaaaaaaaaaaaaa

SEQ ID NO: 28919 - RNA, 1740 nt, Artificial Sequence
  mRNA product Design a-2 (A100) comprising derived and/or modified sequence from LASV(LASV237-NIG-2010;Clade II)__AIT17638__GPCmut5 (opt4)
aggagaguccgcucagccagguugcagaagcggcuuagcguguguccuaaucuucucucugcguguagguaggccugugccgcaaacaagcuuaccaugggccagaucaucaccuucuuccaggaggugccccacgugaucgaggaggugaugaacaucgugcugaucgcccugagccugcuggccauccugaagggcaucuacaacguggccaccugcggccuguucggccuggugagcuuccugcugcugugcggcagaagcugcagcaccaccuacaagggcguguacgagcugcagacccuggagcuggacauggccagccugaacaugaccaugccccugagcugcaccaagaacaacagccaccacuacaucauggugggcaacgagaccggccuggagcugacccugaccaacaccagcaucaucaaccacaaguucugcaaccugagcgacgcccacaagaaggaccuguacgaccacgcccugaugagcaucaucagcaccuuccaccugagcauccccaacuucaaccaguacgaggccaugagcugcgacuucaacggcggcaagaucagcgugcaguacaaccugagccacaccuacgccguggacgccgccaaccacugcggcaccaucgccaacggcgugcugcagaccuucaugagaauggccuggggcggcagcuacaucgcccuggacagcggcugcggcagcugggacugcaucaugaccagcuaccaguaccugaucauccagaacaccaccugggaggaccacugccaguucagcagacccagccccaucggcuaccugggccugcugagccagagaaccagagacaucuacaucagcagaagacugcugggcaccuucaccuggacccugagcgacagcgagggcaacgagacccccggcggcuacugccugaccagauggaugcugaucgaggccgagcugaagugcuucggcaacaccgccguggccaagugcaacgagaagcacgacgaggaguucugcgacaugcugagacuguucgacuucaacaagcaggccaucagaagacugaagacccccgcccagaugagcauccagcugaucaacaaggccgugaacgcccugaucaacgaccagcugaucaugaagaaccaccugagagacaucaugugcauccccuacugcaacuacagcaaguacugguaccugaaccacaccgugaccggcaagaccagccugcccagaugcuggcuggugagcaacggcagcuaccugaacgagacccacuucagcgacgacaucgagcagcaggccgacaacaugaucaccgagcugcugcagaaggaguacauggacagacagggcaagaccccccugggccugguggaccuguucguguucagcaccagcuucuaccugaucagcaucuuccugcaccugaucaagauccccacccacagacacaucaccggcaagcccugccccaagccccacagacugaaccacaugggcaucugcagcugcggccuguacaagcaccccggcgugcccgugaaguggaagagaugaggacuagucccuguucccagagcccacuuuuuuuucuuuuuuugaaauaaaauagccugucuuucagaucuaaaaaaaaaaaaaaaaaaaaaaaaaaaaaaaaaaaaaaaaaaaaaaaaaaaaaaaaaaaaaaaaaaaaaaaaaaaaaaaaaaaaaaaaaaaaaaaaaaaa

SEQ ID NO: 28920 - RNA, 1740 nt, Artificial Sequence
  mRNA product Design a-2 (A100) comprising derived and/or modified sequence from LASV(LASV253-NIG-2011;Clade II)__AIT17670__GPCmut5 (opt4)
aggagaguccgcucagccagguugcagaagcggcuuagcguguguccuaaucuucucucugcguguagguaggccugugccgcaaacaagcuuaccaugggccagaucaucaccuucuuccaggaggugccccacgugaucgaggaggugaugaacaucgugcugaucgcccugagccugcuggccauccugaagggcaucuacaacguggccaccugcggccuguucggccuggugagcuuccugcugcugugcggcagaagcugcagcaccaccuacaagggcguguacgagcugcagacccuggagcuggacauggccagccugaacaugaccaugccccugagcugcaccaagaacaacagccaccacuacaucauggugggcaacgagaccggccuggagcugacccugaccaacaccagcaucaucaaccacaaguucugcaaccugagcgacgcccacaagaagaaccuguacgaccacgcccugaugagcaucaucagcaccuuccaccugagcauccccaacuucaaccaguacgaggccaugagcugcgacuucaacggcggcaagaucagcgugcaguacaaccugagccacaccuacgccguggacgccgccaaccacugcggcaccaucgccaacggcgugcugcagaccuucaugagaauggccuggggcggcagcuacaucgcccuggacagcggcugcggcagcugggacugcaucaugaccagcuaccaguaccugaucauccagaacaccaccugggaggaccacugccaguucagcagacccagccccaucggcuaccugggccugcugagccagagaaccagagacaucuacaucagcagaagacugcugggcaccuucaccuggacccugagcgacagcgagggcaacgagacccccggcggcuacugccugaccagauggaugcugaucgaggccgagcugaagugcuucggcaacaccgccguggccaagugcaacgagaagcacgacgaggaguucugcgacaugcugagacuguucgacuucaacaagcaggccaucagaagacugaaggcccccgcccagaugagcauccagcugaucaacaaggccgugaacgcccugaucaacgaccagcugaucaugaagaaccaccugagagacaucaugugcauccccuacugcaacuacagcaaguacugguaccugaaccacaccgugaccggcagaaccagccugcccagaugcuggcuggugagcaacggcagcuaccugaacgagacccacuucagcgacgacaucgagcagcaggccgacaacaugaucaccgagcugcugcagaaggaguacaucgacagacagggcaagaccccccugggccugguggaccuguucguguucagcaccagcuucuaccugaucagcaucuuccugcaccuggugaagauccccacccacagacacaucaucggcaagcccugccccaagccccacagacugaaccacaugggcaucugcagcugcggccuguacaagcaccccggcgugcccgugaaguggaagagaugaggacuagucccuguucccagagcccacuuuuuuuucuuuuuuugaaauaaaauagccugucuuucagaucuaaaaaaaaaaaaaaaaaaaaaaaaaaaaaaaaaaaaaaaaaaaaaaaaaaaaaaaaaaaaaaaaaaaaaaaaaaaaaaaaaaaaaaaaaaaaaaaaaaaa

SEQ ID NO: 28921 - RNA, 1740 nt, Artificial Sequence
  mRNA product Design a-2 (A100) comprising derived and/or modified sequence from LASV(LASV254-NIG-2011;Clade II)__AIT17674__GPCmut5 (opt4)
aggagaguccgcucagccagguugcagaagcggcuuagcguguguccuaaucuucucucugcguguagguaggccugugccgcaaacaagcuuaccaugggccagaucaucaccuucuuccaggaggugccccacgugaucgaggaggugaugaacaucgugcugaucgcccugagccugcuggccauccugaagggcaucuacaacguggccaccugcggccuguucggccuggugagcuuccugcugcugugcggcagaagcugcagcaccaccuacaagggcguguacgagcugcagacccuggagcuggacaugaccaaccugaacaugaccaugccccugagcugcaccaagaacaacagccaccacuacaucauggugggcaacgagaccggccuggagcugacccugaccaacaccagcaucaucaaccacaaguucugcaaccugagcgacgcccacaagaagaaccuguacaaccacgcccugaugagcaucaucagcaccuuccaccugagcauccccaacuucaaccaguacgaggccaugagcugcgacuucaacggcggcaagaucagcgugcaguacaaccugagccacagcuacgccguggacgccgccaaccacugcggcaccaucgccaacggcgugcugcagaccuucaugagaauggccuggggcggcagcuacaucgcccuggacagcggcugcggcaacugggacugcaucaugaccagcuaccaguaccugaucauccagaacaccaccugggaggaccacugccaguucagcagacccagccccaucggcuaccugggccugcugagccagagaaccagagacaucuacaucagcagaagacugcugggcaccuucaccuggacccugagcgacagcgagggcaacgagacccccggcggcuacugccugaccagauggaugcugaucgaggccgagcugaagugcuucggcaacaccgccguggccaagugcaacgagaagcacgacgaggaguucugcgacaugcugagacuguucgacuucaacaagcaggccaucagaagacugaagacccccgcccaggccaacauccagcugaucaacaaggccgugaacgcccugaucaacgaccagcugaucaugaagaaccaccugagagacaucaugugcauccccuacugcaacuacagcaaguacugguaccugaaccacaccgugaccggcaagaccagccugcccagaugcuggcuggugagcaacggcagcuaccugaacgagacccacuucagcgacgacaucgagcagcaggccgacaacaugaucaccgagcugcugcagaaggaguacauggacagacagggcaagaccccccugggccugguggaccuguucguguucagcaccagcuucuaccugaucagcaucuuccugcaccuggugaagauccccacccacagacacgugaucggcaagcccugccccaagccccacagacugaaccacaugggcaucugcagcugcggccuguacaagcaccccggcgugcccgugaaguggaagagaugaggacuagucccuguucccagagcccacuuuuuuuucuuuuuuugaaauaaaauagccugucuuucagaucuaaaaaaaaaaaaaaaaaaaaaaaaaaaaaaaaaaaaaaaaaaaaaaaaaaaaaaaaaaaaaaaaaaaaaaaaaaaaaaaaaaaaaaaaaaaaaaaaaaaa

SEQ ID NO: 28922 - RNA, 1740 nt, Artificial Sequence
  mRNA product Design a-2 (A100) comprising derived and/or modified sequence from LASV(Nig08-A19;Clade III)__ADU56618__GPCmut5 (opt4)
aggagaguccgcucagccagguugcagaagcggcuuagcguguguccuaaucuucucucugcguguagguaggccugugccgcaaacaagcuuaccaugggccagaucgugaccuucuuccaggaggugccccacgugaucgaggaggugaugaacaucgugcugaucgcccugagcauccuggccauccugaagggccuguacaacaucgccaccugcggccugaucggccuggugaccuuccugcugcugagcggcagaagcugcagcaugaccuacaagggcguguacgagcugcagacccuggagcugaacaugaacacccugaacaugaccaugccccugagcugcaccaagaacaacagccaccacuacaucauggugggcaacgagaccggccuggagcugacccugaccaacaccagccugcugcaccacaaguucugcaaccugagcgacgcccacaagaagaaccuguacgaccacacccugaugagcaucaucagcaccuuccaccugagcauccccaacuucaaccaguacgaggccaugagcugcgacuucaacggcggcaagaucaccgugcaguacaaccugagccacagcuacgccaucgacgccgccaaccacugcggcaccguggccaacggcgugcugcagaccuucaugagaauggccuggggcggcagcuacaucgcccuggacagcggcugcggcaagugggacugcaucaugaccagcuaccaguaccugaucauccagaacaccaccugggaggaccacugccaguucagcagacccagccccaucggcuaccugggccugcugagccagagaaccagagacaucuacaucagcagaagacugcugggcaccuucaccuggacccugagcgacagcgagggcaacgagacccccggcggcuacugccugaccagauggaugcugaucgaggccgagcugaagugcuucggcaacaccgccguggccaagugcaacgagaagcacgacgaggaguucugcgacaugcugagacuguucgacuucaacaagcaggccaucagaagacugaaggcccccgcccagaugagcauccagcugaucaacaaggccgugaacgcccugaucaacgaccagcugaucaugaagaaccaccugagagacaucaugugcauccccuacugcaacuacagcaaguacugguaccugaaccacaccagcaccggcagaaccagccugcccagaugcuggcuggugagcaacggcagcuaccugaacgagacccacuucagcgacgacaucgagcagcaggccgacaacaugaucaccgagaugcugcagaaggaguaccuggacagacagggcaagaccccccugggccugguggaccuguucguguucagcaccagcuucuaccugaucagcaucuuccugcaccuggugaagauccccacccacagacacaucgugggcaagcccugccccaagccccacagacugaaccacaugggcaucugcagcugcggccuguacaagcagcccggcgugcccgugagauggaagagaugaggacuagucccuguucccagagcccacuuuuuuuucuuuuuuugaaauaaaauagccugucuuucagaucuaaaaaaaaaaaaaaaaaaaaaaaaaaaaaaaaaaaaaaaaaaaaaaaaaaaaaaaaaaaaaaaaaaaaaaaaaaaaaaaaaaaaaaaaaaaaaaaaaaaa

SEQ ID NO: 28923 - RNA, 1743 nt, Artificial Sequence
  mRNA product Design a-2 (A100) comprising derived and/or modified sequence from LASV(G1180-SLE-2010;Clade IV)__AIT17168__GPCmut5 (opt4)
aggagaguccgcucagccagguugcagaagcggcuuagcguguguccuaaucuucucucugcguguagguaggccugugccgcaaacaagcuuaccaugggccagaucgugaccuucuuccaggaggugccccacgugaucgaggaggugaugaacaucgugcugaucgcccugagcauccuggccgugcugaagggccuguacaacuucgccaccugcggccuggugggccugcugaccuuccugcugcugugcggcagaagcugcaccgccagcagauacaagggcguguacgagcugcagacccuggagcugaacauggagacccugaacaugaccaugccccugagcugcaccaagaacaacagccaccacuacaucauggugggcaacgagaccggccuggagcugacccugaccaacaccagcaucaucaaccacaaguucugcaaccugagcgacgcccacaagaagaaccuguacgaccacgcccugaugagcaucaucagcaccuuccaccugagcauccccaacuucaaccaguacgaggccaugagcugcgacuucaacggcggcaagaucagcgugcaguacaaccugagccacagcuacgccggcgacgccgccaaccacugcggcaccguggccaacggcgugcugcagaccuucaugagaauggccuggggcggcagcuacaucgcccuggacagcggcugcggcagcugggacugcaucaugaccagcuaccaguaccugaucauccagaacaccaccugggaggaccacugccaguucagcagacccagccccaucggcuaccugggccugcugagccagagaaccagagacaucuacaucagcagaagacugcugggcaccuucaccuggacccugagcgacagcgagggcaaggacacccccggcggcuacugccugaccagauggaugcugaucgaggccgagcugaagugcuucggcaacaccgccguggccaagugcaacgagaagcacgacgaggaguucugcgacaugcugagacuguucgacuucaacaagcaggccauccagagacugaaggcccccgcccagaugagcauccagcugaucaacaaggccgugaacgcccugaucaacgaccagcugaucaugaagaaccaccugagagacaucaugugcauccccuacugcaacuacagcaaguacugguaccugaaccacaccaccaccggcaagaccagccugcccaagugcuggcuggugagcaacggcagcuaccugaacgagacccacuucagcgacgacaucgagcagcaggccgacaacaugaucaccgagaugcugcagaaggaguacauggagagacagggcaagaccccccugggccugguggaccuguucguguucagcaccagcuucuaccugaucagcaucuuccugcaccuggugaagauccccacccacagacacaucgugggcaagagcugccccaagccccacagacugaaccacaugggcaucugcagcugcggccuguacaagcagcccggcgugcccgugaaguggaagagaugaggacuagucccuguucccagagcccacuuuuuuuucuuuuuuugaaauaaaauagccugucuuucagaucuaaaaaaaaaaaaaaaaaaaaaaaaaaaaaaaaaaaaaaaaaaaaaaaaaaaaaaaaaaaaaaaaaaaaaaaaaaaaaaaaaaaaaaaaaaaaaaaaaaaa

SEQ ID NO: 28924 - RNA, 1743 nt, Artificial Sequence
  mRNA product Design a-2 (A100) comprising derived and/or modified sequence from LASV(G1442-SLE-2011;Clade IV)__AIT17180__GPCmut5 (opt4)
aggagaguccgcucagccagguugcagaagcggcuuagcguguguccuaaucuucucucugcguguagguaggccugugccgcaaacaagcuuaccaugggccagaucgugaccuucuuccaggaggugccccacgugaucgaggaggugaugaacaucgugcugaucgcccugagcauccuggccgugcugaagggccuguacaacguggccaccugcggccugaucggccuggugaccuuccugcugcugugcggcagaagcugcaccaccacccuguacaagggcguguacgagcugcagacccuggagcugaacauggagacccugaacaugaccaugccccugagcugcaccaagaacaacagccaccacuacaucagagugggcaacgagaccggccuggagcugacccugaccaacaccagcaucaucaaccacaaguucugcaaccugagcgacgcccacaagaagaaccuguacgaccacgcccugaugagcaucaucagcaccuuccaccugagcauccccaacuucaaccaguacgaggccaugagcugcgacuucaacggcggcaagaucagcgugcaguacaaccugagccacagcuacgccggcgacgccgccaaccacugcggcaccguggccaacggcgugcugcagaccuucaugagaauggccuggggcggcagcuacaucgcccuggacagcggcugcggcaacugggacugcaucaugaccagcuaccaguaccugaucauccagaacaccaccugggacgaccacugccaguucagcagacccagccccaucggcuaccugggccugcugagccagagaaccagagacguguacaucagcagaagacugcugggcaccuucaccuggacccugagcgacagcgagggcaaggacacccccggcggcuacugccugaccagauggaugcugaucgaggccgagcugaagugcuucggcaacaccgccguggccaagugcaacgagaagcacgacgaggaguucugcgacaugcugagacuguucgacuucaacaagcaggccauccagagacugaaggcccccgcccagaugagcauccagcugaucaacaaggccgugaacgcccugaucaacgaccagcugaucaugaagaaccaccugagagacaucaugugcauccccuacugcaacuacagcaaguacugguaccugaacaacaccgccaccggcaagaccagccugcccaagugcuggcugaucagcaacggcagcuaccugaacgagacccacuucagcgacgacaucgagcaggaggccgacaacaugaucaccgagaugcugcagaaggaguacauggagagacagggcaagaccccccugggccugguggaccuguucguguucagcaccagcuucuaccugaucagcaucuuccugcaccuggugaagauccccacccacagacacaucgugggcaagagcugccccaagccccacagacugaaccacaugggcaucugcagcugcggccuguacaagcagcccggcgugcccgugagauggaagagaugaggacuagucccuguucccagagcccacuuuuuuuucuuuuuuugaaauaaaauagccugucuuucagaucuaaaaaaaaaaaaaaaaaaaaaaaaaaaaaaaaaaaaaaaaaaaaaaaaaaaaaaaaaaaaaaaaaaaaaaaaaaaaaaaaaaaaaaaaaaaaaaaaaaaa

SEQ ID NO: 28925 - RNA, 1743 nt, Artificial Sequence
  mRNA product Design a-2 (A100) comprising derived and/or modified sequence from LASV(G3010-SLE-2013;Clade IV)__AIT17344__GPCmut5 (opt4)
aggagaguccgcucagccagguugcagaagcggcuuagcguguguccuaaucuucucucugcguguagguaggccugugccgcaaacaagcuuaccaugggccagaucgugaccuucuuccaggaggugccccacgugaucgaggaggugaugaacaucgugcugaucgcccugagcauccuggccgugcugaagggccuguacaacuucgccaccugcggccuggugggccuggugaccuuccugcugcugugcggcagaagcugcaccaccagccuguacaagggcguguacgagcugcagacccuggagcugaacauggagacccugaacaugaccaugccccugagcugcaccaagaacaacagccaccacuacaucauggugggcaacgagaccggccuggagcugacccugaccaacaccagcaucaucaaccacaaguucugcaaccugagcgacgcccacaagaagaaccuguacaaccacgcccugaugagcaucaucagcaccuuccaccugagcauccccaacuucaaccaguacgaggccaugagcugcgacuucaacggcggcaagaucagcgugcaguacaaccugagccacagcuacgccggcgacgccgccagccacugcggcaccguggccaacggcgugcugcagaccuucaugagaauggccuggggcggcagcuacaucgcccuggacagcggcugcggcaagugggacugcaucaugaccagcuaccaguaccugaucauccagaacaccaccugggaggaccacugccaguucagcagacccagccccaucggcuaccugggccugcugagccagagaaccagagacaucuacaucagcagaagacugcugggcaccuucaccuggacccugagcgacagcgagggcaaggacacccccggcggcuacugccugaccagauggaugcugaucgaggccgagcugaagugcuucggcaacaccgccguggccaagugcaacgagaagcacgacgaggaguucugcgacaugcugagacuguucgacuucaacaagcaggccauccagagacugaagacccccgcccagaugagcauccagcugaucaacaaggccgugaacgcccugaucaacgaccagcugaucaugaagaaccaccugagagacaucaugugcauccccuacugcaacuacagcaaguacugguaccugaaccacaccaccaccggcaagaccagccugcccaagugcuggcuggugagcaacggcagcuaccugaacgagacccacuucagcgacgacaucgagcagcaggccgacaacaugaucaccgagaugcugcagaaggaguacauggagagacagggcaagaccccccugggccugguggaccuguucguguucagcaccagcuucuaccugaucagcaucuuccugcaccuggugaagauccccacccacagacacaucgugggcaagagcugccccaagccccacagacugaaccacaugggcaucugcagcugcggccuguacaagcagcccggcgugcccgugagauggaagagaugaggacuagucccuguucccagagcccacuuuuuuuucuuuuuuugaaauaaaauagccugucuuucagaucuaaaaaaaaaaaaaaaaaaaaaaaaaaaaaaaaaaaaaaaaaaaaaaaaaaaaaaaaaaaaaaaaaaaaaaaaaaaaaaaaaaaaaaaaaaaaaaaaaaaa

SEQ ID NO: 28926 - RNA, 1743 nt, Artificial Sequence
  mRNA product Design a-2 (A100) comprising derived and/or modified sequence from LASV(G502-SLE-2009;Clade IV)__AIT17126__GPCmut5 (opt4)
aggagaguccgcucagccagguugcagaagcggcuuagcguguguccuaaucuucucucugcguguagguaggccugugccgcaaacaagcuuaccaugggccagaucgugaccuucuuccaggaggugccccacgugaucgaggaggugaugaacaucgugcugaucgcccugagcauccuggccgugcugaagggccuguacaacuucgccaccugcggccuggugggccugcugaccuuccugcugcugugcggcagaagcugcaccaccggccuguacaagggcguguacgagcugcagacccuggagcugaacauggagacccugaacaugaccaugccccugagcugcaccaagaacaacagccaccacuacaucauggugggcaacgagaccggccuggagcugacccugaccaacaccagcaucaucaaccacaaguucugcaaccugagcgacgcccacaagaagaaccuguacgaccacgcccugaugagcaucaucagcaccuuccaccugagcauccccaacuucaaccaguacgaggccaugagcugcgacuucaacggcggcaagaucagcgugcaguacaaccugagccacagcuacgccggcgacgccgccgaccacugcggcaccguggccaacggcgugcugcagaccuucaugagaauggccuggggcggcagcuacaucgcccuggacagcggcugcggcagaugggacugcaucaugaccagcuaccaguaccugaucauccagaacaccaccugggaggaccacugccaguucagcagacccagccccaucggcuaccugggccugcugagccagagaaccagagacaucuacaucagcagaagacugcugggcaccuucaccuggacccugagcgacagcgagggcaaggacacccccggcggcuacugccugaccagauggaugcugaucgaggccgagcugaagugcuucggcaacaccgccguggccaagugcaacgagaagcacgacgaggaguucugcgacaugcugagacuguucgacuucaacaagcaggccauccagagacugaaggcccccgcccagaugagcauccagcugaucaacaaggccgugaacgcccugaucaacgaccagcuggugaugaagaaccaccugagagacaucaugugcauccccuacugcaacuacagcagauacugguaccugaaccacaccaccaccggcagaaccagccugcccaagugcuggcuggugagcaacggcagcuaccugaacgagacccacuucagcgacgacaucgagcagcaggccgacaacaugaucaccgagaugcugcagaaggaguacauggagagacagggcaagaccccccugggccugguggaccuguucguguucagcaccagcuucuaccugaucagcaucuuccugcaccuggugaagauccccacccacagacacaucgugggcaagagcugccccaagccccacagacugaaccacaugggcaucugcagcugcggccuguacaagcagcccggcgugcccgugaaguggaagagaugaggacuagucccuguucccagagcccacuuuuuuuucuuuuuuugaaauaaaauagccugucuuucagaucuaaaaaaaaaaaaaaaaaaaaaaaaaaaaaaaaaaaaaaaaaaaaaaaaaaaaaaaaaaaaaaaaaaaaaaaaaaaaaaaaaaaaaaaaaaaaaaaaaaaa

SEQ ID NO: 28927 - RNA, 1743 nt, Artificial Sequence
  mRNA product Design a-2 (A100) comprising derived and/or modified sequence from LASV(G733-SLE-2010;Clade IV)__AIT17154__GPCmut5 (opt4)
aggagaguccgcucagccagguugcagaagcggcuuagcguguguccuaaucuucucucugcguguagguaggccugugccgcaaacaagcuuaccaugggccagaucgugaccuucuuccaggaggugccccacgugaucgaggaggugaugaacaucgugcugaucgcccugagcauccuggccgugcugaagggccuguacaacuucgccaccugcggcaucgugggccuggugagcuuccugcugcugugcggcagaagcugcaccaccagccuguacaagggcguguacgagcugcagacccuggagcugaacauggagacccugaacaugaccaugccccugagcugcaccaagaacaacagccaccacuacaucauggugggcaacgagaccggccuggagcugacccugaccaacaccagcaucaucaaccacaaguucugcaaccugagcgacgcccacaagaagaaccuguacgaccacgcccugaugagcaucaucagcaccuuccaccugagcauccccaacuucaaccaguacgaggccaugagcugcgacuucaacggcggcaagaucagcgugcaguacaaccugagccacagcuacgccggcgacgccgccaaccacugcggcaccaucgccaacggcgugcugcagaccuucaugagaauggccuggggcggcagcuacaucgcccuggacagcggcugcgacagaugggacugcaucaugaccagcuaccaguaccugaucauccagaacaccaccugggaggaccacugccaguucagcagacccagccccaucggcuaccugggccugcugagccagagaaccagagacaucuacaucagcagaagacugcugggcaccuucaccuggacccugagcgacagcgagggcaaggacacccccggcggcuacugccugaccagauggaugcugaucgaggccgagcugaagugcuucggcaacaccgccguggccaagugcaacgagaagcacgacgaggaguucugcgacaugcugagacuguucgacuucaacaagcaggccauccagagacugaaggcccccgcccagaugagcauccagcugaucaacaaggccgugaacgcccugaucaacgaccagcugaucaugaagaaccaccugagagacaucaugugcauccccuacugcaacuacagcaaguacugguaccugaaccacaccaccaccggcaagaccagccugcccaagugcuggcuggugagcaacggcagcuaccugaacgagacccacuucagcgacgacaucgagcagcaggccgacaacaugaucaccgagaugcugcagaaggaguacauggagagacagggcaagaccccccugggccugguggaccuguucguguucagcaccagcuucuaccugaucagcaucuuccugcaccuggugaagauccccacccacagacacguggugggcaagagcugccccaagccccacagacugaaccacaugggcaucugcagcugcggccuguacggccagcccggcgugcccgugaaguggaagagaugaggacuagucccuguucccagagcccacuuuuuuuucuuuuuuugaaauaaaauagccugucuuucagaucuaaaaaaaaaaaaaaaaaaaaaaaaaaaaaaaaaaaaaaaaaaaaaaaaaaaaaaaaaaaaaaaaaaaaaaaaaaaaaaaaaaaaaaaaaaaaaaaaaaaa

SEQ ID NO: 28928 - RNA, 1743 nt, Artificial Sequence
  mRNA product Design a-2 (A100) comprising derived and/or modified sequence from MOPV/LASV reassortant(IGS-1;Clade IV)__AFY05576__GPCmut5 (opt4)
aggagaguccgcucagccagguugcagaagcggcuuagcguguguccuaaucuucucucugcguguagguaggccugugccgcaaacaagcuuaccaugggccagaucgugaccuucuuccaggaggugccccacgugaucgaggaggugaugaacaucgugcugaucgcccugagcgugcuggccgugcugaagggccuguacaacuucgccaccugcggccuggugggccuggugaccuuccugcugcugugcggcagaagcugcaccaccagccuguacaagggcguguacgagcugcagacccuggagcugaacauggagacccugaacaugaccaugccccugagcugcaccaagaacaacagccaccacuacaucauggugggcaacgagaccggccuggagcugacccugaccaacaccagcaucaucaaccacaaguucugcaaccugagcgacgcccacaagaagaaccuguacgaccacgcccugaugagcaucaucagcaccuuccaccugagcauccccaacuucaaccaguacgaggccaugagcugcgacuucaacggcggcaagaucagcgugcaguacaaccugagccacagcuacgccggcgacgccgccaaccacugcggcaccguggccaacggcgugcugcagaccuucaugagaauggccuggggcggcagcuacaucgcccuggacagcggcugcggcaacugggacugcaucaugaccagcuaccaguaccugaucauccagaacaccaccugggaggaccacugccaguucagcagacccagccccaucggcuaccugggccugcugagccagagaaccagagacaucuacaucagcagaagacugcugggcaccuucaccuggacccugagcgacagcgagggcgaggacacccccggcggcuacugccugaccagauggaugcugaucgaggccgagcugaagugcuucggcaacaccgccguggccaagugcaacgagaagcacgacgaggaguucugcgacaugcugagacuguucgacuucaacaagcaggccauccagagacugaaggcccccgcccagaugagcauccagcugaucaacaaggccgugaacgcccugaucaacgaccagcugaucaugaagaaccaccugagagacaucaugugcauccccuacugcaacuacagcaaguacugguaccugaaccacaccaccaccggcagaaccagccugcccaagugcuggcuggugagcaacggcagcuaccugaacgagacccacuucagcgacgacaucgagcagcaggccgacaacaugaucaccgagaugcugcagaaggaguacauggagagacagggcaagaccccccugggccugguggaccuguucguguucagcaccagcuucuaccugaucagcaucuuccugcaccuggugaagauccccacccacagacacaucgugggcaagagcugccccaagccccacagacugaaccacaugggcaucugcagcugcggccuguacaagcagcccggcgugcccgugaaguggaagagaugaggacuagucccuguucccagagcccacuuuuuuuucuuuuuuugaaauaaaauagccugucuuucagaucuaaaaaaaaaaaaaaaaaaaaaaaaaaaaaaaaaaaaaaaaaaaaaaaaaaaaaaaaaaaaaaaaaaaaaaaaaaaaaaaaaaaaaaaaaaaaaaaaaaaa

SEQ ID NO: 28929 - RNA, 1743 nt, Artificial Sequence
  mRNA product Design a-2 (A100) comprising derived and/or modified sequence from LASV(LM765-SLE-2012;Clade IV)__AIT17814__GPCmut5 (opt4)
aggagaguccgcucagccagguugcagaagcggcuuagcguguguccuaaucuucucucugcguguagguaggccugugccgcaaacaagcuuaccaugggccagaucgugaccuucuuccaggaggugccccacgugaucgaggaggugaugaacaucgugcugaucgcccugagcauccuggccgugcugaagggccuguacaacuucgccaccugcggccuggugggccuggugaccuuccugcugcugugcggcagaagcugcaccaccagccuguacaagggcguguacgagcugcagacccuggagcugaacauggagacccugaacaugaccaugccccugagcugcaccaagaacaacagccaccacuacaucauggugggcaacgagaccggccuggagcugacccugaccaacaccagcaucaucgaccacaaguucugcaaccugagcgacgcccacagaaagaaccuguacgaccacgcccugaugagcaucaucagcaccuuccaccugagcauccccaacuucaaccaguacgaggccaugagcugcgacuucaacggcggcaagaucagcgugcaguacaaccugagccacagcuacgccaaggacgccgccgaccacugcggcaccguggccaacggcgugcugcagaccuucaugagaauggccuggggcggcagcuacaucgcccuggacagcggcugcggcagaugggacugcaucaugaccagcuaccaguaccugaucauccagaacaccaccugggaggaccacugccaguucagcagacccagccccaucggcuaccugggccugcugagccagagaaccagagacaucuacaucagcagaagacugcugggcaccuucaccuggacccugagcgacagcgagggcaaggacacccccggcggcuacugccugaccagauggaugcugaucgaggccgagcugaagugcuucggcaacaccgccguggccaagugcaacgagaagcacgacgaggaguucugcgacaugcugagacuguucgacuucaacaagcaggccauccagagacugaaggcccccgcccagaugagcauccagcugaucaacaaggccgugaacgcccugaucaacgaccagcugaucaugaagaaccaccugagagacaucaugugcauccccuacugcaacuacagcaaguacugguaccugaaccacaccaccaccggcaagaccagccugcccaagugcuggcuggugagcaacggcagcuaccugaacgagacccacuucagcgacgacaucgagcagcaggccgacaacaugaucaccgagaugcugcagaaggaguacauggagagacagggcaagaccccccugggccugguggaccuguucguguucagcaccagcuucuaccugaucagcaucuuccugcaccuggugaagauccccacccacagacacaucgugggcaagcccugccccaagccccacagacugaaccacaugggcaucugcagcugcggccuguacaagcagcccggcgugcccgugaaguggaagagaugaggacuagucccuguucccagagcccacuuuuuuuucuuuuuuugaaauaaaauagccugucuuucagaucuaaaaaaaaaaaaaaaaaaaaaaaaaaaaaaaaaaaaaaaaaaaaaaaaaaaaaaaaaaaaaaaaaaaaaaaaaaaaaaaaaaaaaaaaaaaaaaaaaaaa

SEQ ID NO: 28930 - RNA, 1743 nt, Artificial Sequence
  mRNA product Design a-2 (A100) comprising derived and/or modified sequence from LASV(LM776-SLE-2012;Clade IV)__AIT17824__GPCmut5 (opt4)
aggagaguccgcucagccagguugcagaagcggcuuagcguguguccuaaucuucucucugcguguagguaggccugugccgcaaacaagcuuaccaugggccagaucgugaccuucuuccaggaggugccccacgugaucgaggaggugaugaacaucgugcugaucgcccugagcauccuggccgugcugaagggccuguacaacuucgccaccugcggccuggugggccuggugaccuuccugcugcugugcggcagaagcugcaccaccagcguguacaagggcguguacgagcugcagacccuggagcugaacauggagacccugaacaugaccaugccccugagcugcaccaagaacaacagccaccacuacaucauggugggcaacgagaccggccuggagcugacccugaccaacaccagcaucaucaaccacaaguucugcaaccugagcgacgcccacaagaagaaccuguacgaccacgcccugaugagcaucaucagcaccuuccaccugagcauccccaacuucaaccaguacgaggccaugagcugcgacuucaacggcggcaagaucagcgugcaguacaaccugagccacagcuacgccggcgacgccgccaaccacugcggcaccguggccaacggcgugcugcagaccuucaugagaauggccuggggcggcagcuacaucgcccuggacagcggcugcggcaagugggacugcaucaugaccagcuaccaguaccugaucauccagaacaccaccugggaggaccacugccaguucagcagacccagccccaucggcuaccugggccugcugagccagagaaccagagacaucuacaucagcagaagacugcugggcaccuucaccuggacccugagcgacagcgagggcaaggacacccccggcggcuacugccugaccagauggaugcugaucgaggccgagcugaagugcuucggcaacaccgccguggccaagugcaacgagaagcacgacgaggaguucugcgacaugcugagacuguucgacuucaacaagcaggccauccagagacugaaggcccccgcccagaugagcauccagcugaucaacaaggccgugaacgcccugaucaacgaccagcugaucaugaagaaccaccugagagacaucaugugcauccccuacugcaacuacagcaaguacugguaccugaaccacaccaccaccggcaagaccagccugcccaagugcuggcuggugagcaacggcagcuaccugaacgagacccacuucagcgacgacaucgagcagcaggccgacaacaugaucaccgagaugcugcagaaggaguacauggagagacagggcaagaccccccugggccugguggaccuguucguguucagcaccagcuucuaccugaucagcaucuuccugcaccuggugaagauccccacccacagacacaucgugggcaagagcugccccaagccccacagacugaaccacaugggcaucugcagcugcggccuguacaagcagcccggcgugcccgugagauggaagagaugaggacuagucccuguucccagagcccacuuuuuuuucuuuuuuugaaauaaaauagccugucuuucagaucuaaaaaaaaaaaaaaaaaaaaaaaaaaaaaaaaaaaaaaaaaaaaaaaaaaaaaaaaaaaaaaaaaaaaaaaaaaaaaaaaaaaaaaaaaaaaaaaaaaaa

SEQ ID NO: 28931 - RNA, 1743 nt, Artificial Sequence
  mRNA product Design a-2 (A100) comprising derived and/or modified sequence from LASV(Mad39;Clade IV)__ANH09722__GPCmut5 (opt4)
aggagaguccgcucagccagguugcagaagcggcuuagcguguguccuaaucuucucucugcguguagguaggccugugccgcaaacaagcuuaccaugggccagaucgugaccuucuuccaggaggugccccacgugaucgaggaggugaugaacaucgugcugaucgcccugagcauccuggccgugcugaagggccuguacaacguggccaccugcggccugaucggccuggugaccuuccugcugcugugcggcagaagcugcaccaccacccuguacaagggcguguacgagcugcaggcccuggagcugaacauggagacccugaacaugaccaugccccugagcugcaccaagaacaacagccaccacuacaucagagugggcaacgagaccggccuggagcugacccugaccaacaccagccugaucaaccacaaguucugcaaccugagcgacgcccacaagaagaaccuguacgaccacgcccugaugagcaucaucagcaccuuccaccugagcauccccaacuucaaccaguacgaggccaugagcugcgacuucaacgacggcaagaucagcgugcaguacaaccugagccacaccuacgccggcgacaccgccaaccacugcggcaccguggccaacggcgugcugcagaccuucaugagaauggccuggggcggcagcuacaucgcccuggacagcggcugcggcggcugggacugcaucaugaccagcuaccaguaccugaucauccagaacaccaccugggaggaccacugccaguucagcagacccagccccaucggcuaccugggccugcugagccagagaaccagagacaucuacaucagcagaagacugcugggcaccuucaccuggacccugagcgacagcgagggcaaggacacccccggcggcuacugccugaccagauggaugcugaucgaggccgagcugaagugcuucggcaacaccgccguggccaagugcaacgagaagcacgacgaggaguucugcgacaugcugagacuguucgacuucaacaagcaggccauccagagacugaaggcccccgcccagaugagcauccagcugaucaacaaggccgugaacgcccugaucaacgaccagcugaucaugaagaaccaccugagagacaucaugugcauccccuacugcaacuacagcaaguacugguaccugaaccacaccgugaccggcaagaccagccugcccaagugcuggcuggugagcaacggcagcuaccugaacgagacccacuucagcgacgacaucgagcagcaggccgacaacaugaucaccgagaugcugcagaaggaguacauggagagacagggcaagaccccccugggccugguggaccuguucguguucagcaccagcuucuaccugaucagcaucuuccugcaccuggugaagauccccacccacagacacguggugggcaagcccugccccaagccccacagacugaaccacaugggcaucugcagcugcggcuucuacaagcagcccggcgugcccgugagauggaagagaugaggacuagucccuguucccagagcccacuuuuuuuucuuuuuuugaaauaaaauagccugucuuucagaucuaaaaaaaaaaaaaaaaaaaaaaaaaaaaaaaaaaaaaaaaaaaaaaaaaaaaaaaaaaaaaaaaaaaaaaaaaaaaaaaaaaaaaaaaaaaaaaaaaaaa

SEQ ID NO: 28932 - RNA, 1743 nt, Artificial Sequence
  mRNA product Design a-2 (A100) comprising derived and/or modified sequence from LASV(Z0947-SLE-2011;Clade IV)__AIT17840__GPCmut5 (opt4)
aggagaguccgcucagccagguugcagaagcggcuuagcguguguccuaaucuucucucugcguguagguaggccugugccgcaaacaagcuuaccaugggccagaucgugaccuucuuccaggaggugccccacgugaucgaggaggugaugaacaucgugcugaucgcccugagcauccuggccgugcugaagggccuguacaacuucgccaccugcggccuggugggccuggugaccuuccugcugcugugcggcagaagcugcaccaucagccuguacaagggcguguacgagcugcagacccuggagcugaacauggagacccugaacaugaccaugccccugagcugcaccaagaacaacagccaccacuacaucauggugggcaacgagaccggccuggagcugacccugaccaacaccagcaucaucaaccacaaguucugcaaccugagcgacgcccacaagaagaaccuguacgaccacgcccugaugagcaucaucagcaccuuccaccugagcauccccaacuucaaccaguacgaggccaugagcugcgacuucaacggcggcaagaucagcgugcaguacaaccugagccacagcuacgccggcgacgccgccaaccacugcggcaccguggccaacggcgugcugcagaccuucaugagaauggccuggggcggcagcuacaucgcccuggacagcggcugcgacagaugggacugcaucaugaccagcuaccaguaccugaucauccagaacaccaccugggaggaccacugccaguucagcagacccagccccaucggcuaccugggccugcugagccagagaaccagagacaucuacaucagcagaagacugcugggcaccuucaccuggacccugagcgacagcgagggcaaggacacccccggcggcuacugccugaccagauggaugcugaucgaggccgagcugaagugcuucggcaacaccgccguggccaagugcaacgagaagcacgacgaggaguucugcgacaugcugagacuguucgacuucaacaagcaggccauccagagacugaaggcccccgcccagaugagcauccagcugaucaacaaggccgugaacgcccugaucaacgaccagcugaucaugaagaaccaccugagagacaucaugugcauccccuacugcaacuacagcaaguacugguaccugaaccacaccaccaccggcaagaccagccugcccaagugcuggcuggugagcaacggcagcuaccugaacgagacccacuucagcgacgacaucgagcagcaggccgacaacaugaucaccgagaugcugcagaaggaguacauggagagacagggcaagaccccccugggccugguggaccuguucguguucagcaccagcuucuaccugaucagcaucuuccugcaccuggugaagauccccacccacagacacaucgugggcaagcccugccccaagccccacagacugaaccacaugggcaucugcagcugcggccuguacaagcagcccggcgugcccgugaaguggaagagaugaggacuagucccuguucccagagcccacuuuuuuuucuuuuuuugaaauaaaauagccugucuuucagaucuaaaaaaaaaaaaaaaaaaaaaaaaaaaaaaaaaaaaaaaaaaaaaaaaaaaaaaaaaaaaaaaaaaaaaaaaaaaaaaaaaaaaaaaaaaaaaaaaaaaa

SEQ ID NO: 28933 - RNA, 1743 nt, Artificial Sequence
  mRNA product Design a-2 (A100) comprising derived and/or modified sequence from LASV(Josiah;Clade IV)__NP_694870__GPCmut5 (opt5)
aggagaguccgcucagccagguugcagaagcggcuuagcguguguccuaaucuucucucugcguguagguaggccugugccgcaaacaagcuuaccaugggccagaucgugaccuucuuucaagaggucccccacguuauugaagaggugaugaacaucgugcugauugcccucagcguccuggcugugcuuaaggggcuguacaauuucgccacaugcggacucguuggccuggugacguuucuucugcucugugggagauccugcaccacaucucuguauaaaggagucuacgaacugcagacccucgagcugaacauggaaacacuuaauaugaccaugccucugagcuguacaaagaacaauucccaucacuauaucauggugggcaacgagaccgggcucgagcugacgcuuaccaauacaucuauuaucaaccauaaauucugcaaucugagcgacgcgcacaagaaaaaccucuacgaucaugcucugauguccaucauuucuaccuuucaccugagcaucccgaauuucaaccaguaugaagccauguccugugacuuuaauggaggcaagauuagcguucaguacaaccucucucacuccuaugccggcgaugcugccaaucauugcgggacaguggcuaacggaguccugcaaaccuucaugcggauggccuggggcgggagcuacaucgcgcuugacucuggauguggcaacugggauugcauuaugacguccuaccaguaucugaucauucagaauacaaccugggaggaccacugucaguuuagccgccccucuccuaucggguaccucggacugcuuucccaaagaacacgggauaucuauauuagccgcagacugcucggcaccuucaccuggacacuguccgacucugaaggcaaggauacgcccgggggauacugccugacccgguggaugcucaucgaggccgagcugaaauguuuuggcaacacagcuguggccaagugcaaugaaaaacaugacgaggaguucugcgauaugcuucgccuguuugacuucaacaagcaggcuauucagagacucaaagccccugcgcagaugagcauccaacugauuaauaaggccgugaacgcucuuaucaaugaucagcugaucaugaagaaccaccuccgggacauuauguguauccccuauugcaauuacuccaaauauugguaccugaaccacaccacaaccgggcgcacgagccugccuaaguguuggcucgucucuaauggauccuaccugaacgaaacacauuucagcgacgauauugaacagcaagccgacaauaugaucaccgagaugcuucagaaagaguauauggaaagacagggcaagaccccgcuggggcucguugaucuguuuguguucucuaccagcuuuuaccugauuuccaucuuccuucaccucgugaaaauccccacacaucggcacauugucggaaagucuugcccuaaaccccaucgccugaaccacaugggcaucuguagcugcggccuguauaagcagccuggggugcccguuaaguggaaaagaugaggacuagucccuguucccagagcccacuuuuuuuucuuuuuuugaaauaaaauagccugucuuucagaucuaaaaaaaaaaaaaaaaaaaaaaaaaaaaaaaaaaaaaaaaaaaaaaaaaaaaaaaaaaaaaaaaaaaaaaaaaaaaaaaaaaaaaaaaaaaaaaaaaaaa

SEQ ID NO: 28934 - RNA, 1740 nt, Artificial Sequence
  mRNA product Design a-2 (A100) comprising derived and/or modified sequence from LASV(LP;Clade I)__AAF86701__GPCmut5 (opt5)
aggagaguccgcucagccagguugcagaagcggcuuagcguguguccuaaucuucucucugcguguagguaggccugugccgcaaacaagcuuaccaugggccagaucauuaccuucuuucaagaggugccccacgucaucgaagagguuaugaacauugugcugaucgcccucagccugcuugcuauucugaaggggcucuacaauaucgccacaugcggaaucauuggccugguggcguuccuuuuucugugugggaaauccugcucucucacgcugaagggaggcuaugaacugcagacccucgagcugaacauggaaacacuuaauaugaccaugccucugagcuguaccaaaaacuccucucaucacuacaucagagucgggaaugagacaggacucgagcugacacuuaccaacacgagcauuaucaaucauaaguucugcaaccuguccgacgcucacaaaaagaaucucuaugaucaugcccugaugucuauuaucagcaccuuucaccuguccauuccgaacuucaaucaguacgaagccaugagcugugacuuuaacggcggcaagaucucugugcaguauaaucucucccacagcuacgcuggggaugccgcugagcauugcggaacaguugccaacggcgugcugcaaaccuucaugcggauggcguggggagggcgcuauaucgcccuugacucuggcugugggaauugggauugcauuaugacauccuaccaguaccugaucauucagaacaccacgugggaagaccacugucaguuuagcagacccucuccuaucggauaucucggccugcuuucccaacggacacgcgauauuuacaucagcagacggcugcucggcaccuucacauggacccuguccgacucugaggggaacgagacccccggaggcuauugccugacacgcuggaugcucaucgaagcugagcugaaauguuuugggaauacggccgucgcuaagugcaacgaaaaacaugaugaggaguucugcgacaugcuuagacuguuugauuucaauaagcaggccauucggcgccucaaagcgccugcccagaugagcauccagcugauuaacaaggcugugaaugcccuuaucaacgaccaacugauuaugaagaaucaccucagagauaucauguguauccccuacugcaacuauuccaaauacugguaucugaaucacaccagcucuggacggacaucccugccuaaguguuggcucauuagcaacggcucuuaccugaaugaaacccaguucagcgacgacaucgagcagcaagcugauaacaugauuacagaaaugcuucagaaagaguacaucgaacgccaggggaagaccccgcugggacucguugacauuuuuaucuucuccacgucuuuuuaucugauuagcaucuuccugcaucuuaucaaaauucccacacacagacauaucgugggcaagccuugccccaaaccucaccggcucaaucauaugggcgucuguuccugcgggcuguacaagcaccccggagugccgaccaaguggaaacgcugaggacuagucccuguucccagagcccacuuuuuuuucuuuuuuugaaauaaaauagccugucuuucagaucuaaaaaaaaaaaaaaaaaaaaaaaaaaaaaaaaaaaaaaaaaaaaaaaaaaaaaaaaaaaaaaaaaaaaaaaaaaaaaaaaaaaaaaaaaaaaaaaaaaaa

SEQ ID NO: 28935 - RNA, 1740 nt, Artificial Sequence
  mRNA product Design a-2 (A100) comprising derived and/or modified sequence from LASV(803213;Clade II)__AAF86703__GPCmut5 (opt5)
aggagaguccgcucagccagguugcagaagcggcuuagcguguguccuaaucuucucucugcguguagguaggccugugccgcaaacaagcuuaccaugggccagaucauuaccuucuuucaagaggugccccacgucaucgaagagguuaugaacauugugcugaucgcccucagccugcuugcuauucugaaggggaucuacaauguggccacaugcggacucuucggccugaucuccuuucuucugcucugugggagaucuugcagcgucacguauaaaggaguguacgaacugcagacccuggagcucaacauggcgaaucugaacaugacaaugccucuuuccuguaccaagaauaacucucaucacuauauuaugguuggcaaugaaacagggcuggagcucacccugacaaacaccagcaucauuaaucauaaauucugcaaccuuuccgacgcucacaagaaaaaucuguacgaucaugcccucaugucuaucauuagcacguuucaccuguccaucccgaacuucaaucaguaugaggccaugagcugugacuuuaacggaggcaagauuucugugcaguacaaucugucccacagcuucgcugucgaugccgcuaaccauugcggcaccaucgccaacggggugcuccaaacauuuaugcggauggcguggggaggcucuuauaucgcccuggacuccggguguggaaauugggauugcauuaugaccagcuaccaguaccuuaucauucagaacacaaccugggaagaccacugucaguucucucgccccuccccuaucggcuaucuggggcuccugagccaaagaacgcgggauauuuacaucucccgcagacuucugggaacauuuaccuggacacucucugacagcgagggcaaugaagcucccggcggguauugccugacccgguggaugcugaucgaggccgagcucaaguguuucggaaacaccgcuguugccaaaugcaaugaaaagcaugaugaggaauuuugcgacaugcugcgccuuuucgauuucaacaaacaggcgauuaagagacugaaaacgccugcccagauguccauccagcucauuaauaaggcugugaacgcccugaucaaugaccaacuuauuaugaagaaccaucugcgggauaucauguguauccccuacugcaauuauagccgcuacugguaucucaaccacacagucaccggcaaaacaucucugccuagauguuggcugguguccaaugggagcuaccucaacgagacccacuuuucugacgacauugaacagcaggcugauaauaugaucacagagaugcugcaaaaggaguacauggaccggcagggaaaaaccccgcuuggccugguggaucucuucgucuuuagcacguccuucuaucugauuucuaucuuucugcaccuuguuaagauucccacacaucgccacaucguggggaaaccuugccccaagccucauagacucaaccacaugggaauuuguagcugcggccuguacaaacaccccggcgugccggucaaguggaagcggugaggacuagucccuguucccagagcccacuuuuuuuucuuuuuuugaaauaaaauagccugucuuucagaucuaaaaaaaaaaaaaaaaaaaaaaaaaaaaaaaaaaaaaaaaaaaaaaaaaaaaaaaaaaaaaaaaaaaaaaaaaaaaaaaaaaaaaaaaaaaaaaaaaaaa

SEQ ID NO: 28936 - RNA, 1740 nt, Artificial Sequence
  mRNA product Design a-2 (A100) comprising derived and/or modified sequence from LASV(GA391;Clade III)__CAA36645__GPCmut5 (opt5)
aggagaguccgcucagccagguugcagaagcggcuuagcguguguccuaaucuucucucugcguguagguaggccugugccgcaaacaagcuuaccaugggccagaucgugaccuucuuucaagaggucccccacguuauugaagaggugaugaacaucgugcugauugcccucagcauccuggcuauucuuaaggggcuguacaaugucgccacaugcggacucaucggccuggugacguuccuucugcucuccgggagaucuuguagccugaucuauaaaggaaccuacgaacugcagacacucgagcugaacauggaaacccuuaauaugacaaugccucuguccugcaccaagaacaauucucaucacuauauucggguuggcaacgagacagggcucgagcugacccuuacgaauaccagcauccugaaccauaaauuuuguaaucucuccgacgcgcacaagcgcaaccuguacgaucauucucugaugagcauuaucuccacauuccaccucagcauuccgaauuuuaaccaguaugaagcuaugucuugcgacuucaauggaggcaaaaucaccgugcaguacaaccugucccacagcuuugccgucgaugccgcuggccauugugggacacuugccaauggagugcugcaaaccuucaugagaauggcuuggggcgggucuuauauugcccucgacuccggaugcggcaacugggauuguaucaugacgagcuaccaguaccugaucauucagaacacaaccugggacgaucacugccaguuuucucggcccuccccuaucggguaucuuggacugcucagccaacgcacaagagacauuuacaucucccggcgccugcugggcaccuucaccuggacacucucugauagcgagggcaaugaaacgcccgggggauauugucugaccagauggaugcuuauugaggcggagcugaagugcuuuggcaacacagccguugcuaaguguaaugaaaaacaugacgaggaguucugcgauaugcuccggcuguuugacuucaacaagcaggccauccgcagacuuaaaaccccugcucagauguccauccagcugauuaauaaggccgugaacgcgcucaucaaugaucaacugauuaugaaaaaccaucugcgggacaucaugugcauucccuacuguaauuauagccgcuacugguaucucaaccacacaucuaccgggaagacgucccugccuagaugcuggcuuaucagcaauggaucuuaccugaacgaaacaaaguucagcgacgauaucgaacagcaggccgacaauaugauuaccgagaugcuccaaaaagaguacaucgaucggcagggcaagaccccgcuggggcuggucgaccuuuuuguguucuccacaucuuuuuaucucauuagcaucuuccugcaccuggugaaaauucccacccaccgccauaucgucggaaagccuugucccaaaccucacagacucaaccauaugggcauuugcuccuguggccuguacaagcagcccgggguuccggugcgguggaaaagaugaggacuagucccuguucccagagcccacuuuuuuuucuuuuuuugaaauaaaauagccugucuuucagaucuaaaaaaaaaaaaaaaaaaaaaaaaaaaaaaaaaaaaaaaaaaaaaaaaaaaaaaaaaaaaaaaaaaaaaaaaaaaaaaaaaaaaaaaaaaaaaaaaaaaa

SEQ ID NO: 28937 - RNA, 1743 nt, Artificial Sequence
  mRNA product Design a-2 (A100) comprising derived and/or modified sequence from LASV(AV;Clade V)__CCA30314__GPCmut5 (opt5)
aggagaguccgcucagccagguugcagaagcggcuuagcguguguccuaaucuucucucugcguguagguaggccugugccgcaaacaagcuuaccaugggccagaucgugaccuucuuucaagaggucccccacguuauugaagaggugaugaacaucgugcugauugcccucagcauccuggcuguccuuaaggggcuguacaauauugccacaugcggacucaucggccugaucacguuccuucugcucugugggagauccugcucuagcaaccuguauaaaggaguguacgaacugcagucccucgaccugaauauggagacccuuaacaugacaaugccucugucuuguaccaagaauaacagccaucacuauauucggguuggcaaugauacagggcucgaacugacccuuacaaacaccuccauccugaaucauaaauuuugcaaccucucugacgcgcacaagaaagaucuguacgaccaugcucugaugagcauuaucuccacguuccaccucagcauuccgaauuuuaaccaguaugaggccaugucuugugauuucaauggaggcaagaucuccgugcaguacaaccugagccacucuuaugccauugacgcugccaaucauugcggcaccgucgcuaacgggauccuucaaacauuuaugcgcauggccuggggaggcuccuacaucgcgcuggauagcggguguggaaacugggacugcauuaugaccucuuaccaguaucucaucauucagaauacaaccugggagaaccacugucaguucuccagacccagcccuaucggcuaccuggggcuucugucccaacggacgcgcgauauuuauaucucuagacggcuccugggaacauuuaccuggacacugagcgacuccgaaggcaaugccacccccggcggguacugccucacccgcuggaugcugaucgaggcugaacuuaaguguuucggaaacacagccguggcuaaaugcaaugagaagcaugaugaggaauuuugcgacaugcugagacucuucgauuuuaacaaacaggccauuagccggcugaagucuccugcgcagauguccauccagcuuauuaauaaagccguuaacgcucugaucaaugaccaacucauuaugaagaaccaucugcgcgacaucauguguauccccuauugcaauuacagcaaguauugguaccugaaccacacgauuaccggcaaaacaucucucccuaaguguuggcuggugagcaauggguccuaccuuaacgagacccacuucucugaugacaucgaacagcaggccgauaauaugauuacagagaugcugcaaaaagaauauauggagagacagggaaagaccccgcucggccuggucgaccuguucguguuuagcacguccuucuaccuuaucagcauuuuucuccggcuggugaaaauccccacacaccgccauauugucgggaagccuugccccaaaccucacagacugaaccauaugggaaucuguucuugcggccucuauaagcagcccggcguuccggugcgguggaagcgcugaggacuagucccuguucccagagcccacuuuuuuuucuuuuuuugaaauaaaauagccugucuuucagaucuaaaaaaaaaaaaaaaaaaaaaaaaaaaaaaaaaaaaaaaaaaaaaaaaaaaaaaaaaaaaaaaaaaaaaaaaaaaaaaaaaaaaaaaaaaaaaaaaaaaa

SEQ ID NO: 28938 - RNA, 1740 nt, Artificial Sequence
  mRNA product Design a-2 (A100) comprising derived and/or modified sequence from LASV(Togo/2016/7082;Clade VI)__AMR44577__GPCmut5 (opt5)
aggagaguccgcucagccagguugcagaagcggcuuagcguguguccuaaucuucucucugcguguagguaggccugugccgcaaacaagcuuaccaugggccagaucauuaccuucuuucaagaggugccccacgucaucgaagagguuaugaacauugugcugaucgcccucagccugcuugcuauucugaaggggguguacaaugucgccacaugcggaaucaucggccucgugacguuccuguuucuuugugggagauccugcucucugauuuauaaaggaagcuacgaacuccagacccuggagcugaacauggaaacacucaauaugaccaugccucuguccuguacaaagaacucuagccaucacuauauccggguuggcaaugagaccgggcuugagcugacacucaccaacacguccauuaucaaucauaaauucugcaaccugucugacgcgcacaagcgcaaucuuuacgaucaugcucugaugagcauucucuccaccuuucaccugagcaucccgaacuucaaucaguaugaagccaugucuugugacuuuaacggaggcaaaauuuccgugcaguacaaucugagccacgccuaugcugucgaugccgcugagcauugcggcacaguggccaacgggguucuccaaaccuucaugagaauggcguggggaggcucuuacaucgcccuggacuccggguguggaaauugggauugcaucaugacaagcuaccaguaucuuauuauccagaacaccacgugggaagaccacugucaguuuucucggcccuccccuauuggcuaccuggggcuccugagccaacgcacaagagauaucuauauuucccggcgccuucugggaaccuucacauggacccucucugacagcgagggcaacgagacccccggcggguacugccugacaagauggaugcugaucgaagcugagcucaaguguuuuggaaauacggccguggcuaagugcaacgaaaaacaugaugaggaguucugcgacaugcugcggcuuuuugauuucaauaagcaggccauccagcgccugaaauccccugcgcagaugagcauucaacucaucaacaaggccgucaaugcucugauuaacgaccagcuuaucaugaaaaaucaccugagagauaugauguguauucccuauugcaacuacucuaaguauugguaccucaaucacaccuccagcggccggacaucucugccuaaguguuggcuggugagcaacggguccuaccucaaugaaacccauuucucugacgacaucgagcagcaagccgauaacaugaucacagaaaugcugcagaaagaguauauugaccgccagggaaagaccccgcuuggccugguggaucucuuugucuucagcacguccuuuuaccugaucagcauuuuccugcaccuuaucaaaauucccacacauagacacaucguugggaagccuugccccaaaccucaucggcucaaucacaugggaauuuguucuugcggccuguauaagcagcccggcgugccgacccgcuggaaaagaugaggacuagucccuguucccagagcccacuuuuuuuucuuuuuuugaaauaaaauagccugucuuucagaucuaaaaaaaaaaaaaaaaaaaaaaaaaaaaaaaaaaaaaaaaaaaaaaaaaaaaaaaaaaaaaaaaaaaaaaaaaaaaaaaaaaaaaaaaaaaaaaaaaaaa

SEQ ID NO: 28939 - RNA, 1740 nt, Artificial Sequence
  mRNA product Design a-2 (A100) comprising derived and/or modified sequence from LASV(KAK-428;Clade n.d. (VII))__ANH09740__GPCmut5 (opt5)
aggagaguccgcucagccagguugcagaagcggcuuagcguguguccuaaucuucucucugcguguagguaggccugugccgcaaacaagcuuaccaugggccagaucgugaccuucuuucaagaggucccccacguuauugaagaggugaugaacaucgugcugauugcccucagccugcuugcuauccugaaggggcucuacaauuucgccacaugcggagucauuggccugaucacguuucuucugcucugugggagauccugcucugcgaccuauaaaggacaguacgaacugcagacacuggagcucaacauggaaagccugaauaugaccaugccucuuuccuguacaaagaacaauucucaucacuauauccgggcuggcaacaauaccgggcuggagcucacacugaccaacacgagcauuaucucccauaaauucugcaaucuuucugacgcccacaagaaaaaccuguacgaucauacccucaugagcauuaucacaaccuuucaccuguccauuccgaauuucaaccaguaugaggccaugagcugugacuuuaauggaggcaagaucucuauucaauacaaccugucccacagcuaugcuggcgaugccgcucagcauugcgggacaguggccaauggaguucuccagaccuucaugcgcauggcguggggcgggucuuaccuggcccuugacuccggauguagaggcugggauugcaucaucagcucuuaccaguaucugauuauccaaaacacgacaugggacgaucacugucaguuuucccggcccagcccuauuggguaccucggauucgugucccagaagacccgcgacaucuauauuucuagacggcugcuuggcacauuuaccuggacccugagcgauuccgaaggccaugacaugcccgggggauacugccucacacgcuggaugcugaucgaggcugaucugaaauguuucggcaacacggccgucgcuaagugcaaugaaaaacacgacgaggaguuuugcgauauguggagacucuucgacuucaacaagcaggccauccaacggcugaaagcgccugcccagaugaauauucagcuuaucaacaaggcugugaaugcccugauuaacgaccaacucaugaugaagaaucaucugcgcgauaucauguguauucccuauugcaacuacagcaaauuuugguaucuuaauaacaccacaaccgggagaacaucucugccucgguguuggcucaucuccaauggaagcuaccugaacgaaacccacuucucugacgauaucgagcagcaggcugacaauaugauuacggaaaugcugcagaaggaguacauggaucgccaaggcaaaacaccgcucgggcugguugaccuuuuuguguucagcaccuccuuuuaucugaucaccauuuuccuccaccuggucaagauccccacacauagacacauugugggaaaaccuugccccaagccucaucggcugaaccacaugggcaucuguucuugcggccuuuacaaacagcccggggugccgguccgcuggaagagaugaggacuagucccuguucccagagcccacuuuuuuuucuuuuuuugaaauaaaauagccugucuuucagaucuaaaaaaaaaaaaaaaaaaaaaaaaaaaaaaaaaaaaaaaaaaaaaaaaaaaaaaaaaaaaaaaaaaaaaaaaaaaaaaaaaaaaaaaaaaaaaaaaaaaa

SEQ ID NO: 28940 - RNA, 1740 nt, Artificial Sequence; identical to SEQ ID NO: 28934
  mRNA product Design a-2 (A100) comprising derived and/or modified sequence from LASV(Pinneo-NIG-1969;Clade I)__AIT17836__GPCmut5 (opt5)

SEQ ID NO: 28941 - RNA, 1740 nt, Artificial Sequence
  mRNA product Design a-2 (A100) comprising derived and/or modified sequence from LASV(ISTH0009-NIG-2011;Clade II)__AIT17404__GPCmut5 (opt5)
aggagaguccgcucagccagguugcagaagcggcuuagcguguguccuaaucuucucucugcguguagguaggccugugccgcaaacaagcuuaccaugggccagaucauuaccuucuuucaagaggugccccacgucaucgaagagguuaugaacauugugcugaucgcccucagccugcuugcuauucugaaggggaucuacaauguggccacaugcggacucuucggccuggucuccuuucuucugcucugugggagaucuugcagcacgaccuauaaaggaguguacgaacugcagacacuggagcucgacauggcgucccugaacaugaccaugccucuuucuuguacaaagaauaacagccaucacuauaucaugguuggcaaugaaaccgggcuggagcucacacugaccaacacguccauuaucaaucauaaauucugcaaccuuucugaugcucacaagaaaaaucuguacgaccaugcccucaugagcauuaucuccaccuuucaccugagcauuccgaacuucaaucaguaugaggccaugucuugugauuuuaacggaggcaagaucuccgugcaguacaaucugagccacgcuuaugccgucgacgcugccaaccauugcggcacaauugcgaauggggugcuccaaaccuucaugcggauggccuggggaggcucuuacaucgcucuggauuccggguguggaagcugggacugcaucaugacaucuuaccaguaucuuauuauccagaacaccacgugggaagaucacugucaguuuucccgccccagcccuauuggcuaccuggggcuccugucccaaagaacacgggacaucuauauuucucgcagacuucugggaaccuucacauggacccucagcgauuccgagggcaacgaaacccccggcggguacugccugacacgguggaugcugaucgaggccgagcucaaguguuuuggaaauacggcuguugccaaaugcaacgaaaagcaugacgaggaguucugcgauaugcugcgccuuuuugacuucaauaaacaggcgaucagacggcugaagaccccugcccagaugagcauucagcucaucaacaaagcugugaaugcccugauuaacgaucaacuuaucaugaagaaucaucugcgcgacauuauguguauccccuauugcaacuacucuaaguauugguaccucaaucacacagucaccggcaaaacaucccugccuagauguuggcuggugagcaacgggucuuaccucaaugaaacccacuucagcgacgauaucgaacagcaggcugacaacaugauuacggagcugcuucaaaaggaguauauggaucggcagggaaaaacaccgcugggccucguggaccuguuugucuucuccaccucuuuuuaccugaucagcauuuuccuucaccucaucaagauucccacccaucgccacaucacagggaaaccuugccccaagccucauagacugaaucacaugggaauuuguuccugcggccuguauaaacaccccggcguuccggugaaguggaagcggugaggacuagucccuguucccagagcccacuuuuuuuucuuuuuuugaaauaaaauagccugucuuucagaucuaaaaaaaaaaaaaaaaaaaaaaaaaaaaaaaaaaaaaaaaaaaaaaaaaaaaaaaaaaaaaaaaaaaaaaaaaaaaaaaaaaaaaaaaaaaaaaaaaaaa

SEQ ID NO: 28942 - RNA, 1740 nt, Artificial Sequence
  mRNA product Design a-2 (A100) comprising derived and/or modified sequence from LASV(ISTH2010-NIG-2012;Clade II)__AIT17482__GPCmut5 (opt5)
aggagaguccgcucagccagguugcagaagcggcuuagcguguguccuaaucuucucucugcguguagguaggccugugccgcaaacaagcuuaccaugggccagaucauuaccuucuuucaagaggugccccacgucaucgaagagguuaugaacauugugcugaucgcccucagccugcuugcuauucugaaggggaucuacaauguggccacaugcggacucuucggccuggucuccuuucuucugcucugugggagaucuugcagcacgaccuauaaaggaguguacgaacugcagacacuggagcucgacauggcgucccugaacaugaccaugccucuuucuuguacaaagaauaacagccaucacuauaucaugguuggcaaugaaaccgggcuggagcucacacugaccaacacguccauuaucaaucauaaauucugcaaccuuucugaugcucacaagaaaaaucuguacgaccaugcccucaugagcauuaucuccaccuuucaccugagcauuccgaacuucaaucaguaugaggccaugucuugugauuuuaacggaggcaagaucuccgugcaguacaaucugagccacgcuuaugccgucgacgcugccaaccauugcggcacaauugcgaauggggugcuccaaaccuucaugcggauggccuggggaggcucuuacaucgcucuggauuccggguguggaagcugggacugcaucaugacaucuuaccaguaucuuauuauccagaacauuaccugggaagaucacugucaguuuucccgccccagcccuaucggcuaccuggggcuccugucccaaagaacgcgggacauuuauaucucucgcagacuucugggaacauucaccuggacacucagcgauuccgagggcaacgaaacccccggcggguacugccugacccgguggaugcugaucgaggccgagcucaaguguuuuggaaauacagcuguugccaaaugcaacgaaaagcaugacgaggaguucugcgauaugcugcgccuuuuugacuucaauaaacaggcgauuagacggcugaagacgccugcccagaugagcauccagcucauuaacaaagcugugaaugcccugaucaacgaucaacuuauuaugaagaaucaucugcgcgacaucauguguauccccuauugcaacuacucuaaguauugguaccucaaucacaccgucacaggcaaaaccucccugccuagauguuggcuggugagcaacgggucuuaccucaaugaaacacacuucagcgacgauauugaacagcaggcugacaacaugaucaccgagcugcuucaaaaggaguauauugaucggcagggaaaaacgccgcugggccucguggaccuguuugucuucuccacaucuuuuuaccugaucagcauuuuccuucaccucguuaagauccccacccaucgccacgugguggggaaaccuugccccaagccucauagacugaaucacaugggaauuuguuccugcggccuguauaaacaccccggcgucccggugaaguggaagcggugaggacuagucccuguucccagagcccacuuuuuuuucuuuuuuugaaauaaaauagccugucuuucagaucuaaaaaaaaaaaaaaaaaaaaaaaaaaaaaaaaaaaaaaaaaaaaaaaaaaaaaaaaaaaaaaaaaaaaaaaaaaaaaaaaaaaaaaaaaaaaaaaaaaaa

SEQ ID NO: 28943 - RNA, 1740 nt, Artificial Sequence
  mRNA product Design a-2 (A100) comprising derived and/or modified sequence from LASV(Lassa virus/H.sapiens-wt/NGA/2015/ISTH_0543;Clade II)__AVO03639__GPCmut5 (opt5)
aggagaguccgcucagccagguugcagaagcggcuuagcguguguccuaaucuucucucugcguguagguaggccugugccgcaaacaagcuuaccaugggccagaucauuaccuucuuucaagaggugccccacgucaucgaagagguuaugaacauugugcugaucgcccucagccugcuugcuauucugaaggggaucuacaauguggccacaugcggacucuucggccuggucuccuuucuucugcucugugggagaucuugcagcacgaccuauaaaggaguguacgaacugcagacacuggagcucgacauggcgaaccugaauaugaccaugccucuuuccuguacaaagaacaauucucaucacuauaucaugguuggcaacgaaaccgggcuggagcucacacugaccaauacgagcauuaucaaccauaaauucugcaaucuuuccgaugcucacaagaaaaaccuguacgaccaugcccucaugucuauuaucagcaccuuucaccuguccauuccgaauuucaaccaguaugaggccaugagcugugauuuuaauggaggcaagaucucugugcaguacaaccugucccacacauaugcugucgacgccgcuaaucauugcggcaccauugccaacggggugcuccaaacauucaugcggauggcguggggaggcagcuacaucgcccuggauucuggguguggauccugggacugcaucaugaccagcuaccaguaucuuguuauucagaacacgacaugggaagaucacugucaguuuucucgccccuccccuaucggcuaccuggggcuccugagccaaagaacccgggacauuuauaucucccgcagacuucugggaacauucaccuggacccucucugauagcgagggcaaugaaacacccggcggguacugccugacgcgguggaugcugauugaggcugagcucaaguguuuuggaaacaccgccguggcuaaaugcaaugaaaagcaugacgaggaguucugcgauaugcugcgccuuuuugacuucaacaaacaggccaucagacggcugaagaccccugcgcagauguccauccagcucauuaauaaagccgucaacgcucugaucaaugaucaacuuauuaugaagaaccaucugcgcgacaucauguguauucccuauugcaauuacagcaaguauugguaccucaaccacacagugacaggcaaaaccucucugccuagauguuggcugguguccaaugggagcuaccucaacgaaacgcacuucucugacgauaucgaacagcaggccgacaauaugaucacagagcugcuucaaaaggaguauauugaucggcagggaaaaaccccgcugggccucgucgaccuguuuguuuucagcaccuccuuuuaccugaucucuauuuuccuucaccucgugaagauccccacacaucgccacauuaccgggaaaccuugccccaagccucauagacugaaccacaugggaaucuguagcugcggccuguauaaacaccccggcgugccggucaaguggaagcggugaggacuagucccuguucccagagcccacuuuuuuuucuuuuuuugaaauaaaauagccugucuuucagaucuaaaaaaaaaaaaaaaaaaaaaaaaaaaaaaaaaaaaaaaaaaaaaaaaaaaaaaaaaaaaaaaaaaaaaaaaaaaaaaaaaaaaaaaaaaaaaaaaaaaa

SEQ ID NO: 28944 - RNA, 1740 nt, Artificial Sequence
  mRNA product Design a-2 (A100) comprising derived and/or modified sequence from LASV(Lassa virus/H.sapiens-wt/NGA/2016/ISTH_0009;Clade II)__AVO03571__GPCmut5 (opt5)
aggagaguccgcucagccagguugcagaagcggcuuagcguguguccuaaucuucucucugcguguagguaggccugugccgcaaacaagcuuaccaugggccagaucauuaccuucuuucaagaggugccccacgucaucgaagagguuaugaacauugugcugaucgcccucagccugcuugcuauucugaaggggaucuacaauguggccacaugcggacuccugggccuugucuccuuccugcuccugugugggagaucuugcagcacgaccuauaaaggaguguacgaacugcagacacucgagcuggacauggcgucccuuaacaugaccaugccucugucuuguacaaagaauaacagccaucacuauaucaugguuggcaaugaaaccgggcucgagcugacacuuaccaacacguccauuaucaaucauaaauuuugcaaccugucugaugcucacaagaaaaaucucuacgaccaugcccugaugagcauuaucuccaccuuccaccugagcauuccgaacuuuaaucaguaugaggccaugucuugugauuucaacggaggccggaucuccgugcaguacaaucucagccacucuuaugcugucgacgccgcuaaccauugcggcacaauugccaauggggugcugcaaaccuuuaugcgcauggcguggggaggcuccuacaucgcccuugauagcggguguggaucuugggacugcaucaugacauccuaccaguaucugauuauccagaacaccacgugggaagaucacugucaguucagcagacccuccccuauuggcuaccucgggcugcuuucucaacggacacgcgacaucuauauuagcagacggcugcucggaaccuuuacauggacccuguccgauagcgagggcaacgaaacccccggcggguacugccugacacgcuggaugcucaucgaggcugagcugaaguguuucggaaauacggccguugcuaagugcaacgaaaaacaugacgaggaauuuugcgauaugcuuagacuguucgacuuuaauaagcaggccauccggcgccucaaaaccccugcgcagaugucuauucagcugaucaacaaggccgugaaugcucuuauuaacgaucaacugaucaugaaaaaucaccucagagacauuauguguauccccuauugcaacuacuccaaguauugguaccugaaucacacagucaccggcaagacaagccugccucgguguuggcucgugucuaacgggagcuaccugaaugagacccauuucuccgacgauaucgaacagcaggccgacaacaugauuacggagcuucugcaaaaagaguauaucgaucgccagggaaagacaccgcucggccugguggaccuguucgucuuuucuaccagcuucuaccuuauuuccaucuuucuccaccugguuaaaauucccacccauagacacaucacagggaagccuugccccaaaccucaucggcugaaucacaugggaauuuguagcugcggccucuauaaccaccccggcgugccggugaaguggaaacgcugaggacuagucccuguucccagagcccacuuuuuuuucuuuuuuugaaauaaaauagccugucuuucagaucuaaaaaaaaaaaaaaaaaaaaaaaaaaaaaaaaaaaaaaaaaaaaaaaaaaaaaaaaaaaaaaaaaaaaaaaaaaaaaaaaaaaaaaaaaaaaaaaaaaaa

SEQ ID NO: 28945 - RNA, 1740 nt, Artificial Sequence
  mRNA product Design a-2 (A100) comprising derived and/or modified sequence from LASV(Lassa virus/H.sapiens-wt/NGA/2016/ISTH_0017;Clade II)__AVO03567__GPCmut5 (opt5)
aggagaguccgcucagccagguugcagaagcggcuuagcguguguccuaaucuucucucugcguguagguaggccugugccgcaaacaagcuuaccaugggccagaucauuaccuucuuucaagaggugccccacgucaucgaagagguuaugaacauugugcugaucgcccucagccugcuugcuauucugaaggggaucuacaauguggccacaugcggacucuucggccuggucuccuuucuucugcucugugggagaucuugcagcacgaccuauaaaggaguguacgaacugcagacacuggagcucgacauggcgucccugaacaugaccaugccucuuucuuguacaaagaauaacagccaucacuauaucaugguuggcaaugaaaccgggcuggagcucacacugaccaacacguccauuaucaaucauaaauucugcaaccuuucugaugcucacaagaaaaaucuguacgaccaugcccucaugagcauuaucuccaccuuucaccugagcauuccgaacuucaaucaguaugaggccaugucuugugauuuuaacggaggcaagaucuccgugcaguacaaucugagccacacauaugcuauugacgccgcuaaccauugcggcaccaucgccaaugggguccuccaaacauucaugcggauggcguggggaggcucuuacaucgcccuggauuccggguguggaagcugggacugcauuaugaccucuuaccaguaucuuaucauucagaacacgacaugggaagaucacugucaguuuucccgccccagcccuaucggcuaccuggggcuccugucccaaagaacccgggacauuuauaucucucgcagacuucugggaacauucaccuggacccucagcgauuccgagggcaacgaaacacccggcggguacugccugacgcgguggaugcugaucgaggcugagcucaaguguuuuggaaauaccgccguggcuaaaugcaacgaaaagcaugacgaggaguucugcgauaugcugcgccuuuuugacuucaauaaacaggccauuagacggcugaagaccccugcgcagaugagcauccagcucauuaacaaagccguuaaugcucugaucaacgaucaacuuauuaugaagaaucaucugcgcgacaucauguguauccccuauugcaacuacucuaaguauugguaccucaaucacacagugacaggcaaaaccucccugccuagauguuggcuggucagcaacgggucuuaccucaaugaaacgcacuucagcgacgauauugaacagcaggccgacaacaugaucacagagcugcuucaaaaggaguauauggaucggcagggaaaaaccccgcugggccucguggaccuguuuguguucuccaccucuuuuuaccugauuagcaucuuccuucaccucguccgcauucccacacauagacacguuaucgggaagccuugccccaaaccucaucggcugaaucacaugggaauuuguuccugcggccuguauaagcaccccggcgugccggugaaauggaagcgcugaggacuagucccuguucccagagcccacuuuuuuuucuuuuuuugaaauaaaauagccugucuuucagaucuaaaaaaaaaaaaaaaaaaaaaaaaaaaaaaaaaaaaaaaaaaaaaaaaaaaaaaaaaaaaaaaaaaaaaaaaaaaaaaaaaaaaaaaaaaaaaaaaaaaa

SEQ ID NO: 28946 - RNA, 1740 nt, Artificial Sequence
  mRNA product Design a-2 (A100) comprising derived and/or modified sequence from LASV(Lassa virus/H.sapiens-wt/NGA/2018/ISTH_0959;Clade II)__AVV65099__GPCmut5 (opt5)
aggagaguccgcucagccagguugcagaagcggcuuagcguguguccuaaucuucucucugcguguagguaggccugugccgcaaacaagcuuaccaugggccagaucauuaccuucuuucaagaggugccccacgucaucgaagagguuaugaacauugugcugaucgcccucagccugcuugcuauucugaaggggaucuacaauguggucacaugcggacucuucggccugguguccuuucuucugcucugugggagaucuugcagcacgaccuauaaaggaguuuacgaacugcagacacuggagcucgacauggccucccugaacaugaccaugccucuuucuuguacaaagaauaacagccaucacuauaucauggugggcaaugaaaccgggcuggagcucacacugaccaacacguccauuaucaaucauaaauucugcaaccuuucugaugcgcacaagaaaaaucuguacgaccaugcucucaugagcauuaucuccaccuuucaccugagcauuccgaacuucaaucaguaugaggccaugucuugugauuuuaacggaggcaagaucuccguccaguacaaucugagccacgccuaugcuauugacgccgcuaaccauugcggcacaaucgccaauggggugcuccaaaccuucaugcggauggcguggggaggcucuuacaucgcccuggauuccggguguggaagcugggacugcauuaugacaucuuaccaguaucuuaucauucagaacaccacgugggaagaucacugucaguuuucccgccccagcccuaucggcuaccuggggcuccugucccaaagaacacgggacauuuauaucucucgcagacuucugggaaccuucacauggacccucagcgauuccgagggcaacgaaacccccggcggguacugccugacacgguggaugcugaucgaggcugagcucaaguguuuuggaaauacggccguugcuaaaugcaacgaaaagcaugacgaggaguucugcgauaugcugcgccuuuuugacuucaauaaacaggccauuagacggcugaagaccccugcgcagaugagcauccagcucauuaacaaagccgugaaugcucugaucaacgaucaacuuauuaugaagaaucaucugcgcgacaucauguguauccccuauugcaacuacucuaaguauugguaccucaaucacacagucaccggcaaaacaucccugccuagauguuggcuggugagcaacgggucuuaccucaaugaaacccacuucagcgacgauauugaacagcaggccgacaacaugaucacggagcugcuucaaaaggaguauauugaucggcagggaaaaacaccgcugggccucguggaccuguuugucuucuccaccucuuuuuaccugaucagcauuuuccuucaccucguuaagauccccacccaucgccacgugauugggaaaccuugccccaagccucauagacugaaucacaugggaaucuguuccugcggccuguauaaacaccccggcgugccggucaaguggaagcggugaggacuagucccuguucccagagcccacuuuuuuuucuuuuuuugaaauaaaauagccugucuuucagaucuaaaaaaaaaaaaaaaaaaaaaaaaaaaaaaaaaaaaaaaaaaaaaaaaaaaaaaaaaaaaaaaaaaaaaaaaaaaaaaaaaaaaaaaaaaaaaaaaaaaa

SEQ ID NO: 28947 - RNA, 1740 nt, Artificial Sequence
  mRNA product Design a-2 (A100) comprising derived and/or modified sequence from LASV(LASV003-NIG-2008;Clade II)__AIT17580__GPCmut5 (opt5)
aggagaguccgcucagccagguugcagaagcggcuuagcguguguccuaaucuucucucugcguguagguaggccugugccgcaaacaagcuuaccaugggccagaucauuaccuucuuucaagaggugccccacgucaucgaagagguuaugaacauugugcugaucgcccucagccugcuugcuauucugaaggggaucuacaauguggccacaugcggacucuucggccuggucuccuuucuucugcucugugggagaucuugcagcacgaccuauaaaggaguguacgaacugcagacacuggagcucgacauggcgucccugaacaugaccaugccucuuucuuguacaaagaauaacagccaucacuauaucaugguuggcaaugaaaccgggcuggagcucacacugaccaacacguccauuaucaaucauaaauucugcaaccuuucugaugcucacaagaaaaaucuguacgaccaugcccucaugagcauuaucuccaccuuucaccugagcauuccgaacuucaaucaguaugaggccaugucuugugauuuuaacggaggcaagaucuccgugcaguacaaucugagccacacauaugcugucgacgccgcuaaccauugcggcaccauugccaauggggugcuccaaacauucaugcggauggcguggggaggcucuuacaucgcccuggauuccggguguggaagcugggacugcaucaugaccucuuaccaguaucuuauuauccagaacacgacaugggaagaucacugucaguuuucccgccccagcccuauuggcuaccuggggcuccugucccaaagaacccgggacaucuauauuucucgcagacuucugggaacauucaccuggacccucagcgauuccgagagcaacgaaacacccggcggcuacugccugacgcgguggaugcugaucgaggcugagcucaaguguuuugggaauaccgccguugcuaaaugcaacgaaaagcaugacgaggaguucugcgauaugcugcgccuuuuugacuucaauaaacaggccaucagacggcugaaggcgccugcccagaugucuauucagcucaucaacaaagcugugaaugcccugauuaacgaucaacuuaucaugaagaaucaucugcgcgacauuauguguauccccuauugcaacuacuccaaguauugguaccucaaucacacagucaccggaagaacaagccugccucgguguuggcuggugucuaacggcagcuaccucaaugaaacccacuucuccgacgauaucgaacagcaggcugacaacaugauuacggagcugcuucaaaaagaguauauggaucgccaggggaagacaccgcugggacucguggaccuguuugucuucucuaccagcuuuuaccugaucuccauuuuccuucaccucguuaaaauccccacccauagacacgugauuggcaagccuugccccaaaccucaucggcugaaucacauggggaucuguagcugcggacuguauaagcaccccggcgugccggucaaauggaagcgcugaggacuagucccuguucccagagcccacuuuuuuuucuuuuuuugaaauaaaauagccugucuuucagaucuaaaaaaaaaaaaaaaaaaaaaaaaaaaaaaaaaaaaaaaaaaaaaaaaaaaaaaaaaaaaaaaaaaaaaaaaaaaaaaaaaaaaaaaaaaaaaaaaaaaa

SEQ ID NO: 28948 - RNA, 1740 nt, Artificial Sequence
  mRNA product Design a-2 (A100) comprising derived and/or modified sequence from LASV(LASV035-NIG-2009;Clade II)__AIT17588__GPCmut5 (opt5)
aggagaguccgcucagccagguugcagaagcggcuuagcguguguccuaaucuucucucugcguguagguaggccugugccgcaaacaagcuuaccaugggccagaucauuaccuucuuucaagaggugccccacgucaucgaagagguuaugaacauugugcugaucgcccucagccugcuugcuauucugaaggggaucuacaauguggccacaugcggacucuucggccuggucuccuuucuucugcucugugggagaucuugcagcacgaccuauaaaggaguguacgaacugcagacacuggagcucgacauggcgucccugaacaugaccaugccucuuucuuguacaaagaauaacagccaucacuauaucaugguuggcaaugaaaccgggcuggagcucacacugaccaacacguccauuaucaaucauaaauucugcaaccuuucugaugcucacaagaaaaaucuguacgaccaugcccucaugagcauuaucuccaccuuucaccugagcauuccgaacuucaaucaguaugaggccaugucuugugauuuuaacggaggcaagaucuccgugcaguacaaucugagccacgcuuaugccgucgacgcugccaaccauugcggcacaauugcgaauggggugcuccaaaccuucaugcggauggccuggggaggcucuuacaucgcucuggauuccggguguggaagcugggacugcaucaugacaucuuaccaguaucuuauuauccagaacaccacgugggaagaucacugucaguuuucccgccccagcccuauuggcuaccuggggcuccugucccaaagaacacgggacaucuauauuucucgcagacuucugggaaccuucacauggacccucagcgauuccgagggcaacgaaacccccggcggguacugccugacacgguggaugcugaucgaggccgagcucaaguguuuuggaaauacggcuguugccaaaugcaacgaaaagcaugacgaggaguucugcgauaugcugcgccuuuuugacuucaauaaacaggcgaucagacggcugaaggccccugcucagaugagcauucagcucaucaacaaagccgugaaugcucugauuaacgaucaacuuaucaugaagaaucaucugcgcgacauuauguguauccccuauugcaacuacucuaaguauugguaccucaaucacaccgucacaggcaaaaccucccugccuagauguuggcuggugagcaacgggucuuaccucaaugaaacacacuucagcgacgauaucgaacagcaggccgacaacaugauuaccgagcugcuucaaaaggaguauaucgaucggcagggaaaaacgccgcugggccucguggaccuguuugucuucuccacaucuuuuuaccugauuagcaucuuccuucaccucguuaagauucccacccaucgccacgugaucgggaaaccuugccccaagccucauagacugaaucacaugggaauuuguuccugcggccuguauaaacaccccggcgugccggucaaguggaagcggugaggacuagucccuguucccagagcccacuuuuuuuucuuuuuuugaaauaaaauagccugucuuucagaucuaaaaaaaaaaaaaaaaaaaaaaaaaaaaaaaaaaaaaaaaaaaaaaaaaaaaaaaaaaaaaaaaaaaaaaaaaaaaaaaaaaaaaaaaaaaaaaaaaaaa

SEQ ID NO: 28949 - RNA, 1740 nt, Artificial Sequence
  mRNA product Design a-2 (A100) comprising derived and/or modified sequence from LASV(LASV1000-NIG-2009;Clade II)__AIT17782__GPCmut5 (opt5)
aggagaguccgcucagccagguugcagaagcggcuuagcguguguccuaaucuucucucugcguguagguaggccugugccgcaaacaagcuuaccaugggccagaucauuaccuucuuucaagaggugccccacgucaucgaagagguuaugaacauugugcugaucgcccucagccugcuugcuauucugaaggggaucuacaauguggccacaugcggacucuucggccuggucuccuuucuucugcucugugggagaucuugcagcacgaccuauaaaggaguguacgaacugcagacacuggagcucgacauggcgucccugaacaugaccaugccucuuucuuguacaaagaauaacagccaucacuauaucaugguuggcaaugaaaccgggcuggagcucacacugaccaacacguccauuaucaaucauaaauucugcaaccuuucugaugcucacaagaaaaaucuguacgaccaugcccucaugagcauuaucuccaccuuucaccugagcauuccgaacuucaaucaguaugaggccaugucuugugauuuuaacggaggcaagaucuccgugcaguacaaucugagccacacauaugcugucgacgccgcuaaccauugcggcaccauugccaauggggugcuccaaacauucaugcggauggcguggggaggcucuuacaucgcccuggauuccggguguggaagcugggacugcaucaugaccucuuaccaguaucuuauuauccagaacacgacaugggaagaucacugucaguuuucccgccccagcccuauuggcuaccuggggcuccugucccaaagaacccgggacaucuauauuucucgcagacuucugggaacauucaccuggacccucagcgauuccgagggcaacgaaacacccggcggguacugccugacgcgguggaugcugaucgaggcugagcucaaguguuuuggaaauaccgccguugcuaaaugcaacgaaaagcaugacgaggaguucugcgauaugcugcgccuuuuugacuucaauaaacaggccaucaagagacugaaaaccccugcgcagaugagcauucagcucaucaacaaggccgugaaugcucugauuaacgaucaacuuaucaugaagaaucaucugcgggacauuauguguauccccuauugcaacuacucuaaauauugguaccucaaucacacagucacaggcaagaccucccugccucgcuguuggcuggugagcaacgggucuuaccucaaugaaacgcacuucagcgacgauaucgaacagcaggccgacaacaugauuacagagcugcuucaaaaagaguauaucgauagacagggaaagaccccgcugggccucguggaccuguuugucuucuccaccucuuuuuaccugauuagcaucuuccuucaccucguuaaaauucccacacaucggcacgugguggggaagccuugccccaaaccucaucgccugaaucacaugggaaucuguuccugcggccuguauaagcaccccggcgucccggugaaguggaaaagaugaggacuagucccuguucccagagcccacuuuuuuuucuuuuuuugaaauaaaauagccugucuuucagaucuaaaaaaaaaaaaaaaaaaaaaaaaaaaaaaaaaaaaaaaaaaaaaaaaaaaaaaaaaaaaaaaaaaaaaaaaaaaaaaaaaaaaaaaaaaaaaaaaaaaa

SEQ ID NO: 28950 - RNA, 1740 nt, Artificial Sequence
  mRNA product Design a-2 (A100) comprising derived and/or modified sequence from LASV(LASV221-NIG-2010;Clade II)__AIT17624__GPCmut5 (opt5)
aggagaguccgcucagccagguugcagaagcggcuuagcguguguccuaaucuucucucugcguguagguaggccugugccgcaaacaagcuuaccaugggccagaucauuaccuucuuucaagaggugccccacgucaucgaagagguuaugaacauugugcugaucgcccucagccugcuugcuauucugaaggggaucuacaauguggccacaugcggacucuucggccuggucuccuuucuucugcucugugggagaucuugcagcacgaccuauaaaggaguguacgaacugcagacacuggagcucgacauggcgucccugaacaugaccaugccucuuucuuguacaaagaauaacagccaucacuauaucaugguuggcaaugaaaccgggcuggagcucacacugaccaacacguccauuaucaaucauaaauucugcaaccuuucugaugcucacaagaaaaaucuguacgaccaugcccucaugagcauuaucuccaccuuucaccugagcauuccgaacuucaaucaguaugaggccaugucuugugauuuuaacggaggcaagaucuccgugcaguacaaucugagccacacauaugcuauugacgccgcuaaccauugcggcaccaucgccaaugggguccuccaaacauucaugcggauggcguggggaggcucuuacaucgcccuggauuccggguguggaagcugggacugcauuaugaccucuuaccaguaucuuaucauucagaacacgacaugggaagaucacugucaguuuucccgccccagcccuaucggcuaccuggggcuccugucccaaagaacccgggacauuuauaucucucgcagacuucugggaacauucaccuggacccucagcgauuccgagggcaacgaaacacccggcggguacugccugacgcgguggaugcugaucgaggcugagcucaaguguuuuggaaauaccgccguggcuaaaugcaacgaaaagcaugacgaggaguucugcgauaugcugcgccuuuuugacuucaauaaacaggccauuagacggcugaagaccccugcgcagaugagcauccagcucauuaacaaagccguuaaugcucugaucaacgaucaacuuauuaugaagaaucaucugcgcgacaucauguguauccccuauugcaacuacucuaaguauugguaccucaaucacacagugacaggcaaaaccucccugccuagauguuggcuggucagcaacgggucuuaccucaaugaaacgcacuucagcgacgauauugaacagcaggccgacaacaugaucacagagaugcugcaaaaggaguauauggaucggcagggaaaaaccccgcuuggccugguggaccucuuuguguucuccaccucuuuuuaccugauuagcaucuuccugcaccuugucaagauucccacacaucgccacguuaucgggaaaccuugccccaagccucauagacucaaucacaugggaauuuguuccugcggccuguauaaacaccccggcgugccggugaaguggaagcggugaggacuagucccuguucccagagcccacuuuuuuuucuuuuuuugaaauaaaauagccugucuuucagaucuaaaaaaaaaaaaaaaaaaaaaaaaaaaaaaaaaaaaaaaaaaaaaaaaaaaaaaaaaaaaaaaaaaaaaaaaaaaaaaaaaaaaaaaaaaaaaaaaaaaa

SEQ ID NO: 28951 - RNA, 1740 nt, Artificial Sequence
  mRNA product Design a-2 (A100) comprising derived and/or modified sequence from LASV(LASV237-NIG-2010;Clade II)__AIT17638__GPCmut5 (opt5)
aggagaguccgcucagccagguugcagaagcggcuuagcguguguccuaaucuucucucugcguguagguaggccugugccgcaaacaagcuuaccaugggccagaucauuaccuucuuucaagaggugccccacgucaucgaagagguuaugaacauugugcugaucgcccucagccugcuugcuauucugaaggggaucuacaauguggccacaugcggacucuucggccuggucuccuuucuucugcucugugggagaucuugcagcacgaccuauaaaggaguguacgaacugcagacacuggagcucgacauggcgucccugaacaugaccaugccucuuucuuguacaaagaauaacagccaucacuauaucaugguuggcaaugaaaccgggcuggagcucacacugaccaacacguccauuaucaaucauaaauucugcaaccuuucugaugcucacaagaaagaccuguacgaucaugcccucaugagcauuaucuccaccuuucaccugagcauuccgaauuucaaccaguaugaggccaugucuugugacuuuaauggaggcaagaucuccgugcaguacaaccugagccacacauaugcugucgaugccgcuaaucauugcggcaccauugccaacggggugcuccaaacauucaugcggauggcguggggaggcucuuacaucgcccuggacuccggguguggaagcugggauugcaucaugaccucuuaccaguaucuuauuauccagaauacgacaugggaagaccacugucaguuuucccgccccagcccuauuggcuaccuggggcuccugucccaaagaacccgggauaucuauauuucucgcagacuucugggaacauucaccuggacccucagcgacuccgagggcaacgaaacacccggcggguacugccugacgcgguggaugcugaucgaggcugagcucaaguguuuuggaaacaccgccguugcuaaaugcaaugaaaagcaugaugaggaguucugcgacaugcugcgccuuuuugauuucaacaaacaggccaucagacggcugaagaccccugcgcagaugagcauucagcucaucaauaaagccgugaacgcucugauuaaugaccaacuuaucaugaagaaccaucugcgcgacauuauguguauccccuauugcaauuacucuaaguauugguaccucaaccacacagucacaggcaaaaccucccugccuagauguuggcuggugagcaaugggucuuaccucaacgaaacgcacuucagcgaugacaucgaacagcaggccgauaauaugauuacagagcugcuucaaaaggaguauauggaccggcagggaaaaaccccgcugggccucguggaucuguuugucuucuccaccucuuuuuaccugaucagcauuuuccuucaccucaucaagauucccacacaucgccacaucaccgggaaaccuugccccaagccucauagacugaaccacaugggaauuuguuccugcggccuguauaaacaccccggcguuccggugaaguggaagcggugaggacuagucccuguucccagagcccacuuuuuuuucuuuuuuugaaauaaaauagccugucuuucagaucuaaaaaaaaaaaaaaaaaaaaaaaaaaaaaaaaaaaaaaaaaaaaaaaaaaaaaaaaaaaaaaaaaaaaaaaaaaaaaaaaaaaaaaaaaaaaaaaaaaaa

SEQ ID NO: 28952 - RNA, 1740 nt, Artificial Sequence
  mRNA product Design a-2 (A100) comprising derived and/or modified sequence from LASV(LASV253-NIG-2011;Clade II)__AIT17670__GPCmut5 (opt5)
aggagaguccgcucagccagguugcagaagcggcuuagcguguguccuaaucuucucucugcguguagguaggccugugccgcaaacaagcuuaccaugggccagaucauuaccuucuuucaagaggugccccacgucaucgaagagguuaugaacauugugcugaucgcccucagccugcuugcuauucugaaggggaucuacaauguggccacaugcggacucuucggccuggucuccuuucuucugcucugugggagaucuugcagcacgaccuauaaaggaguguacgaacugcagacacuggagcucgacauggcgucccugaacaugaccaugccucuuucuuguacaaagaauaacagccaucacuauaucaugguuggcaaugaaaccgggcuggagcucacacugaccaacacguccauuaucaaucauaaauucugcaaccuuucugaugcucacaagaaaaaucuguacgaccaugcccucaugagcauuaucuccaccuuucaccugagcauuccgaacuucaaucaguaugaggccaugucuugugauuuuaacggaggcaagaucuccgugcaguacaaucugagccacacauaugcugucgacgccgcuaaccauugcggcaccauugccaauggggugcuccaaacauucaugcggauggcguggggaggcucuuacaucgcccuggauuccggguguggaagcugggacugcaucaugaccucuuaccaguaucuuauuauccagaacacgacaugggaagaucacugucaguuuucccgccccagcccuauuggcuaccuggggcuccugucccaaagaacccgggacaucuauauuucucgcagacuucugggaacauucaccuggacccucagcgauuccgagggcaacgaaacacccggcggguacugccugacgcgguggaugcugaucgaggcugagcucaaguguuuuggaaauaccgccguugcuaaaugcaacgaaaagcaugacgaggaguucugcgauaugcugcgccuuuuugacuucaauaaacaggccaucagacggcugaaggcgccugcccagaugagcauucagcucaucaacaaagcugugaaugcccugauuaacgaucaacuuaucaugaagaaucaucugcgcgacauuauguguauccccuauugcaacuacucuaaguauugguaccucaaucacacagucaccggcagaacaucccugccucgguguuggcuggugagcaacgggucuuaccucaaugaaacccacuucagcgacgauaucgaacagcaggcugacaacaugauuacggagcugcuucaaaaagaguauaucgaucgccagggaaagacaccgcugggccucguggaccuguuugucuucuccaccucuuuuuaccugauuagcaucuuccuucaccucguuaaaauucccacccauagacacaucauugggaagccuugccccaaaccucaucggcugaaucacaugggaaucuguuccugcggccuguauaagcaccccggcgugccggugaaauggaagcgcugaggacuagucccuguucccagagcccacuuuuuuuucuuuuuuugaaauaaaauagccugucuuucagaucuaaaaaaaaaaaaaaaaaaaaaaaaaaaaaaaaaaaaaaaaaaaaaaaaaaaaaaaaaaaaaaaaaaaaaaaaaaaaaaaaaaaaaaaaaaaaaaaaaaaa

SEQ ID NO: 28953 - RNA, 1740 nt, Artificial Sequence
  mRNA product Design a-2 (A100) comprising derived and/or modified sequence from LASV(LASV254-NIG-2011;Clade II)__AIT17674__GPCmut5 (opt5)
aggagaguccgcucagccagguugcagaagcggcuuagcguguguccuaaucuucucucugcguguagguaggccugugccgcaaacaagcuuaccaugggccagaucauuaccuucuuucaagaggugccccacgucaucgaagagguuaugaacauugugcugaucgcccucagccugcuugcuauucugaaggggaucuacaauguggccacaugcggacucuucggccuggucuccuuucuucugcucugugggagaucuugcagcacgaccuauaaaggaguguacgaacugcagacacuggagcucgacaugaccaaccugaauaugacaaugccucuuuccuguaccaagaacaauucucaucacuauaucaugguuggcaacgaaacagggcuggagcucacccugacgaauaccagcauuaucaaccauaaauucugcaaucuuuccgaugcgcacaagaaaaaccuguacaaucaugcucucaugucuauuaucagcacauuucaccuguccauuccgaacuucaaucaguaugaggccaugagcugugacuuuaacggaggcaagaucucugugcaguacaaucugucccacagcuaugccgucgaugcugccaaccauugcggcaccauugcuaacggggugcuccaaacauucaugcggauggccuggggaggcucuuacaucgcgcuggacuccggguguggaaauugggauugcaucaugaccagcuaccaguaucuuauuauccagaacacgacaugggaagaccacugucaguuuucucgccccuccccuauuggcuaccuggggcuccugagccaaagaacccgggauaucuauauuucccgcagacuucugggaacauucaccuggacccucucugacagcgagggcaaugaaacacccggcggguacugccugacgcgguggaugcugaucgaggccgagcucaaguguuuuggaaacaccgcuguugccaaaugcaaugaaaagcaugaugaggaguucugcgacaugcugcgccuuuuugauuucaacaaacaggcuaucagacggcugaagaccccugcccaggcgaauauucagcucaucaacaaagccgugaaugcucugauuaacgaccaacuuaucaugaagaaucaucugcgcgauauuauguguauccccuauugcaacuacuccaaguauugguaccucaaucacacagucacaggcaaaaccagccugccuagauguuggcuggugucuaacggguccuaccucaaugaaacgcacuucagcgacgacaucgaacagcaggccgauaacaugauuacagagcugcuucaaaaggaguauauggaccggcagggaaaaaccccgcugggccucguggaucuguuugucuucucuaccagcuuuuaccugaucuccauuuuccuucaccucguuaagauccccacacaucgccacgugauugggaaaccuugccccaagccucauagacugaaccacaugggaaucuguucuugcggccuguauaaacaccccggcgugccggucaaguggaagcggugaggacuagucccuguucccagagcccacuuuuuuuucuuuuuuugaaauaaaauagccugucuuucagaucuaaaaaaaaaaaaaaaaaaaaaaaaaaaaaaaaaaaaaaaaaaaaaaaaaaaaaaaaaaaaaaaaaaaaaaaaaaaaaaaaaaaaaaaaaaaaaaaaaaaa

SEQ ID NO: 28954 - RNA, 1740 nt, Artificial Sequence
  mRNA product Design a-2 (A100) comprising derived and/or modified sequence from LASV(Nig08-A19;Clade III)__ADU56618__GPCmut5 (opt5)
aggagaguccgcucagccagguugcagaagcggcuuagcguguguccuaaucuucucucugcguguagguaggccugugccgcaaacaagcuuaccaugggccagaucgugaccuucuuucaagaggucccccacguuauugaagaggugaugaacaucgugcugauugcccucagcauccuggcuauucuuaaggggcuguacaauaucgccacaugcggacucaucggccuggucacguuccuucugcucuccgggagaucuuguagcaugaccuauaaaggaguguacgaacugcagacacuggagcucaacaugaauacccugaacaugacaaugccucuuuccugcaccaagaauaacucucaucacuauauuaugguuggcaaugaaacagggcuggagcucacccugacgaacaccagccuucugcaucacaaauuuuguaaucucuccgacgcgcauaagaaaaaccuguacgaucacacacugaugucuaucauuagcaccuuccaccucuccaucccgaauuuuaaccaguaugaggcuaugagcugcgacuucaauggaggcaagauuacagugcaguacaaccugucucauuccuaugccaucgaugccgcuaaucacuguggcaccgucgccaacggggugcuucaaacguuuaugcggauggcuuggggaggcagcuacauugcccuggacucugggugcggaaagugggauuguaucaugacauccuaccaguaucucaucauucagaacaccacaugggaagaccauugccaguucagccgccccucuccuaucggcuaccuggggcuucugucccaaagaacccgggauauuuauaucagccgcagacuccugggaaccuuuacauggacgcuguccgacucugagggcaaugaaacccccggcggguacugucucacacgguggaugcugauugaggcggagcuuaaaugcuucggaaacaccgccguugcuaaguguaaugaaaaacacgaugaggaauuuugcgacaugcugcgccucuucgauuuuaacaagcaggccaucagacggcugaaagcuccugcccagaugagcauccagcuuauuaauaaggcggugaacgcccugaucaaugaccaacucauuaugaagaaccaucugcgcgauaucaugugcauucccuauuguaauuacuccaaauauugguaccugaaccacacaagcaccggcagaacgucucucccucggugcuggcuggucuccaaugggagcuaccuuaacgagacacacuucucugacgacaucgaacagcaggcugauaauaugaucaccgagaugcugcaaaaggaguaucucgaccgccagggaaaaaccccgcugggccugguggaucuuuucguguuuagcacauccuucuaccucauuucuaucuuucugcaucuggucaagauucccacccacagacauaucguugggaaaccuugucccaagccucaccggcucaaccacaugggaauuugcagcuguggccuguauaaacagcccggcgugccggugcgcuggaagagaugaggacuagucccuguucccagagcccacuuuuuuuucuuuuuuugaaauaaaauagccugucuuucagaucuaaaaaaaaaaaaaaaaaaaaaaaaaaaaaaaaaaaaaaaaaaaaaaaaaaaaaaaaaaaaaaaaaaaaaaaaaaaaaaaaaaaaaaaaaaaaaaaaaaaa

SEQ ID NO: 28955 - RNA, 1743 nt, Artificial Sequence
  mRNA product Design a-2 (A100) comprising derived and/or modified sequence from LASV(G1180-SLE-2010;Clade IV)__AIT17168__GPCmut5 (opt5)
aggagaguccgcucagccagguugcagaagcggcuuagcguguguccuaaucuucucucugcguguagguaggccugugccgcaaacaagcuuaccaugggccagaucgugaccuucuuucaagaggucccccacguuauugaagaggugaugaacaucgugcugauugcccucagcauccuggcuguccuuaaggggcuguacaauuucgccacaugcggacucgugggccugcuuacguuucugcuccugugugggagauccugcaccgcgucucgguauaaaggaguuuacgaacugcagacacucgagcugaacauggaaacccuuaauaugacaaugccucugagcuguaccaagaacaauucccaucacuauauuauggugggcaacgagacagggcucgagcugacccuuacgaauaccucuaucaucaaccauaaauucugcaaucugagcgacgcucacaagaaaaaccucuacgaucaugcccugauguccauuaucucuacauuucaccugagcauuccgaauuucaaccaguaugaagccauguccugugacuuuaauggaggcaagaucagcguccaguacaaccucucucacuccuaugcuggcgaugccgcuaaucauugcgggaccguggccaacggaguucugcaaacauucaugcgcauggcguggggcgggagcuacauugcccuugacucuggauguggcuccugggauugcaucaugaccagcuaccaguaucugauuauccagaacacgacaugggaggaccacugucaguuuucuagacccuccccuaucggguaccucggacugcuuagccaacggacccgcgauauuuauaucuccagacggcugcucggcacauucaccuggacccugucugacagcgaaggcaaggauacacccgggggauacugccugacgcgcuggaugcucauugaggcugagcugaaauguuuuggcaauaccgccguggcuaagugcaacgaaaaacaugacgaggaguucugcgauaugcuuagacuguuugacuucaauaagcaggccauccagcggcucaaagcgccugcccagauguccauucaacugaucaacaaggcugucaaugcccuuaucaacgaucagcugauuaugaagaaucaccuccgcgacaucauguguauucccuauugcaacuacagcaaauauugguaccugaaucacacaaccacagggaagaccucucugccuaaauguuggcucguguccaacggaagcuaccugaaugaaacgcauuucucugacgauaucgaacagcaagcugacaacaugauuacagagaugcuucagaaggaguauauggaaagacagggcaaaaccccgcuggggcucguggaucuguuugucuucagcaccuccuuuuaccugaucucuaucuuccuucaccucguuaagauucccacacaucggcacaucgugggaaaaagcugcccuaagccccaucgccugaaucacaugggcauuuguuccugcggccuguauaagcagccuggggugcccgucaaauggaagagaugaggacuagucccuguucccagagcccacuuuuuuuucuuuuuuugaaauaaaauagccugucuuucagaucuaaaaaaaaaaaaaaaaaaaaaaaaaaaaaaaaaaaaaaaaaaaaaaaaaaaaaaaaaaaaaaaaaaaaaaaaaaaaaaaaaaaaaaaaaaaaaaaaaaaa

SEQ ID NO: 28956 - RNA, 1743 nt, Artificial Sequence
  mRNA product Design a-2 (A100) comprising derived and/or modified sequence from LASV(G1442-SLE-2011;Clade IV)__AIT17180__GPCmut5 (opt5)
aggagaguccgcucagccagguugcagaagcggcuuagcguguguccuaaucuucucucugcguguagguaggccugugccgcaaacaagcuuaccaugggccagaucgugaccuucuuucaagaggucccccacguuauugaagaggugaugaacaucgugcugauugcccucagcauccuggcuguccuuaaggggcuguacaauguggccacaugcggacucauuggccugguuacguuccuucugcucugugggagauccugcaccacaacccuguauaaaggaguguacgaacugcagacacucgagcugaacauggaaacccuuaauaugacaaugccucugucuuguaccaagaacaauagccaucacuauauccgggucggcaacgagacggggcucgagcugacccuuacaaauaccuccaucauuaaccauaaauuuugcaaucugucugacgcgcacaagaaaaaccucuacgaucaugcucugaugagcaucauuuccacauuccaccugucuaucccgaauuuuaaccaguaugaagccaugagcugugacuucaauggaggcaagauuuccgugcaguacaaccucagccacucuuaugccggcgaugcugccaaucauugcgggaccguugcuaacggagugcugcaaacguuuaugcgcauggccuggggcggguccuacaucgcgcuugacagcggauguggcaacugggauugcauuaugacaucuuaccaguaucugaucauccagaauaccacaugggacgaucacugucaguucuccagacccagcccuauuggguaccucggacugcuuucucaacggacccgcgacgucuauaucuccagacggcugcucggcaccuuuacauggacgcugagcgauuccgagggcaaggacacccccgggggauacugccugacacgcuggaugcucauugaagccgagcugaaauguuucggcaacaccgcuguggccaagugcaaugagaaacaugaugaagaguuuugcgacaugcuuagacuguucgauuuuaacaagcaggcuauccagcggcucaaagccccugcgcagaugucuauucaacugaucaauaaggccgugaacgcucuuaucaaugaccagcugauuaugaagaaccaccuccgcgacaucauguguauucccuauugcaauuacagcaaauauugguaccugaacaauacagccaccgggaagacgucccugccuaaauguuggcucaucagcaacggaucuuaccugaaugaaacacacuucuccgaugacauugagcaggaagcugauaacaugaucaccgagaugcuucaaaaggaguauauggaaagacagggcaaaaccccgcuggggcucgucgaccuguucguuuuuagcacaucuuucuaccugaucagcauuuuucuucaucucgugaagauccccacccaccggcauauugugggaaaauccugcccuaagccccaccgccugaaucauaugggcaucuguucuugcggccuguauaagcagccugggguccccgugagauggaaacggugaggacuagucccuguucccagagcccacuuuuuuuucuuuuuuugaaauaaaauagccugucuuucagaucuaaaaaaaaaaaaaaaaaaaaaaaaaaaaaaaaaaaaaaaaaaaaaaaaaaaaaaaaaaaaaaaaaaaaaaaaaaaaaaaaaaaaaaaaaaaaaaaaaaaa

SEQ ID NO: 28957 - RNA, 1743 nt, Artificial Sequence
  mRNA product Design a-2 (A100) comprising derived and/or modified sequence from LASV(G3010-SLE-2013;Clade IV)__AIT17344__GPCmut5 (opt5)
aggagaguccgcucagccagguugcagaagcggcuuagcguguguccuaaucuucucucugcguguagguaggccugugccgcaaacaagcuuaccaugggccagaucgugaccuucuuucaagaggucccccacguuauugaagaggugaugaacaucgugcugauugcccucagcauccuggcuguccuuaaggggcuguacaauuucgccacaugcggacucgugggccugguuacguuucuucugcucugugggagauccugcaccacaucucuguauaaaggaguguacgaacugcagacccucgagcugaacauggaaacacuuaauaugaccaugccucugagcuguacaaagaacaauucccaucacuauauuauggucggcaacgagaccgggcucgagcugacgcuuaccaauacaucuaucaucaaccauaaauucugcaaucugagcgacgcgcacaagaaaaaccucuacaaucaugcucugauguccauuaucucuaccuuucaccugagcauuccgaacuucaaucaguaugaagccauguccugugauuuuaacggaggcaagaucagcgugcaguacaaucucucucacuccuaugccggcgacgcugccagccauugcgggacaguugcuaacggagugcugcaaaccuucaugcggauggccuggggcgggucuuacauugcgcuugauuccggauguggcaagugggacugcaucaugacgagcuaccaguaucugauuauccagaacacaaccugggaggaucacugucaguuuucucgccccuccccuaucggguaccucggacugcuuagccaaagaacacgggacauuuauaucucccgcagacugcucggcaccuucaccuggacacugucugauagcgaaggcaaagacacgcccgggggauacugccugacccgguggaugcucauugaggccgagcugaaguguuuuggcaauacagcugucgccaaaugcaacgaaaagcaugaugaggaguucugcgacaugcuucgccuguuugauuucaauaaacaggcuauccagagacucaagaccccugcccagauguccauucaacugaucaacaaggcggugaaugcccuuaucaacgaccagcugauuaugaaaaaucaccuccgggauaucauguguauucccuauugcaacuacagcaaguauugguaccugaaucacacaaccacggggaaaacaucucugccuaaguguuggcucguguccaacggaagcuaccugaaugaaacccauuucucugacgacaucgaacagcaagcugauaacaugauuaccgagaugcuucagaaagaguauauggaacgccagggcaagacaccgcuggggcucgucgaccuguuuguuuucagcaccuccuuuuaccugaucucuaucuuccuucaccucgugaaaauucccacacauagacacaucgugggaaagagcugcccuaagccccaucggcugaaucacaugggcauuuguuccugcggccuguauaaacagccugggguccccgugcgcuggaagagaugaggacuagucccuguucccagagcccacuuuuuuuucuuuuuuugaaauaaaauagccugucuuucagaucuaaaaaaaaaaaaaaaaaaaaaaaaaaaaaaaaaaaaaaaaaaaaaaaaaaaaaaaaaaaaaaaaaaaaaaaaaaaaaaaaaaaaaaaaaaaaaaaaaaaa

SEQ ID NO: 28958 - RNA, 1743 nt, Artificial Sequence
  mRNA product Design a-2 (A100) comprising derived and/or modified sequence from LASV(G502-SLE-2009;Clade IV)__AIT17126__GPCmut5 (opt5)
aggagaguccgcucagccagguugcagaagcggcuuagcguguguccuaaucuucucucugcguguagguaggccugugccgcaaacaagcuuaccaugggccagaucgugaccuucuuucaagaggucccccacguuauugaagaggugaugaacaucgugcugauugcccucagcauccuggcuguccuuaaggggcuguacaauuucgccacaugcggacucgugggccugcuuacguuucugcuccugugugggagauccugcaccacaggacuguauaaaggcguuuacgaacuccagacccuggagcuuaacauggaaacacugaauaugaccaugccucucucuuguacaaagaacaauagccaucacuauauuaugguggggaacgagaccggacuggagcuuacgcugaccaauacauccaucaucaaccauaaauucugcaaucucucugacgcgcacaagaaaaaccuguacgaucaugcucugaugagcauuaucuccaccuuucaccucucuauuccgaauuucaaccaguaugaagccaugagcugugacuuuaauggcggcaagaucuccguccaguacaaccugagccacucuuaugccggggaugcugccgaccauugcggaacaguggcuaauggcguucuucaaaccuucaugcggauggccuggggaggguccuacauugcgcuggauagcggcugugggcgcugggacugcaucaugacgucuuaccaguaucucauuauccagaacacaaccugggaggaucacugucaguuuuccagacccagcccuaucggauaccugggccuucugucucaacggacacgcgacauuuauaucuccagacggcuccugggcaccuucaccuggacacugagcgauuccgaagggaaggacacgcccggaggcuacugccucacccgcuggaugcugauugaggccgagcuuaaauguuuugggaacacagcuguggccaagugcaaugaaaaacaugaugaggaguucugcgacaugcugagacucuuugauuucaacaagcaggcuauccagcggcugaaagccccugcgcagaugucuauucaacuuaucaauaaggccgucaacgcucugaucaaugaccagcucgugaugaagaaccaucugcgcgacauuauguguauccccuauugcaauuacagcagauauugguaccugaaccacaccacaaccggacggacgucccucccuaaauguuggcuggugagcaauggcucuuaccuuaacgaaacacacuucuccgaugacauugaacagcaagccgauaauaugaucaccgagaugcugcagaaggaguauauggaacgccaggggaaaaccccgcucggacuggucgaccuguuuguuuucagcacaucuuuuuaccuuauuagcaucuuccuccaccuggugaagauccccacccauagacacauugugggcaaauccugcccuaagccccaucggcugaaccacaugggcaucuguucuugcgggcucuauaaacagccuggaguccccgugaaguggaagcgcugaggacuagucccuguucccagagcccacuuuuuuuucuuuuuuugaaauaaaauagccugucuuucagaucuaaaaaaaaaaaaaaaaaaaaaaaaaaaaaaaaaaaaaaaaaaaaaaaaaaaaaaaaaaaaaaaaaaaaaaaaaaaaaaaaaaaaaaaaaaaaaaaaaaaa

SEQ ID NO: 28959 - RNA, 1743 nt, Artificial Sequence
  mRNA product Design a-2 (A100) comprising derived and/or modified sequence from LASV(G733-SLE-2010;Clade IV)__AIT17154__GPCmut5 (opt5)
aggagaguccgcucagccagguugcagaagcggcuuagcguguguccuaaucuucucucugcguguagguaggccugugccgcaaacaagcuuaccaugggccagaucgugaccuucuuucaagaggucccccacguuauugaagaggugaugaacaucgugcugauugcccucagcauccuggcuguccuuaaggggcuguacaauuucgccacaugcggaauugugggccucguuuccuuucugcuucugugugggagaucuugcacgaccagccucuauaaaggaguguacgaacugcagacacuggagcucaacauggaaacccugaauaugacaaugccucuuuccuguaccaagaacaauucucaucacuauaucauggucggcaacgagacagggcuggagcucacccugacgaauaccagcaucauuaaccauaaauucugcaaucuuuccgacgcgcacaagaaaaaccuguacgaucaugcucucaugucuaucauuagcacauuucaccuguccaucccgaauuucaaccaguaugaagccaugagcugugacuuuaauggaggcaagauuucugugcaguacaaccugucccacagcuaugccggcgaugcugccaaucauugcgggaccaucgcuaacggaguucuccaaacauucaugcggauggccuggggcgggucuuacauugcgcuggacuccggaugugaucgcugggacugcaucaugaccagcuaccaguaucuuaucauucagaacacgacaugggaggaucacugucaguuuucuagacccuccccuaucggcuaccuggggcuccugagccaacggacccgcgacauuuauaucuccagacggcuucugggaacauucaccuggacccucucugauagcgaaggcaaggacacacccggcggguacugccugacgcgcuggaugcugauugaggccgagcucaaauguuuuggaaauaccgcuguggccaagugcaacgaaaaacaugaugaggaguucugcgacaugcugagacuuuuugauuucaauaagcaggcuauccagcggcugaaagccccugcgcagauguccauccaacucauuaacaaggccgucaaugcucugaucaacgaccagcuuauuaugaagaaucaucugcgcgacaucauguguauucccuauugcaacuacagcaaauauugguaccucaaucacacaaccacaggcaagaccucucugccuaaauguuggcugguguccaacgggagcuaccucaaugaaacgcacuucucugaugacaucgaacagcaagccgauaacaugaucacagagaugcugcagaaggaguauauggaaagacagggaaaaaccccgcuuggccugguggaccucuuugucuucagcaccuccuuuuaccugauuucuaucuuccugcaccuuguuaagauucccacacaucggcacgugguggggaaaagcugcccuaagccccaucgccucaaucacaugggaaucuguuccugcggccuguauggccagccugggguccccgugaaguggaaaagaugaggacuagucccuguucccagagcccacuuuuuuuucuuuuuuugaaauaaaauagccugucuuucagaucuaaaaaaaaaaaaaaaaaaaaaaaaaaaaaaaaaaaaaaaaaaaaaaaaaaaaaaaaaaaaaaaaaaaaaaaaaaaaaaaaaaaaaaaaaaaaaaaaaaaa

SEQ ID NO: 28960 - RNA, 1743 nt, Artificial Sequence
  mRNA product Design a-2 (A100) comprising derived and/or modified sequence from MOPV/LASV reassortant(IGS-1;Clade IV)__AFY05576__GPCmut5 (opt5)
aggagaguccgcucagccagguugcagaagcggcuuagcguguguccuaaucuucucucugcguguagguaggccugugccgcaaacaagcuuaccaugggccagaucgugaccuucuuucaagaggucccccacguuauugaagaggugaugaacaucgugcugauugcccucagcguccuggcugugcuuaaggggcuguacaauuucgccacaugcggacucguuggccuggugacguuucuucugcucugugggagauccugcaccacaucucuguauaaaggagucuacgaacugcagacccucgagcugaacauggaaacacuuaauaugaccaugccucugagcuguacaaagaacaauucccaucacuauaucauggugggcaacgagaccgggcucgagcugacgcuuaccaauacaucuauuaucaaccauaaauucugcaaucugagcgacgcgcacaagaaaaaccucuacgaucaugcucugauguccaucauuucuaccuuucaccugagcaucccgaauuucaaccaguaugaagccauguccugugacuuuaauggaggcaagauuagcguucaguacaaccucucucacuccuaugccggcgaugcugccaaucauugcgggacaguggcuaacggaguccugcaaaccuucaugcggauggccuggggcgggagcuacaucgcgcuugacucuggauguggcaacugggauugcauuaugacguccuaccaguaucugaucauucagaauacaaccugggaggaccacugucaguuuagccgccccucuccuaucggguaccucggacugcuuucccaaagaacacgggauaucuauauuagccgcagacugcucggcaccuucaccuggacacuguccgacucugaaggcgaggauacgcccgggggauacugccugacccgguggaugcucaucgaggccgaacugaaguguuuuggcaacacagcuguggccaaaugcaaugagaagcaugacgaagaguucugcgauaugcuucgccuguuugacuucaacaaacaggcuauucagagacucaaggccccugcgcagaugagcauccaacugauuaauaaagccgugaacgcucuuaucaaugaucagcugaucaugaagaaccaccuccgggacauuauguguauccccuauugcaauuacuccaaguauugguaccugaaccacaccacaaccgggcgcacgagccugccuaaauguuggcucgucucuaauggauccuaccugaacgaaacacauuucagcgacgauauugagcagcaagccgacaauaugaucaccgagaugcuucagaaggaauauauggagagacagggcaaaaccccgcuggggcucguugaucuguuuguguucucuaccagcuuuuaccugauuuccaucuuccuucaccucgugaagauccccacacaucggcacauugucggaaaaucuugcccuaagccccaucgccugaaccacaugggcaucuguagcugcggccuguauaaacagccuggggugcccguuaaguggaagagaugaggacuagucccuguucccagagcccacuuuuuuuucuuuuuuugaaauaaaauagccugucuuucagaucuaaaaaaaaaaaaaaaaaaaaaaaaaaaaaaaaaaaaaaaaaaaaaaaaaaaaaaaaaaaaaaaaaaaaaaaaaaaaaaaaaaaaaaaaaaaaaaaaaaaa

SEQ ID NO: 28961 - RNA, 1743 nt, Artificial Sequence
  mRNA product Design a-2 (A100) comprising derived and/or modified sequence from LASV(LM765-SLE-2012;Clade IV)__AIT17814__GPCmut5 (opt5)
aggagaguccgcucagccagguugcagaagcggcuuagcguguguccuaaucuucucucugcguguagguaggccugugccgcaaacaagcuuaccaugggccagaucgugaccuucuuucaagaggucccccacguuauugaagaggugaugaacaucgugcugauugcccucagcauccuggcuguccuuaaggggcuguacaauuucgccacaugcggacucgugggccugguuacguuucuucugcucugugggagauccugcaccacaucucuguauaaaggaguguacgaacugcagacccucgagcugaacauggaaacacuuaauaugaccaugccucugagcuguacaaagaacaauucccaucacuauauuauggucggcaacgagaccgggcucgagcugacgcuuaccaauacaucuaucaucgaccauaaauucugcaaccugagcgaugcgcaccggaagaaucucuacgaccaugcucugauguccauuaucucuaccuuucaccugagcauuccgaacuucaaucaguaugaagccauguccugugauuuuaacggaggcaaaaucagcgugcaguacaaucucucucacuccuaugccaaggacgcugccgaucauugcggcacaguugcuaacggggugcugcaaaccuucaugcgcauggccuggggaggcagcuacauugcgcuugacucuggguguggaagaugggauugcaucaugacguccuaccaguaucugauuauccagaauacaaccugggaggaccacugucaguuuagccggcccucuccuaucggcuaccucgggcugcuuucccaacgcacaagagauauuuauaucagccggcgccugcucggaaccuucaccuggacacuguccgacucugaaggcaaggauacgcccggcggguacugccugaccagauggaugcucauugaggccgagcugaaauguuuuggaaacacagcugucgccaagugcaacgaaaaacaugacgaggaguucugcgauaugcuucggcuguuugacuucaauaagcaggcuauccagcgccucaaagccccugcgcagaugagcauucaacugaucaacaaggccgugaaugcucuuaucaacgaccagcugauuaugaagaaucaccucagagauaucauguguauucccuauugcaacuacuccaaauauugguaccugaaucacaccacaaccggcaagacgagccugccuaaauguuggcucgugucuaacggguccuaccugaaugaaacacauuucagcgacgauaucgaacagcaagccgacaacaugauuaccgagaugcuucagaaggaguauauggaacggcagggaaaaaccccgcugggccucgucgaucuguuuguuuucucuaccagcuuuuaccugaucuccaucuuccuucaccucgugaagauucccacacaucgccacaucguggggaaaccuugccccaagccucauagacugaaucacaugggaauuuguucuugcggccuguauaagcagcccggcgucccggugaaauggaagcggugaggacuagucccuguucccagagcccacuuuuuuuucuuuuuuugaaauaaaauagccugucuuucagaucuaaaaaaaaaaaaaaaaaaaaaaaaaaaaaaaaaaaaaaaaaaaaaaaaaaaaaaaaaaaaaaaaaaaaaaaaaaaaaaaaaaaaaaaaaaaaaaaaaaaa

SEQ ID NO: 28962 - RNA, 1743 nt, Artificial Sequence
  mRNA product Design a-2 (A100) comprising derived and/or modified sequence from LASV(LM776-SLE-2012;Clade IV)__AIT17824__GPCmut5 (opt5)
aggagaguccgcucagccagguugcagaagcggcuuagcguguguccuaaucuucucucugcguguagguaggccugugccgcaaacaagcuuaccaugggccagaucgugaccuucuuucaagaggucccccacguuauugaagaggugaugaacaucgugcugauugcccucagcauccuggcuguccuuaaggggcuguacaauuucgccacaugcggacucgugggccugguuacguuucuucugcucugugggagauccugcaccacaucuguguauaaaggagucuacgaacugcagacccuggagcucaacauggaaacacugaauaugaccaugccucuuagcuguacaaagaacaauucccaucacuauauuauggugggcaacgagaccgggcuggagcucacgcugaccaauacaucuaucaucaaccauaaauucugcaaucuuagcgacgcgcacaagaaaaaccuguacgaucaugcucucauguccauuaucucuaccuuucaccugagcauuccgaauuucaaccaguaugaagccauguccugugacuuuaauggaggcaagaucagcguucaguacaaccugucucacuccuaugccggcgaugcugccaaucauugcgggacaguggcuaacggaguccuccaaaccuucaugcggauggccuggggcgggagcuacauugcgcuggacucuggauguggcaagugggauugcaucaugacguccuaccaguaucuuauuauccagaacacaaccugggaggaccacugucaguuuagccgccccucuccuaucggguaccugggacuccugucccaaagaacacgggauauuuauaucagccgcagacuucugggcaccuucaccuggacacucuccgacucugaaggcaaagauacgcccgggggauacugccugacccgguggaugcugauugaggccgagcucaaguguuuuggcaauacagcuguggccaaaugcaacgaaaagcaugacgaggaguucugcgauaugcugcgccuuuuugacuucaauaaacaggcuauccagagacugaaggccccugcgcagaugagcauucaacucaucaacaaggccgugaaugcucugaucaacgaucagcuuauuaugaaaaaucaucugcgggacaucauguguauucccuauugcaacuacuccaaguauugguaccucaaucacaccacaaccgggaaaacgagccugccuaaguguuggcuggucucuaacggauccuaccucaaugaaacacacuucagcgacgauaucgaacagcaagccgacaacaugauuaccgagaugcugcagaaagaguauauggaacgccagggcaagaccccgcuugggcugguugaucucuuuguguucucuaccagcuuuuaccugaucuccaucuuccugcaccuugugaaaauucccacacauagacacaucgucggaaagucuugcccuaagccccaucggcucaaucacaugggcauuuguagcugcggccuguauaaacagccuggggugcccguucgcuggaagagaugaggacuagucccuguucccagagcccacuuuuuuuucuuuuuuugaaauaaaauagccugucuuucagaucuaaaaaaaaaaaaaaaaaaaaaaaaaaaaaaaaaaaaaaaaaaaaaaaaaaaaaaaaaaaaaaaaaaaaaaaaaaaaaaaaaaaaaaaaaaaaaaaaaaaa

SEQ ID NO: 28963 - RNA, 1743 nt, Artificial Sequence
  mRNA product Design a-2 (A100) comprising derived and/or modified sequence from LASV(Mad39;Clade IV)__ANH09722__GPCmut5 (opt5)
aggagaguccgcucagccagguugcagaagcggcuuagcguguguccuaaucuucucucugcguguagguaggccugugccgcaaacaagcuuaccaugggccagaucgugaccuucuuucaagaggucccccacguuauugaagaggugaugaacaucgugcugauugcccucagcauccuggcuguccuuaaggggcuguacaauguggccacaugcggacucauuggccugguuacguuccuucugcucugugggagauccugcaccacaacccuguauaaaggaguguacgaacugcaggcgcucgagcugaacauggaaacacuuaauaugaccaugccucugucuuguacaaagaacaauagccaucacuauauccgggucggcaacgagaccgggcucgagcugacgcuuaccaauacaucccugaucaaccauaaauuuugcaaucucucugacgcucacaagaaaaaccuguacgaucaugcccugaugagcauuaucuccaccuuccaccucucuauuccgaauuuuaaccaguaugaagccaugagcugugacuucaaugauggaaagaucuccgugcaguacaaccugagccacacauaugcuggcgacaccgccaaucauugcggcacgguugcuaacggggugcuucaaacauuuaugcgcauggccuggggaggcucuuacauugcgcuggauuccggguguggaggcugggacugcaucaugaccagcuaccaguaucucauuauccagaacacaaccugggaggaucacugucaguucucuagacccuccccuaucggguaccugggacuucugagccaacggacccgcgacauuuauaucucuagacggcuccugggcacauuuacguggacccuguccgauagcgaaggcaaggacacacccgggggauacugccucacccgcuggaugcugauugaggccgagcuuaaauguuucggcaauacagcugucgccaagugcaacgaaaaacaugaugaggaauuuugcgacaugcugagacucuucgauuuuaauaagcaggcuauccagcggcugaaagccccugcgcagauguccauucaacuuaucaacaaggccgugaaugcucugaucaacgaccagcucauuaugaagaaucaucugcgcgacaucauguguauucccuauugcaacuacucuaaauauugguaccugaaucacaccgugacggggaagacaagccucccuaaauguuggcuggucuccaacggaagcuaccuuaaugagacccacuucucugaugacaucgaacagcaagccgauaacaugauuaccgagaugcugcagaaggaguauauggaaagacagggcaaaacaccgcucgggcugguugaccuguucguguuuuccaccagcuucuaccuuaucucuaucuuucuccaccuggugaagauucccacacaucggcacgucgugggaaaaccuugccccaagccucaucgccugaaucacaugggcaucuguagcugcggcuucuauaagcagcccgggguuccggugagauggaaacggugaggacuagucccuguucccagagcccacuuuuuuuucuuuuuuugaaauaaaauagccugucuuucagaucuaaaaaaaaaaaaaaaaaaaaaaaaaaaaaaaaaaaaaaaaaaaaaaaaaaaaaaaaaaaaaaaaaaaaaaaaaaaaaaaaaaaaaaaaaaaaaaaaaaaa

SEQ ID NO: 28964 - RNA, 1743 nt, Artificial Sequence
  mRNA product Design a-2 (A100) comprising derived and/or modified sequence from LASV(Z0947-SLE-2011;Clade IV)__AIT17840__GPCmut5 (opt5)
aggagaguccgcucagccagguugcagaagcggcuuagcguguguccuaaucuucucucugcguguagguaggccugugccgcaaacaagcuuaccaugggccagaucgugaccuucuuucaagaggucccccacguuauugaagaggugaugaacaucgugcugauugcccucagcauccuggcuguccuuaaggggcuguacaauuucgccacaugcggacucgugggccugguuacguuucuucugcucugugggagauccugcaccauuucucuguauaaaggaguguacgaacugcagacacucgagcugaacauggaaacccuuaauaugacaaugccucugagcuguaccaagaacaauucccaucacuauaucauggucggcaacgagacagggcucgagcugacccuuacgaauaccucuaucauuaaccauaaauucugcaaucugagcgacgcgcacaagaaaaaccucuacgaucaugcucugauguccaucauuucuacauuucaccugagcaucccgaauuucaaccaguaugaagccauguccugugacuuuaauggaggcaagauuagcgugcaguacaaccucucucacuccuaugccggcgaugcugccaaucauugcgggaccguugcuaacggagugcugcaaacauucaugcggauggccuggggcgggagcuacaucgcgcuugacucuggaugugaucgcugggacugcauuaugaccuccuaccaguaucugaucauccagaacacgacaugggaggaucacugucaguuuagcagacccucuccuauuggcuaccucgggcugcuuucccaacggacccgcgacaucuauauuagcagacggcugcucggaacauucaccuggacccuguccgauucugaaggcaaggacacacccggcggguacugccugacgcgcuggaugcucaucgaggccgagcugaaauguuuuggaaauaccgcugucgccaagugcaacgaaaaacaugaugaggaguucugcgacaugcuuagacuguuugauuucaauaagcaggcuauucagcggcucaaagccccugcgcagaugagcauccaacugaucaacaaggccgugaaugcucuuauuaacgaccagcugaucaugaagaaucaccuccgcgacauuauguguauccccuauugcaacuacuccaaauauugguaccugaaucacacaaccacaggcaagaccagccugccuaaauguuggcucgugucuaacggguccuaccugaaugaaacgcauuucagcgaugacauugaacagcaagccgauaacaugaucacagagaugcuucagaaggaguauauggaaagacagggaaaaaccccgcugggccucgucgaccuguuuguuuucucuaccagcuuuuaccugaucuccauuuuccuucaccucgugaagauccccacacaucggcacauuguggggaaaccuugccccaagccucaucgccugaaucacaugggaaucuguucuugcggccuguauaagcagcccggcgucccggugaaauggaagagaugaggacuagucccuguucccagagcccacuuuuuuuucuuuuuuugaaauaaaauagccugucuuucagaucuaaaaaaaaaaaaaaaaaaaaaaaaaaaaaaaaaaaaaaaaaaaaaaaaaaaaaaaaaaaaaaaaaaaaaaaaaaaaaaaaaaaaaaaaaaaaaaaaaaaa

SEQ ID NO: 28965 - RNA, 1781 nt, Artificial Sequence
  mRNA product Design b-4 (hSL-A64-N5) comprising derived and/or modified sequence from LASV(Josiah;Clade IV)__NP_694870__GPCmut5 (opt1)
aggagagucccgcagucggcguccagcggcucugcuuguucgugugugugucguugcaggccuuauucaagcuuaccaugggccagaucgugaccuucuuccaggaggucccccacgugaucgaggaggugaugaacaucguccugaucgcccucagcgugcuggccgugcugaaggggcucuacaacuucgcgaccugcggccuggucgggcuggugacguuccuccugcugugcggccgcuccugcaccaccagccucuacaaggggguguacgagcugcagacccuggagcucaacauggagacgcugaacaugaccaugccgcuguccugcaccaagaacaacagccaccacuacaucauggucggcaacgagaccggccucgagcugacgcugaccaacaccuccaucaucaaccacaaguucugcaaccucagcgacgcccacaagaagaaccuguacgaccacgcccugauguccaucaucagcaccuuccaccucuccauccccaacuucaaccaguacgaggccaugagcugcgacuucaacgggggcaagaucuccgugcaguacaaccugagccacuccuacgccggggacgcggccaaccacugcggcacgguggccaacgggguccugcagaccuucaugcggauggccuggggcggcagcuacaucgcgcucgacuccgggugcggcaacugggacugcaucaugaccagcuaccaguaccugaucauccagaacaccacgugggaggaccacugccaguucucccggcccagccccaucggguaccugggccuccugucccagcgcacccgggacaucuacaucagccgccggcugcucggcaccuucaccuggacgcugagcgacuccgaggggaaggacaccccgggcggguacugccugacccgcuggaugcucaucgaggccgagcugaagugcuucggcaacaccgccguggccaagugcaacgagaagcacgacgaggaguucugcgacaugcugcggcuguucgacuucaacaagcaggccauccagcgccugaaggcgcccgcccagaugagcauccagcugaucaacaaggccgugaacgcccucaucaacgaccagcugaucaugaagaaccaccuccgggacaucaugugcauccccuacugcaacuacuccaaguacugguaccucaaccacacgaccaccggccgcaccagccugcccaagugcuggcuggucuccaacggcagcuaccucaacgagacgcacuucuccgacgacaucgagcagcaggccgacaacaugaucaccgagaugcugcagaaggaguacauggagcggcaggggaagacgccccugggccucguggaccuguucguguucagcaccuccuucuaccugaucagcaucuuccugcaccucgucaagaucccgacccaccgccacaucguggggaaguccugccccaagccccaccggcugaaccacaugggcaucugcagcugcgggcuguacaagcagcccggcgugccggucaaguggaagcgcugaggacuaguaauaaggaaacuguaugaaugucugugggcaggaagugaagagauccuucuguaaagguuuuuggaauuaugucugcugaauaauaaacuuuuuugaaauaauaaaucugguagaaaaaugagaucucaaaggcucuuuucagagccaccaaaaaaaaaaaaaaaaaaaaaaaaaaaaaaaaaaaaaaaaaaaaaaaaaaaaaaaaaaaaaaaaagaauu

SEQ ID NO: 28966 - RNA, 1778 nt, Artificial Sequence
  mRNA product Design b-4 (hSL-A64-N5) comprising derived and/or modified sequence from LASV(LP;Clade I)__AAF86701__GPCmut5 (opt1)
aggagagucccgcagucggcguccagcggcucugcuuguucgugugugugucguugcaggccuuauucaagcuuaccaugggccagaucaucaccuucuuccaggaggugccccacgucaucgaggaggugaugaacaucgugcugaucgcccucagccugcuggccauccucaaggggcuguacaacaucgcgaccugcggcaucaucgggcuggucgccuuccucuuccugugcggcaaguccugcagccugacgcucaagggcggguacgagcugcagacccuggagcucaacauggagacccugaacaugaccaugccgcuguccugcacgaagaacagcucccaccacuacauccgcgugggcaacgagaccgggcucgagcugacccugaccaacacgagcaucaucaaccacaaguucugcaaccucuccgacgcccacaagaagaaccuguacgaccacgcccugaugagcaucaucuccaccuuccaccucagcauccccaacuucaaccaguacgaggccauguccugcgacuucaacggcgggaagaucagcgugcaguacaaccugucccacagcuacgcgggcgacgccgccgagcacugcgggaccgucgccaacggcgugcugcagaccuucaugcggauggcguggggcgggcgcuacaucgcccucgacuccggcugcgggaacugggacugcaucaugacgagcuaccaguaccugaucauccagaacaccaccugggaggaccacugccaguucucccggcccagccccaucggcuaccugggccuccugucccagcgcacccgggacaucuacaucagccgccggcugcucgggacguucaccuggacccugagcgacuccgagggcaacgagacccccgggggcuacugccugacgcgcuggaugcucaucgaggccgagcugaagugcuucgggaacaccgccguggccaagugcaacgagaagcacgacgaggaguucugcgacaugcugcggcuguucgacuucaacaagcaggcgauccgccggcugaaggcccccgcccagaugagcauccagcugaucaacaaggccgucaacgcccucaucaacgaccagcugaucaugaagaaccaccuccgcgacaucaugugcauccccuacugcaacuacuccaaguacugguaccucaaccacaccagcuccggccggaccagccugcccaagugcuggcugaucuccaacgggagcuaccucaacgagacgcaguucuccgacgacaucgagcagcaggcggacaacaugaucaccgagaugcugcagaaggaguacaucgagcgccagggcaagaccccgcuggggcucguggacaucuucaucuucagcaccuccuucuaccugaucagcaucuuccugcaccugaucaagaucccgacgcaccggcacaucgugggcaagcccugccccaagccccaccgccucaaccacaugggggucugcuccugcggccuguacaagcacccgggcgugcccaccaaguggaagcggugaggacuaguaauaaggaaacuguaugaaugucugugggcaggaagugaagagauccuucuguaaagguuuuuggaauuaugucugcugaauaauaaacuuuuuugaaauaauaaaucugguagaaaaaugagaucucaaaggcucuuuucagagccaccaaaaaaaaaaaaaaaaaaaaaaaaaaaaaaaaaaaaaaaaaaaaaaaaaaaaaaaaaaaaaaaaagaauu

SEQ ID NO: 28967 - RNA, 1778 nt, Artificial Sequence
  mRNA product Design b-4 (hSL-A64-N5) comprising derived and/or modified sequence from LASV(803213;Clade II)__AAF86703__GPCmut5 (opt1)
aggagagucccgcagucggcguccagcggcucugcuuguucgugugugugucguugcaggccuuauucaagcuuaccaugggccagaucaucaccuucuuccaggaggugccccacgucaucgaggaggugaugaacaucgugcugaucgcccucagccugcuggccauccucaaggggaucuacaacgucgcgaccugcggccuguucgggcugaucuccuuccuccugcugugcggccgcagcugcuccgugacguacaaggggguguacgagcuccagacccuggagcugaacauggccaaccucaacaugaccaugccgcugagcugcaccaagaacaacucccaccacuacaucauggucggcaacgagacgggccuggagcucacccugaccaacaccagcaucaucaaccacaaguucugcaaccuguccgacgcccacaagaagaaccucuacgaccacgcccugaugagcaucaucuccacguuccaccugagcauccccaacuucaaccaguacgaggccauguccugcgacuucaacgggggcaagaucagcgugcaguacaaccucucccacagcuucgcgguggacgccgccaaccacugcgggaccaucgccaacggcguccugcagaccuucaugcggauggcguggggcggguccuacaucgcccuggacagcggcugcgggaacugggacugcaucaugaccuccuaccaguaccucaucauccagaacacgaccugggaggaccacugccaguucagccgccccucccccaucggcuaccuggggcugcucagccagcggacccgcgacaucuacaucagccggcgccugcugggcaccuucacguggacccucuccgacagcgagggcaacgaggcccccgggggcuacugccugacccgguggaugcugaucgaggccgagcucaagugcuucgggaacaccgccguggcgaagugcaacgagaagcacgacgaggaguucugcgacaugcugcgccuguucgacuucaacaagcaggccaucaagcggcucaagacgcccgcccagauguccauccagcugaucaacaaggccgugaacgcccugaucaacgaccagcucaucaugaagaaccaccuccgcgacaucaugugcauccccuacugcaacuacagccgguacugguaccugaaccacaccgucaccgggaagaccucccugccccgcugcuggcuggugagcaacggcuccuaccugaacgagacgcacuucagcgacgacaucgagcagcaggcggacaacaugaucaccgagaugcuccagaaggaguacauggaccggcagggcaagaccccgcuggggcugguggaccucuucgucuucuccaccagcuucuaccugaucuccaucuuccugcaccuggugaagaucccgacgcaccgccacaucgugggcaagcccugccccaagccccaccggcucaaccacauggggaucugcagcugcggccuguacaagcacccggggguccccgugaaguggaagcgcugaggacuaguaauaaggaaacuguaugaaugucugugggcaggaagugaagagauccuucuguaaagguuuuuggaauuaugucugcugaauaauaaacuuuuuugaaauaauaaaucugguagaaaaaugagaucucaaaggcucuuuucagagccaccaaaaaaaaaaaaaaaaaaaaaaaaaaaaaaaaaaaaaaaaaaaaaaaaaaaaaaaaaaaaaaaaagaauu

SEQ ID NO: 28968 - RNA, 1778 nt, Artificial Sequence
  mRNA product Design b-4 (hSL-A64-N5) comprising derived and/or modified sequence from LASV(GA391;Clade III)__CAA36645__GPCmut5 (opt1)
aggagagucccgcagucggcguccagcggcucugcuuguucgugugugugucguugcaggccuuauucaagcuuaccaugggccagaucgugaccuucuuccaggaggucccccacgugaucgaggaggugaugaacaucguccugaucgcccucagcauccuggccauccugaaggggcucuacaacguggcgaccugcggccugaucgggcuggugacguuccuccugcuguccggccgcagcugcucccucaucuacaaggggaccuacgagcugcagacccuggagcucaacauggagacccugaacaugacgaugccgcugagcugcaccaagaacaacucccaccacuacauccgggucggcaacgagaccggccucgagcugacccugacgaacaccagcauccucaaccacaaguucugcaaccuguccgacgcccacaagcgcaaccuguacgaccacagccucauguccaucaucagcaccuuccaccuguccauccccaacuucaaccaguacgaggccaugagcugcgacuucaacgggggcaagaucaccgugcaguacaaccugucccacagcuucgccguggacgccgcggggcacugcggcacgcucgccaacgggguccugcagaccuucaugcggauggccuggggcggcuccuacaucgcccuggacagcgggugcggcaacugggacugcaucaugaccuccuaccaguaccucaucauccagaacaccacgugggacgaccacugccaguucagccggcccucccccaucggguaccugggccugcucagccagcgcacccgggacaucuacaucagccgccggcugcugggcaccuucaccuggacgcucuccgacagcgaggggaacgagaccccgggcggguacugccugacccgcuggaugcugaucgaggcggagcucaagugcuucggcaacaccgccguggccaagugcaacgagaagcacgacgaggaguucugcgacaugcugcggcuguucgacuucaacaagcaggccauccgccggcucaagacgcccgcccagauguccauccagcugaucaacaaggcggugaacgcccugaucaacgaccagcucaucaugaagaaccaccuccgcgacaucaugugcauccccuacugcaacuacagccgguacugguaccugaaccacaccuccaccggcaagaccagccugccccgcugcuggcugaucuccaacggcagcuaccugaacgagacgaaguucuccgacgacaucgagcagcaggccgacaacaugaucaccgagaugcuccagaaggaguacaucgaccggcaggggaagacgccccugggccuggucgaccuguucguguucagcaccuccuucuaccucaucagcaucuuccugcaccuggugaagaucccgacccaccgccacaucgucgggaagcccugccccaagccccaccggcucaaccacaugggcaucugcuccugcgggcuguacaagcagccgggcgugcccgugcgcuggaagcggugaggacuaguaauaaggaaacuguaugaaugucugugggcaggaagugaagagauccuucuguaaagguuuuuggaauuaugucugcugaauaauaaacuuuuuugaaauaauaaaucugguagaaaaaugagaucucaaaggcucuuuucagagccaccaaaaaaaaaaaaaaaaaaaaaaaaaaaaaaaaaaaaaaaaaaaaaaaaaaaaaaaaaaaaaaaaagaauu

SEQ ID NO: 28969 - RNA, 1781 nt, Artificial Sequence
  mRNA product Design b-4 (hSL-A64-N5) comprising derived and/or modified sequence from LASV(AV;Clade V)__CCA30314__GPCmut5 (opt1)
aggagagucccgcagucggcguccagcggcucugcuuguucgugugugugucguugcaggccuuauucaagcuuaccaugggccagaucgugaccuucuuccaggaggucccccacgugaucgaggaggugaugaacaucguccugaucgcccucagcauccuggccgugcugaaggggcucuacaacaucgcgaccugcggccugaucgggcugaucacguuccuccugcugugcggccgcuccugcagcuccaaccucuacaaggggguguacgagcugcagagccuggaccucaacauggagacccugaacaugaccaugccgcuguccugcaccaagaacaacagccaccacuacauccgggucggcaacgacacgggccucgagcugacccugaccaacaccuccauccucaaccacaaguucugcaaccugagcgacgcccacaagaaggaccuguacgaccacgcccucauguccaucaucagcacguuccaccuguccauccccaacuucaaccaguacgaggccaugagcugcgacuucaacgggggcaagaucuccgugcaguacaaccugagccacuccuacgccaucgacgcggccaaccacugcgggaccguggccaacggcauccuccagaccuucaugcgcauggccuggggcgggagcuacaucgcgcuggacuccggcugcgggaacugggacugcaucaugaccagcuaccaguaccugaucauccagaacacgaccugggagaaccacugccaguucucccgccccagccccaucggcuaccucgggcugcugagccagcggacccgcgacaucuacaucucccggcgccuccugggcaccuucacguggacccugagcgacuccgagggcaacgccacccccgggggcuacugccucacccgguggaugcugaucgaggccgagcugaagugcuucgggaacacggccgucgccaagugcaacgagaagcacgacgaggaguucugcgacaugcuccgccuguucgacuucaacaagcaggcgaucagccggcugaagucccccgcccagaugagcauccagcucaucaacaaggccgugaacgcccugaucaacgaccagcugaucaugaagaaccaccuccgcgacaucaugugcauccccuacugcaacuacuccaaguacugguaccugaaccacaccaucaccgggaagaccagccugcccaagugcuggcucguguccaacggcagcuaccugaacgagacgcacuucuccgacgacaucgagcagcaggccgacaacaugaucaccgagaugcugcagaaggaguacauggagcggcagggcaagaccccgcucgggcuggucgaccuguucguguucagcaccuccuucuaccugaucagcaucuuccuccgccuggugaagaucccgacgcaccggcacaucgucggcaagcccugccccaagccccaccgccugaaccacauggggaucugcuccugcggccucuacaagcagccgggggugcccgugcgguggaagcgcugaggacuaguaauaaggaaacuguaugaaugucugugggcaggaagugaagagauccuucuguaaagguuuuuggaauuaugucugcugaauaauaaacuuuuuugaaauaauaaaucugguagaaaaaugagaucucaaaggcucuuuucagagccaccaaaaaaaaaaaaaaaaaaaaaaaaaaaaaaaaaaaaaaaaaaaaaaaaaaaaaaaaaaaaaaaaagaauu

SEQ ID NO: 28970 - RNA, 1778 nt, Artificial Sequence
  mRNA product Design b-4 (hSL-A64-N5) comprising derived and/or modified sequence from LASV(Togo/2016/7082;Clade VI)__AMR44577__GPCmut5 (opt1)
aggagagucccgcagucggcguccagcggcucugcuuguucgugugugugucguugcaggccuuauucaagcuuaccaugggccagaucaucaccuucuuccaggaggugccccacgucaucgaggaggugaugaacaucgugcugaucgcccucagccugcuggccauccucaagggggucuacaacguggcgaccugcggcaucaucgggcuggugacguuccuguuccucugcggccgcuccugcagccugaucuacaagggguccuacgagcugcagacccucgagcugaacauggagacccugaacaugaccaugccgcucagcugcacgaagaacuccagccaccacuacauccgggucggcaacgagaccggccuggagcugacccucaccaacacguccaucaucaaccacaaguucugcaaccugagcgacgcccacaagcgcaaccuguacgaccacgcccucauguccauccugagcaccuuccaccuguccauccccaacuucaaccaguacgaggccaugagcugcgacuucaacgggggcaagaucuccgugcaguacaaccucagccacgccuacgcgguggacgccgccgagcacugcgggaccgucgccaacggcgugcugcagaccuucaugcggauggcguggggcggguccuacaucgcccuggacagcggcugcgggaacugggacugcaucaugacguccuaccaguaccucaucauccagaacaccaccugggaggaccacugccaguucagccggcccucccccaucggcuaccuggggcugcucagccagcgcacccgggacaucuacaucagccgccggcugcugggcacguucaccuggacccucuccgacagcgagggcaacgagacccccgggggcuacugccugacgcgcuggaugcugaucgaggccgagcucaagugcuucgggaacaccgccguggccaagugcaacgagaagcacgacgaggaguucugcgacaugcugcggcuguucgacuucaacaagcaggcgauccagcgccucaagucccccgcccagaugagcauccagcugaucaacaaggccgucaacgcccugaucaacgaccagcucaucaugaagaaccaccuccgggacaugaugugcauccccuacugcaacuacuccaaguacugguaccugaaccacaccagcuccgggcgcaccagccugcccaagugcuggcugguguccaacggcagcuaccugaacgagacgcacuucuccgacgacaucgagcagcaggccgacaacaugaucaccgagaugcuccagaaggaguacaucgaccggcagggcaagaccccgcuggggcugguggaccucuucgucuucagcaccuccuucuaccugaucagcaucuuccugcaccugaucaagaucccgacgcaccgccacaucgugggcaagcccugccccaagccccaccggcucaaccacauggggaucugcuccugcggccuguacaagcagccgggggugcccacccgcuggaagcggugaggacuaguaauaaggaaacuguaugaaugucugugggcaggaagugaagagauccuucuguaaagguuuuuggaauuaugucugcugaauaauaaacuuuuuugaaauaauaaaucugguagaaaaaugagaucucaaaggcucuuuucagagccaccaaaaaaaaaaaaaaaaaaaaaaaaaaaaaaaaaaaaaaaaaaaaaaaaaaaaaaaaaaaaaaaaagaauu

SEQ ID NO: 28971 - RNA, 1778 nt, Artificial Sequence
  mRNA product Design b-4 (hSL-A64-N5) comprising derived and/or modified sequence from LASV(KAK-428;Clade n.d. (VII))__ANH09740__GPCmut5 (opt1)
aggagagucccgcagucggcguccagcggcucugcuuguucgugugugugucguugcaggccuuauucaagcuuaccaugggccagaucgugaccuucuuccaggaggucccccacgugaucgaggaggugaugaacaucguccugaucgcccucagccugcuggccauccucaaggggcuguacaacuucgcgaccugcggcgugaucgggcugaucacguuccuccugcugugcggccgcuccugcagcgccaccuacaaggggcaguacgagcuccagacccuggagcugaacauggagucccucaacaugaccaugccgcugagcugcacgaagaacaacucccaccacuacauccgggccggcaacaacaccggccuggagcucacccugaccaacacgagcaucaucucccacaaguucugcaaccugagcgacgcccacaagaagaaccucuacgaccacacccugauguccaucaucaccaccuuccaccugagcauccccaacuucaaccaguacgaggccauguccugcgacuucaacgggggcaagaucagcauccaguacaaccucucccacagcuacgcgggggacgccgcccagcacugcggcacgguggccaacgggguccugcagaccuucaugcgcauggcguggggcggcuccuaccuggcccucgacagcgggugccgcggcugggacugcaucaucuccagcuaccaguaccugaucauccagaacaccaccugggacgaccacugccaguucucccggcccagccccaucggguaccugggcuucgugagccagaagacgcgcgacaucuacaucucccggcgccuccugggcaccuucaccuggacccugagcgacuccgaggggcacgacaugccgggcggguacugccucacgcgguggaugcugaucgaggccgaccugaagugcuucggcaacaccgccguggccaagugcaacgagaagcacgacgaggaguucugcgacauguggcgccucuucgacuucaacaagcaggcgauccagcggcugaaggcccccgcccagaugaacauccagcugaucaacaaggccgucaacgcccucaucaacgaccagcugaugaugaagaaccaccuccgcgacaucaugugcauccccuacugcaacuacagcaaguucugguaccugaacaacaccaccacgggccggaccucccugccccgcugcuggcugaucagcaacggcuccuaccucaacgagacccacuucagcgacgacaucgagcagcaggcggacaacaugaucaccgagaugcugcagaaggaguacauggaccggcaggggaagacgccccugggccucguggaccuguucguguucuccaccagcuucuaccugaucaccaucuuccuccaccuggucaagaucccgacccaccgccacaucguggggaagcccugccccaagccccaccggcugaaccacaugggcaucugcuccugcgggcuguacaagcagccgggcgugcccguccgcuggaagcggugaggacuaguaauaaggaaacuguaugaaugucugugggcaggaagugaagagauccuucuguaaagguuuuuggaauuaugucugcugaauaauaaacuuuuuugaaauaauaaaucugguagaaaaaugagaucucaaaggcucuuuucagagccaccaaaaaaaaaaaaaaaaaaaaaaaaaaaaaaaaaaaaaaaaaaaaaaaaaaaaaaaaaaaaaaaaagaauu

SEQ ID NO: 28972 - RNA, 1778 nt, Artificial Sequence; identical to SEQ ID NO: 28966
  mRNA product Design b-4 (hSL-A64-N5) comprising derived and/or modified sequence from LASV(Pinneo-NIG-1969;Clade I)__AIT17836__GPCmut5 (opt1)

SEQ ID NO: 28973 - RNA, 1778 nt, Artificial Sequence
  mRNA product Design b-4 (hSL-A64-N5) comprising derived and/or modified sequence from LASV(ISTH0009-NIG-2011;Clade II)__AIT17404__GPCmut5 (opt1)
aggagagucccgcagucggcguccagcggcucugcuuguucgugugugugucguugcaggccuuauucaagcuuaccaugggccagaucaucaccuucuuccaggaggugccccacgucaucgaggaggugaugaacaucgugcugaucgcccucagccugcuggccauccucaaggggaucuacaacgucgcgaccugcggccuguucgggcugguguccuuccuccugcugugcggccgcagcugcuccacgaccuacaaggggguguacgagcuccagacccuggagcuggacauggccagccucaacaugaccaugccgcuguccugcacgaagaacaacagccaccacuacaucauggucggcaacgagaccggccuggagcucacccugaccaacacguccaucaucaaccacaaguucugcaaccugagcgacgcccacaagaagaaccucuacgaccacgcccugauguccaucaucagcaccuuccaccuguccauccccaacuucaaccaguacgaggccaugagcugcgacuucaacgggggcaagaucuccgugcaguacaaccucagccacgcguacgccguggacgccgccaaccacugcgggaccaucgcgaacggcguccugcagaccuucaugcggauggccuggggcggguccuacaucgcccuggacagcggcugcggguccugggacugcaucaugacgagcuaccaguaccucaucauccagaacaccaccugggaggaccacugccaguucucccgccccagccccaucggcuaccuggggcugcucagccagcggacccgcgacaucuacaucucccggcgccugcugggcacguucaccuggacccucagcgacuccgagggcaacgagacccccgggggcuacugccugacgcgguggaugcugaucgaggccgagcucaagugcuucgggaacaccgccguggcgaagugcaacgagaagcacgacgaggaguucugcgacaugcugcgccuguucgacuucaacaagcaggccauccggcgccucaagacccccgcccagaugagcauccagcugaucaacaaggccgugaacgcccugaucaacgaccagcucaucaugaagaaccaccuccgggacaucaugugcaucccguacugcaacuacuccaaguacugguaccugaaccacaccgucacggggaagaccagccugccccgcugcuggcugguguccaacggcagcuaccugaacgagacccacuucuccgacgacaucgagcagcaggcggacaacaugaucaccgagcuccugcagaaggaguacauggaccggcagggcaagacgccccuggggcucguggaccuguucgucuucagcaccuccuucuaccugaucagcaucuuccugcaccucaucaagaucccgacccaccgccacaucaccggcaagcccugccccaagccccaccggcugaaccacauggggaucugcuccugcggccuguacaagcacccgggggugcccgugaaguggaagcgcugaggacuaguaauaaggaaacuguaugaaugucugugggcaggaagugaagagauccuucuguaaagguuuuuggaauuaugucugcugaauaauaaacuuuuuugaaauaauaaaucugguagaaaaaugagaucucaaaggcucuuuucagagccaccaaaaaaaaaaaaaaaaaaaaaaaaaaaaaaaaaaaaaaaaaaaaaaaaaaaaaaaaaaaaaaaaagaauu

SEQ ID NO: 28974 - RNA, 1778 nt, Artificial Sequence
  mRNA product Design b-4 (hSL-A64-N5) comprising derived and/or modified sequence from LASV(ISTH2010-NIG-2012;Clade II)__AIT17482__GPCmut5 (opt1)
aggagagucccgcagucggcguccagcggcucugcuuguucgugugugugucguugcaggccuuauucaagcuuaccaugggccagaucaucaccuucuuccaggaggugccccacgucaucgaggaggugaugaacaucgugcugaucgcccucagccugcuggccauccucaaggggaucuacaacgucgcgaccugcggccuguucgggcugguguccuuccuccugcugugcggccgcagcugcuccacgaccuacaaggggguguacgagcuccagacccuggagcuggacauggccagccucaacaugaccaugccgcuguccugcacgaagaacaacagccaccacuacaucauggucggcaacgagaccggccuggagcucacccugaccaacacguccaucaucaaccacaaguucugcaaccugagcgacgcccacaagaagaaccucuacgaccacgcccugauguccaucaucagcaccuuccaccuguccauccccaacuucaaccaguacgaggccaugagcugcgacuucaacgggggcaagaucuccgugcaguacaaccucagccacgcguacgccguggacgccgccaaccacugcgggaccaucgcgaacggcguccugcagaccuucaugcggauggccuggggcggguccuacaucgcccuggacagcggcugcggguccugggacugcaucaugacgagcuaccaguaccucaucauccagaacaucaccugggaggaccacugccaguucucccgccccagccccaucggcuaccuggggcugcucagccagcggacccgcgacaucuacaucucccggcgccugcugggcaccuucacguggacccucagcgacuccgagggcaacgagacccccgggggcuacugccugacccgguggaugcugaucgaggccgagcucaagugcuucgggaacacggccguggcgaagugcaacgagaagcacgacgaggaguucugcgacaugcugcgccuguucgacuucaacaagcaggccauccggcgccucaagacccccgcccagaugagcauccagcugaucaacaaggccgugaacgcccugaucaacgaccagcucaucaugaagaaccaccuccgggacaucaugugcauccccuacugcaacuacuccaaguacugguaccugaaccacaccgucaccgggaagacgagccugccccgcugcuggcugguguccaacggcagcuaccugaacgagacccacuucuccgacgacaucgagcagcaggcggacaacaugaucaccgagcuccugcagaaggaguacaucgaccggcagggcaagaccccgcuggggcucguggaccuguucgucuucagcacguccuucuaccugaucagcaucuuccugcaccucgugaagaucccgacccaccgccacguggucggcaagcccugccccaagccccaccggcugaaccacauggggaucugcuccugcggccuguacaagcacccgggggugcccgugaaguggaagcgcugaggacuaguaauaaggaaacuguaugaaugucugugggcaggaagugaagagauccuucuguaaagguuuuuggaauuaugucugcugaauaauaaacuuuuuugaaauaauaaaucugguagaaaaaugagaucucaaaggcucuuuucagagccaccaaaaaaaaaaaaaaaaaaaaaaaaaaaaaaaaaaaaaaaaaaaaaaaaaaaaaaaaaaaaaaaaagaauu

SEQ ID NO: 28975 - RNA, 1778 nt, Artificial Sequence
  mRNA product Design b-4 (hSL-A64-N5) comprising derived and/or modified sequence from LASV(Lassa virus/H.sapiens-wt/NGA/2015/ISTH_0543;Clade II)__AVO03639__GPCmut5 (opt1)
aggagagucccgcagucggcguccagcggcucugcuuguucgugugugugucguugcaggccuuauucaagcuuaccaugggccagaucaucaccuucuuccaggaggugccccacgucaucgaggaggugaugaacaucgugcugaucgcccucagccugcuggccauccucaaggggaucuacaacgucgcgaccugcggccuguucgggcugguguccuuccuccugcugugcggccgcagcugcuccacgaccuacaaggggguguacgagcuccagacccuggagcuggacauggccaaccucaacaugaccaugccgcugagcugcacgaagaacaacucccaccacuacaucauggucggcaacgagaccggccuggagcucacccugaccaacacgagcaucaucaaccacaaguucugcaaccuguccgacgcccacaagaagaaccucuacgaccacgcccugaugagcaucaucuccaccuuccaccugagcauccccaacuucaaccaguacgaggccauguccugcgacuucaacgggggcaagaucagcgugcaguacaaccucucccacaccuacgcgguggacgccgccaaccacugcgggaccaucgccaacggcguccugcagacguucaugcggauggcguggggcgggagcuacaucgcccuggacuccggcugcgggagcugggacugcaucaugaccuccuaccaguaccucgugauccagaacaccaccugggaggaccacugccaguucagccgccccucccccaucggcuaccuggggcugcucagccagcggacgcgcgacaucuacaucagccggcgccugcugggcaccuucaccuggacccucuccgacagcgagggcaacgagacgcccgggggcuacugccugacccgguggaugcugaucgaggccgagcucaagugcuucgggaacaccgccguggccaagugcaacgagaagcacgacgaggaguucugcgacaugcugcgccuguucgacuucaacaagcaggcgauccggcgccucaagacccccgcccagauguccauccagcugaucaacaaggccgucaacgcccugaucaacgaccagcucaucaugaagaaccaccuccgggacaucaugugcauccccuacugcaacuacagcaaguacugguaccugaaccacacggugaccgggaagaccucccugccccgcugcuggcuggugagcaacggcuccuaccugaacgagacccacuucagcgacgacaucgagcagcaggccgacaacaugaucacggagcuccugcagaaggaguacaucgaccggcagggcaagaccccgcuggggcucgucgaccuguucguguucuccaccagcuucuaccugaucuccaucuuccugcaccucgugaagaucccgacccaccgccacaucacgggcaagcccugccccaagccccaccggcugaaccacauggggaucugcagcugcggccuguacaagcacccggggguccccgugaaguggaagcgcugaggacuaguaauaaggaaacuguaugaaugucugugggcaggaagugaagagauccuucuguaaagguuuuuggaauuaugucugcugaauaauaaacuuuuuugaaauaauaaaucugguagaaaaaugagaucucaaaggcucuuuucagagccaccaaaaaaaaaaaaaaaaaaaaaaaaaaaaaaaaaaaaaaaaaaaaaaaaaaaaaaaaaaaaaaaaagaauu

SEQ ID NO: 28976 - RNA, 1778 nt, Artificial Sequence
  mRNA product Design b-4 (hSL-A64-N5) comprising derived and/or modified sequence from LASV(Lassa virus/H.sapiens-wt/NGA/2016/ISTH_0009;Clade II)__AVO03571__GPCmut5 (opt1)
aggagagucccgcagucggcguccagcggcucugcuuguucgugugugugucguugcaggccuuauucaagcuuaccaugggccagaucaucaccuucuuccaggaggugccccacgucaucgaggaggugaugaacaucgugcugaucgcccucagccugcuggccauccucaaggggaucuacaacgucgcgaccugcggccugcuggggcucguguccuuccugcugcucugcggccgcagcugcuccacgaccuacaaggggguguacgagcugcagacccuggagcucgacauggccagccugaacaugaccaugccgcuguccugcacgaagaacaacagccaccacuacaucauggucggcaacgagaccggccucgagcugacccugaccaacacguccaucaucaaccacaaguucugcaaccucagcgacgcccacaagaagaaccuguacgaccacgcccugauguccaucaucagcaccuuccaccucuccauccccaacuucaaccaguacgaggccaugagcugcgacuucaacgggggccggaucuccgugcaguacaaccugagccacuccuacgcgguggacgccgccaaccacugcgggaccaucgccaacggcguccugcagaccuucaugcgcauggcguggggcgggagcuacaucgcccucgacuccggcugcgggagcugggacugcaucaugacguccuaccaguaccugaucauccagaacaccaccugggaggaccacugccaguucagccggcccagccccaucggcuaccuggggcuccugucccagcgcacccgggacaucuacaucagccgccggcugcucggcacguucaccuggacccuguccgacagcgagggcaacgagacccccgggggcuacugccugacgcgcuggaugcucaucgaggccgagcugaagugcuucgggaacaccgccguggccaagugcaacgagaagcacgacgaggaguucugcgacaugcugcggcuguucgacuucaacaagcaggcgauccgccggcugaagacccccgcccagauguccauccagcugaucaacaaggccgugaacgcccucaucaacgaccagcugaucaugaagaaccaccuccgcgacaucaugugcaucccguacugcaacuacagcaaguacugguaccucaaccacaccgucacggggaagaccucccugccccggugcuggcuggugagcaacggcuccuaccucaacgagacccacuucagcgacgacaucgagcagcaggccgacaacaugaucaccgagcugcugcagaaggaguacaucgaccgccagggcaagacgccccucgggcugguggaccuguucgucuucuccaccagcuucuaccugaucuccaucuuccuccaccuggugaagaucccgacccaccggcacaucaccggcaagcccugccccaagccccaccgccugaaccacauggggaucugcagcugcggccucuacaaccacccgggggugcccgucaaguggaagcggugaggacuaguaauaaggaaacuguaugaaugucugugggcaggaagugaagagauccuucuguaaagguuuuuggaauuaugucugcugaauaauaaacuuuuuugaaauaauaaaucugguagaaaaaugagaucucaaaggcucuuuucagagccaccaaaaaaaaaaaaaaaaaaaaaaaaaaaaaaaaaaaaaaaaaaaaaaaaaaaaaaaaaaaaaaaaagaauu

SEQ ID NO: 28977 - RNA, 1778 nt, Artificial Sequence
  mRNA product Design b-4 (hSL-A64-N5) comprising derived and/or modified sequence from LASV(Lassa virus/H.sapiens-wt/NGA/2016/ISTH_0017;Clade II)__AVO03567__GPCmut5 (opt1)
aggagagucccgcagucggcguccagcggcucugcuuguucgugugugugucguugcaggccuuauucaagcuuaccaugggccagaucaucaccuucuuccaggaggugccccacgucaucgaggaggugaugaacaucgugcugaucgcccucagccugcuggccauccucaaggggaucuacaacgucgcgaccugcggccuguucgggcugguguccuuccuccugcugugcggccgcagcugcuccacgaccuacaaggggguguacgagcuccagacccuggagcuggacauggccagccucaacaugaccaugccgcuguccugcacgaagaacaacagccaccacuacaucauggucggcaacgagaccggccuggagcucacccugaccaacacguccaucaucaaccacaaguucugcaaccugagcgacgcccacaagaagaaccucuacgaccacgcccugauguccaucaucagcaccuuccaccuguccauccccaacuucaaccaguacgaggccaugagcugcgacuucaacgggggcaagaucuccgugcaguacaaccucagccacaccuacgcgaucgacgccgccaaccacugcgggaccaucgccaacggcgugcugcagacguucaugcggauggcguggggcggguccuacaucgcccuggacagcggcugcggguccugggacugcaucaugaccagcuaccaguaccucaucauccagaacaccaccugggaggaccacugccaguucucccgccccagccccaucggcuaccuggggcugcucagccagcggacgcgcgacaucuacaucucccggcgccugcugggcaccuucaccuggacccucagcgacuccgagggcaacgagacgcccgggggcuacugccugacccgguggaugcugaucgaggccgagcucaagugcuucgggaacaccgccgucgccaagugcaacgagaagcacgacgaggaguucugcgacaugcugcgccuguucgacuucaacaagcaggcgauccggcgccucaagacccccgcccagaugagcauccagcugaucaacaaggccgugaacgcccugaucaacgaccagcucaucaugaagaaccaccuccgggacaucaugugcauccccuacugcaacuacuccaaguacugguaccugaaccacacggugaccgggaagaccagccugccccgcugcuggcuggucuccaacggcagcuaccugaacgagacccacuucuccgacgacaucgagcagcaggccgacaacaugaucacggagcuccugcagaaggaguacauggaccggcagggcaagaccccgcuggggcucguggaccuguucguguucagcaccuccuucuaccugaucagcaucuuccugcaccucguccgcaucccgacccaccggcacgugaucggcaagcccugccccaagccccaccgccugaaccacauggggaucugcuccugcggccuguacaagcacccgggggugcccgucaaguggaagcggugaggacuaguaauaaggaaacuguaugaaugucugugggcaggaagugaagagauccuucuguaaagguuuuuggaauuaugucugcugaauaauaaacuuuuuugaaauaauaaaucugguagaaaaaugagaucucaaaggcucuuuucagagccaccaaaaaaaaaaaaaaaaaaaaaaaaaaaaaaaaaaaaaaaaaaaaaaaaaaaaaaaaaaaaaaaaagaauu

SEQ ID NO: 28978 - RNA, 1778 nt, Artificial Sequence
  mRNA product Design b-4 (hSL-A64-N5) comprising derived and/or modified sequence from LASV(Lassa virus/H.sapiens-wt/NGA/2018/ISTH_0959;Clade II)__AVV65099__GPCmut5 (opt1)
aggagagucccgcagucggcguccagcggcucugcuuguucgugugugugucguugcaggccuuauucaagcuuaccaugggccagaucaucaccuucuuccaggaggugccccacgucaucgaggaggugaugaacaucgugcugaucgcccucagccugcuggccauccucaaggggaucuacaacgucgugaccugcggccuguucgggcugguguccuuccuccugcugugcggccgcagcugcuccacgaccuacaagggggucuacgagcuccagacccuggagcuggacauggcgagccucaacaugaccaugccgcuguccugcacgaagaacaacagccaccacuacaucauggugggcaacgagaccggccuggagcucacccugaccaacacguccaucaucaaccacaaguucugcaaccugagcgacgcccacaagaagaaccucuacgaccacgcccugauguccaucaucagcaccuuccaccuguccauccccaacuucaaccaguacgaggccaugagcugcgacuucaacgggggcaagaucuccgugcaguacaaccucagccacgccuacgcgaucgacgccgccaaccacugcgggaccaucgccaacggcguccugcagaccuucaugcggauggcguggggcggguccuacaucgcccuggacagcggcugcggguccugggacugcaucaugacgagcuaccaguaccucaucauccagaacaccaccugggaggaccacugccaguucucccgccccagccccaucggcuaccuggggcugcucagccagcggacccgcgacaucuacaucucccggcgccugcugggcacguucaccuggacccucagcgacuccgagggcaacgagacccccgggggcuacugccugacgcgguggaugcugaucgaggccgagcucaagugcuucgggaacaccgccguggccaagugcaacgagaagcacgacgaggaguucugcgacaugcugcgccuguucgacuucaacaagcaggcgauccggcgccucaagacccccgcccagaugagcauccagcugaucaacaaggccgugaacgcccugaucaacgaccagcucaucaugaagaaccaccuccgggacaucaugugcaucccguacugcaacuacuccaaguacugguaccugaaccacaccgucacggggaagaccagccugccccgcugcuggcugguguccaacggcagcuaccugaacgagacccacuucuccgacgacaucgagcagcaggccgacaacaugaucaccgagcuccugcagaaggaguacaucgaccggcagggcaagacgccccuggggcucguggaccuguucgucuucagcaccuccuucuaccugaucagcaucuuccugcaccucgugaagaucccgacccaccgccacgugaucggcaagcccugccccaagccccaccggcugaaccacauggggaucugcuccugcggccuguacaagcacccggggguccccgugaaguggaagcgcugaggacuaguaauaaggaaacuguaugaaugucugugggcaggaagugaagagauccuucuguaaagguuuuuggaauuaugucugcugaauaauaaacuuuuuugaaauaauaaaucugguagaaaaaugagaucucaaaggcucuuuucagagccaccaaaaaaaaaaaaaaaaaaaaaaaaaaaaaaaaaaaaaaaaaaaaaaaaaaaaaaaaaaaaaaaaagaauu

SEQ ID NO: 28979 - RNA, 1778 nt, Artificial Sequence
  mRNA product Design b-4 (hSL-A64-N5) comprising derived and/or modified sequence from LASV(LASV003-NIG-2008;Clade II)__AIT17580__GPCmut5 (opt1)
aggagagucccgcagucggcguccagcggcucugcuuguucgugugugugucguugcaggccuuauucaagcuuaccaugggccagaucaucaccuucuuccaggaggugccccacgucaucgaggaggugaugaacaucgugcugaucgcccucagccugcuggccauccucaaggggaucuacaacgucgcgaccugcggccuguucgggcugguguccuuccuccugcugugcggccgcagcugcuccacgaccuacaaggggguguacgagcuccagacccuggagcuggacauggccagccucaacaugaccaugccgcuguccugcacgaagaacaacagccaccacuacaucauggucggcaacgagaccggccuggagcucacccugaccaacacguccaucaucaaccacaaguucugcaaccugagcgacgcccacaagaagaaccucuacgaccacgcccugauguccaucaucagcaccuuccaccuguccauccccaacuucaaccaguacgaggccaugagcugcgacuucaacgggggcaagaucuccgugcaguacaaccucagccacaccuacgcgguggacgccgccaaccacugcgggaccaucgccaacggcguccugcagacguucaugcggauggcguggggcggguccuacaucgcccuggacagcggcugcggguccugggacugcaucaugaccagcuaccaguaccucaucauccagaacaccaccugggaggaccacugccaguucucccgccccagccccaucggcuaccuggggcugcucagccagcggacgcgcgacaucuacaucucccggcgccugcugggcaccuucaccuggacccucagcgacuccgagagcaacgagacgccgggcggguacugccugacccgguggaugcugaucgaggccgagcucaagugcuucggcaacaccgccguggccaagugcaacgagaagcacgacgaggaguucugcgacaugcugcgccuguucgacuucaacaagcaggcgauccggcgccucaaggcccccgcccagauguccauccagcugaucaacaaggccgugaacgcccugaucaacgaccagcucaucaugaagaaccaccuccgggacaucaugugcauccccuacugcaacuacagcaaguacugguaccugaaccacaccgucacgggccgcaccucccugccccggugcuggcuggugagcaacggguccuaccugaacgagacccacuucagcgacgacaucgagcagcaggcggacaacaugaucaccgagcuccugcagaaggaguacauggaccgccagggcaagacgccccugggccucguggaccuguucgucuucuccaccagcuucuaccugaucuccaucuuccugcaccucgugaagaucccgacccaccggcacgugaucgggaagcccugccccaagccccaccgccugaaccacaugggcaucugcagcugcgggcuguacaagcacccgggcguccccgugaaguggaagcggugaggacuaguaauaaggaaacuguaugaaugucugugggcaggaagugaagagauccuucuguaaagguuuuuggaauuaugucugcugaauaauaaacuuuuuugaaauaauaaaucugguagaaaaaugagaucucaaaggcucuuuucagagccaccaaaaaaaaaaaaaaaaaaaaaaaaaaaaaaaaaaaaaaaaaaaaaaaaaaaaaaaaaaaaaaaaagaauu

SEQ ID NO: 28980 - RNA, 1778 nt, Artificial Sequence
  mRNA product Design b-4 (hSL-A64-N5) comprising derived and/or modified sequence from LASV(LASV035-NIG-2009;Clade II)__AIT17588__GPCmut5 (opt1)
aggagagucccgcagucggcguccagcggcucugcuuguucgugugugugucguugcaggccuuauucaagcuuaccaugggccagaucaucaccuucuuccaggaggugccccacgucaucgaggaggugaugaacaucgugcugaucgcccucagccugcuggccauccucaaggggaucuacaacgucgcgaccugcggccuguucgggcugguguccuuccuccugcugugcggccgcagcugcuccacgaccuacaaggggguguacgagcuccagacccuggagcuggacauggccagccucaacaugaccaugccgcuguccugcacgaagaacaacagccaccacuacaucauggucggcaacgagaccggccuggagcucacccugaccaacacguccaucaucaaccacaaguucugcaaccugagcgacgcccacaagaagaaccucuacgaccacgcccugauguccaucaucagcaccuuccaccuguccauccccaacuucaaccaguacgaggccaugagcugcgacuucaacgggggcaagaucuccgugcaguacaaccucagccacgcguacgccguggacgccgccaaccacugcgggaccaucgcgaacggcguccugcagaccuucaugcggauggccuggggcggguccuacaucgcccuggacagcggcugcggguccugggacugcaucaugacgagcuaccaguaccucaucauccagaacaccaccugggaggaccacugccaguucucccgccccagccccaucggcuaccuggggcugcucagccagcggacccgcgacaucuacaucucccggcgccugcugggcacguucaccuggacccucagcgacuccgagggcaacgagacccccgggggcuacugccugacgcgguggaugcugaucgaggccgagcucaagugcuucgggaacaccgccguggcgaagugcaacgagaagcacgacgaggaguucugcgacaugcugcgccuguucgacuucaacaagcaggccauccggcgccucaaggcccccgcccagaugagcauccagcugaucaacaaggccgugaacgcgcugaucaacgaccagcucaucaugaagaaccaccuccgggacaucaugugcauccccuacugcaacuacuccaaguacugguaccugaaccacaccgucaccgggaagacgagccugccccgcugcuggcugguguccaacggcagcuaccugaacgagacccacuucuccgacgacaucgagcagcaggccgacaacaugaucaccgagcuccugcagaaggaguacaucgaccggcagggcaagaccccgcuggggcucguggaccuguucgucuucagcacguccuucuaccugaucagcaucuuccugcaccucgugaagaucccgacccaccgccacgugaucggcaagcccugccccaagccccaccggcugaaccacauggggaucugcuccugcggccuguacaagcacccggggguccccgugaaguggaagcgcugaggacuaguaauaaggaaacuguaugaaugucugugggcaggaagugaagagauccuucuguaaagguuuuuggaauuaugucugcugaauaauaaacuuuuuugaaauaauaaaucugguagaaaaaugagaucucaaaggcucuuuucagagccaccaaaaaaaaaaaaaaaaaaaaaaaaaaaaaaaaaaaaaaaaaaaaaaaaaaaaaaaaaaaaaaaaagaauu

SEQ ID NO: 28981 - RNA, 1778 nt, Artificial Sequence
  mRNA product Design b-4 (hSL-A64-N5) comprising derived and/or modified sequence from LASV(LASV1000-NIG-2009;Clade II)__AIT17782__GPCmut5 (opt1)
aggagagucccgcagucggcguccagcggcucugcuuguucgugugugugucguugcaggccuuauucaagcuuaccaugggccagaucaucaccuucuuccaggaggugccccacgucaucgaggaggugaugaacaucgugcugaucgcccucagccugcuggccauccucaaggggaucuacaacgucgcgaccugcggccuguucgggcugguguccuuccuccugcugugcggccgcagcugcuccacgaccuacaaggggguguacgagcuccagacccuggagcuggacauggccagccucaacaugaccaugccgcuguccugcacgaagaacaacagccaccacuacaucauggucggcaacgagaccggccuggagcucacccugaccaacacguccaucaucaaccacaaguucugcaaccugagcgacgcccacaagaagaaccucuacgaccacgcccugauguccaucaucagcaccuuccaccuguccauccccaacuucaaccaguacgaggccaugagcugcgacuucaacgggggcaagaucuccgugcaguacaaccucagccacaccuacgcgguggacgccgccaaccacugcgggaccaucgccaacggcguccugcagacguucaugcggauggcguggggcggguccuacaucgcccuggacagcggcugcggguccugggacugcaucaugaccagcuaccaguaccucaucauccagaacaccaccugggaggaccacugccaguucucccgccccagccccaucggcuaccuggggcugcucagccagcggacgcgcgacaucuacaucucccggcgccugcugggcaccuucaccuggacccucagcgacuccgagggcaacgagacgcccgggggcuacugccugacccgguggaugcugaucgaggccgagcucaagugcuucgggaacaccgccguggccaagugcaacgagaagcacgacgaggaguucugcgacaugcugcgccuguucgacuucaacaagcaggcgaucaagcggcucaagacccccgcccagaugagcauccagcugaucaacaaggccgugaacgcccugaucaacgaccagcucaucaugaagaaccaccuccgcgacaucaugugcauccccuacugcaacuacuccaaguacugguaccugaaccacacggucaccgggaagaccagccugccccggugcuggcugguguccaacggcagcuaccugaacgagacccacuucuccgacgacaucgagcagcaggccgacaacaugaucacggagcuccugcagaaggaguacaucgaccgccagggcaagaccccgcuggggcucguggaccuguucgucuucagcaccuccuucuaccugaucagcaucuuccugcaccucgugaagaucccgacccaccggcacguggucggcaagcccugccccaagccccaccgccugaaccacauggggaucugcuccugcggccuguacaagcacccgggggugcccgugaaguggaagcggugaggacuaguaauaaggaaacuguaugaaugucugugggcaggaagugaagagauccuucuguaaagguuuuuggaauuaugucugcugaauaauaaacuuuuuugaaauaauaaaucugguagaaaaaugagaucucaaaggcucuuuucagagccaccaaaaaaaaaaaaaaaaaaaaaaaaaaaaaaaaaaaaaaaaaaaaaaaaaaaaaaaaaaaaaaaaagaauu

SEQ ID NO: 28982 - RNA, 1778 nt, Artificial Sequence
  mRNA product Design b-4 (hSL-A64-N5) comprising derived and/or modified sequence from LASV(LASV221-NIG-2010;Clade II)__AIT17624__GPCmut5 (opt1)
aggagagucccgcagucggcguccagcggcucugcuuguucgugugugugucguugcaggccuuauucaagcuuaccaugggccagaucaucaccuucuuccaggaggugccccacgucaucgaggaggugaugaacaucgugcugaucgcccucagccugcuggccauccucaaggggaucuacaacgucgcgaccugcggccuguucgggcugguguccuuccuccugcugugcggccgcagcugcuccacgaccuacaaggggguguacgagcuccagacccuggagcuggacauggccagccucaacaugaccaugccgcuguccugcacgaagaacaacagccaccacuacaucauggucggcaacgagaccggccuggagcucacccugaccaacacguccaucaucaaccacaaguucugcaaccugagcgacgcccacaagaagaaccucuacgaccacgcccugauguccaucaucagcaccuuccaccuguccauccccaacuucaaccaguacgaggccaugagcugcgacuucaacgggggcaagaucuccgugcaguacaaccucagccacaccuacgcgaucgacgccgccaaccacugcgggaccaucgccaacggcgugcugcagacguucaugcggauggcguggggcggguccuacaucgcccuggacagcggcugcggguccugggacugcaucaugaccagcuaccaguaccucaucauccagaacaccaccugggaggaccacugccaguucucccgccccagccccaucggcuaccuggggcugcucagccagcggacgcgcgacaucuacaucucccggcgccugcugggcaccuucaccuggacccucagcgacuccgagggcaacgagacgcccgggggcuacugccugacccgguggaugcugaucgaggccgagcucaagugcuucgggaacaccgccgucgccaagugcaacgagaagcacgacgaggaguucugcgacaugcugcgccuguucgacuucaacaagcaggcgauccggcgccucaagacccccgcccagaugagcauccagcugaucaacaaggccgugaacgcccugaucaacgaccagcucaucaugaagaaccaccuccgggacaucaugugcauccccuacugcaacuacuccaaguacugguaccugaaccacacggugaccgggaagaccagccugccccgcugcuggcuggucuccaacggcagcuaccugaacgagacccacuucuccgacgacaucgagcagcaggccgacaacaugaucacggagaugcuccagaaggaguacauggaccggcagggcaagaccccgcuggggcugguggaccucuucguguucagcaccuccuucuaccugaucagcaucuuccugcaccuggucaagaucccgacccaccgccacgugaucggcaagcccugccccaagccccaccggcucaaccacauggggaucugcuccugcggccuguacaagcacccgggggugcccgucaaguggaagcgcugaggacuaguaauaaggaaacuguaugaaugucugugggcaggaagugaagagauccuucuguaaagguuuuuggaauuaugucugcugaauaauaaacuuuuuugaaauaauaaaucugguagaaaaaugagaucucaaaggcucuuuucagagccaccaaaaaaaaaaaaaaaaaaaaaaaaaaaaaaaaaaaaaaaaaaaaaaaaaaaaaaaaaaaaaaaaagaauu

SEQ ID NO: 28983 - RNA, 1778 nt, Artificial Sequence
  mRNA product Design b-4 (hSL-A64-N5) comprising derived and/or modified sequence from LASV(LASV237-NIG-2010;Clade II)__AIT17638__GPCmut5 (opt1)
aggagagucccgcagucggcguccagcggcucugcuuguucgugugugugucguugcaggccuuauucaagcuuaccaugggccagaucaucaccuucuuccaggaggugccccacgucaucgaggaggugaugaacaucgugcugaucgcccucagccugcuggccauccucaaggggaucuacaacgucgcgaccugcggccuguucgggcugguguccuuccuccugcugugcggccgcagcugcuccacgaccuacaaggggguguacgagcuccagacccuggagcuggacauggccagccucaacaugaccaugccgcuguccugcacgaagaacaacagccaccacuacaucauggucggcaacgagaccggccuggagcucacccugaccaacacguccaucaucaaccacaaguucugcaaccugagcgacgcccacaagaaggaccucuacgaccacgcccugauguccaucaucagcaccuuccaccuguccauccccaacuucaaccaguacgaggccaugagcugcgacuucaacgggggcaagaucuccgugcaguacaaccucagccacaccuacgcgguggacgccgccaaccacugcgggaccaucgccaacggcguccugcagacguucaugcggauggcguggggcggguccuacaucgcccuggacagcggcugcggguccugggacugcaucaugaccagcuaccaguaccucaucauccagaacaccaccugggaggaccacugccaguucucccgccccagccccaucggcuaccuggggcugcucagccagcggacgcgcgacaucuacaucucccggcgccugcugggcaccuucaccuggacccucagcgacuccgagggcaacgagacgcccgggggcuacugccugacccgguggaugcugaucgaggccgagcucaagugcuucgggaacaccgccguggccaagugcaacgagaagcacgacgaggaguucugcgacaugcugcgccuguucgacuucaacaagcaggcgauccggcgccucaagacccccgcccagaugagcauccagcugaucaacaaggccgugaacgcccugaucaacgaccagcucaucaugaagaaccaccuccgggacaucaugugcauccccuacugcaacuacuccaaguacugguaccugaaccacacggucaccgggaagaccagccugccccgcugcuggcugguguccaacggcagcuaccugaacgagacccacuucuccgacgacaucgagcagcaggccgacaacaugaucacggagcuccugcagaaggaguacauggaccggcagggcaagaccccgcuggggcucguggaccuguucgucuucagcaccuccuucuaccugaucagcaucuuccugcaccucaucaagaucccgacccaccgccacaucacgggcaagcccugccccaagccccaccggcugaaccacauggggaucugcuccugcggccuguacaagcacccgggggugcccgugaaguggaagcgcugaggacuaguaauaaggaaacuguaugaaugucugugggcaggaagugaagagauccuucuguaaagguuuuuggaauuaugucugcugaauaauaaacuuuuuugaaauaauaaaucugguagaaaaaugagaucucaaaggcucuuuucagagccaccaaaaaaaaaaaaaaaaaaaaaaaaaaaaaaaaaaaaaaaaaaaaaaaaaaaaaaaaaaaaaaaaagaauu

SEQ ID NO: 28984 - RNA, 1778 nt, Artificial Sequence
  mRNA product Design b-4 (hSL-A64-N5) comprising derived and/or modified sequence from LASV(LASV253-NIG-2011;Clade II)__AIT17670__GPCmut5 (opt1)
aggagagucccgcagucggcguccagcggcucugcuuguucgugugugugucguugcaggccuuauucaagcuuaccaugggccagaucaucaccuucuuccaggaggugccccacgucaucgaggaggugaugaacaucgugcugaucgcccucagccugcuggccauccucaaggggaucuacaacgucgcgaccugcggccuguucgggcugguguccuuccuccugcugugcggccgcagcugcuccacgaccuacaaggggguguacgagcuccagacccuggagcuggacauggccagccucaacaugaccaugccgcuguccugcacgaagaacaacagccaccacuacaucauggucggcaacgagaccggccuggagcucacccugaccaacacguccaucaucaaccacaaguucugcaaccugagcgacgcccacaagaagaaccucuacgaccacgcccugauguccaucaucagcaccuuccaccuguccauccccaacuucaaccaguacgaggccaugagcugcgacuucaacgggggcaagaucuccgugcaguacaaccucagccacaccuacgcgguggacgccgccaaccacugcgggaccaucgccaacggcguccugcagacguucaugcggauggcguggggcggguccuacaucgcccuggacagcggcugcggguccugggacugcaucaugaccagcuaccaguaccucaucauccagaacaccaccugggaggaccacugccaguucucccgccccagccccaucggcuaccuggggcugcucagccagcggacgcgcgacaucuacaucucccggcgccugcugggcaccuucaccuggacccucagcgacuccgagggcaacgagacgcccgggggcuacugccugacccgguggaugcugaucgaggccgagcucaagugcuucgggaacaccgccguggccaagugcaacgagaagcacgacgaggaguucugcgacaugcugcgccuguucgacuucaacaagcaggcgauccggcgccucaaggcccccgcccagaugagcauccagcugaucaacaaggccgugaacgcccugaucaacgaccagcucaucaugaagaaccaccuccgggacaucaugugcaucccguacugcaacuacuccaaguacugguaccugaaccacaccgucacggggcgcaccagccugccccggugcuggcugguguccaacggcagcuaccugaacgagacccacuucuccgacgacaucgagcagcaggcggacaacaugaucaccgagcuccugcagaaggaguacaucgaccgccagggcaagacgccccuggggcucguggaccuguucgucuucagcaccuccuucuaccugaucagcaucuuccugcaccucgugaagaucccgacccaccggcacaucaucggcaagcccugccccaagccccaccgccugaaccacauggggaucugcuccugcggccuguacaagcacccgggggugcccgucaaguggaagcggugaggacuaguaauaaggaaacuguaugaaugucugugggcaggaagugaagagauccuucuguaaagguuuuuggaauuaugucugcugaauaauaaacuuuuuugaaauaauaaaucugguagaaaaaugagaucucaaaggcucuuuucagagccaccaaaaaaaaaaaaaaaaaaaaaaaaaaaaaaaaaaaaaaaaaaaaaaaaaaaaaaaaaaaaaaaaagaauu

SEQ ID NO: 28985 - RNA, 1778 nt, Artificial Sequence
  mRNA product Design b-4 (hSL-A64-N5) comprising derived and/or modified sequence from LASV(LASV254-NIG-2011;Clade II)__AIT17674__GPCmut5 (opt1)
aggagagucccgcagucggcguccagcggcucugcuuguucgugugugugucguugcaggccuuauucaagcuuaccaugggccagaucaucaccuucuuccaggaggugccccacgucaucgaggaggugaugaacaucgugcugaucgcccucagccugcuggccauccucaaggggaucuacaacgucgcgaccugcggccuguucgggcugguguccuuccuccugcugugcggccgcagcugcuccacgaccuacaaggggguguacgagcuccagacccuggagcuggacaugaccaaccucaacaugacgaugccgcugagcugcaccaagaacaacucccaccacuacaucauggucggcaacgagaccggccuggagcucacccugacgaacaccagcaucaucaaccacaaguucugcaaccuguccgacgcccacaagaagaaccucuacaaccacgcccugaugagcaucaucuccaccuuccaccugagcauccccaacuucaaccaguacgaggccauguccugcgacuucaacgggggcaagaucagcgugcaguacaaccucucccacagcuacgccguggacgcggccaaccacugcgggaccaucgccaacggcguccugcagacguucaugcggauggccuggggcggguccuacaucgcgcuggacagcggcugcgggaacugggacugcaucaugaccuccuaccaguaccucaucauccagaacaccaccugggaggaccacugccaguucagccgccccucccccaucggcuaccuggggcugcucagccagcggacgcgcgacaucuacaucagccggcgccugcugggcaccuucaccuggacccucuccgacagcgagggcaacgagacgcccgggggcuacugccugacccgguggaugcugaucgaggccgagcucaagugcuucgggaacaccgccguggccaagugcaacgagaagcacgacgaggaguucugcgacaugcugcgccuguucgacuucaacaagcaggccauccggcgccucaagacccccgcgcaggccaacauccagcugaucaacaaggccgugaacgcccugaucaacgaccagcucaucaugaagaaccaccuccgggacaucaugugcauccccuacugcaacuacuccaaguacugguaccugaaccacacggucaccgggaagaccagccugccccgcugcuggcugguguccaacggcagcuaccugaacgagacccacuucuccgacgacaucgagcagcaggccgacaacaugaucacggagcuccugcagaaggaguacauggaccggcagggcaagaccccgcuggggcucguggaccuguucgucuucagcaccuccuucuaccugaucagcaucuuccugcaccucgugaagaucccgacccaccgccacgugaucggcaagcccugccccaagccccaccggcugaaccacauggggaucugcuccugcggccuguacaagcacccggggguccccgugaaguggaagcgcugaggacuaguaauaaggaaacuguaugaaugucugugggcaggaagugaagagauccuucuguaaagguuuuuggaauuaugucugcugaauaauaaacuuuuuugaaauaauaaaucugguagaaaaaugagaucucaaaggcucuuuucagagccaccaaaaaaaaaaaaaaaaaaaaaaaaaaaaaaaaaaaaaaaaaaaaaaaaaaaaaaaaaaaaaaaaagaauu

SEQ ID NO: 28986 - RNA, 1778 nt, Artificial Sequence
  mRNA product Design b-4 (hSL-A64-N5) comprising derived and/or modified sequence from LASV(Nig08-A19;Clade III)__ADU56618__GPCmut5 (opt1)
aggagagucccgcagucggcguccagcggcucugcuuguucgugugugugucguugcaggccuuauucaagcuuaccaugggccagaucgugaccuucuuccaggaggucccccacgugaucgaggaggugaugaacaucguccugaucgcccucagcauccuggccauccugaaggggcucuacaacaucgcgaccugcggccugaucgggcuggugacguuccuccugcuguccggccgcagcugcuccaugaccuacaaggggguguacgagcuccagacccuggagcugaacaugaacacccucaacaugacgaugccgcugagcugcaccaagaacaacucccaccacuacaucauggucggcaacgagaccggccuggagcucacccugacgaacaccagccugcuccaccacaaguucugcaaccuguccgacgcccacaagaagaaccuguacgaccacacccucaugagcaucaucuccaccuuccaccugagcauccccaacuucaaccaguacgaggccauguccugcgacuucaacgggggcaagaucacggugcaguacaaccugagccacuccuacgccaucgacgccgcgaaccacugcgggaccguggccaacggcguccuccagaccuucaugcggauggccuggggcgggagcuacaucgcccuggacuccggcugcgggaagugggacugcaucaugaccagcuaccaguaccugaucauccagaacacgaccugggaggaccacugccaguucucccggcccagccccaucggcuaccucgggcugcugucccagcgcacccgggacaucuacaucagccgccggcuccugggcaccuucacguggacccugagcgacuccgagggcaacgagacccccgggggcuacugccucacccgcuggaugcugaucgaggcggagcugaagugcuucgggaacacggccguggccaagugcaacgagaagcacgacgaggaguucugcgacaugcuccggcuguucgacuucaacaagcaggccauccgccggcugaaggcccccgcgcagaugagcauccagcucaucaacaaggccgugaacgcccugaucaacgaccagcugaucaugaagaaccaccuccgcgacaucaugugcauccccuacugcaacuacuccaaguacugguaccugaaccacaccagcaccgggcggaccucccugccccgcugcuggcucgucagcaacggcuccuaccugaacgagacgcacuucagcgacgacaucgagcagcaggccgacaacaugaucaccgagaugcugcagaaggaguaccucgaccggcagggcaagaccccgcuggggcugguggaccuguucguguucuccaccagcuucuaccucaucuccaucuuccugcaccuggucaagaucccgacgcaccgccacaucgugggcaagcccugccccaagccccaccggcucaaccacauggggaucugcagcugcggccuguacaagcagccgggggugcccguccgcuggaagcggugaggacuaguaauaaggaaacuguaugaaugucugugggcaggaagugaagagauccuucuguaaagguuuuuggaauuaugucugcugaauaauaaacuuuuuugaaauaauaaaucugguagaaaaaugagaucucaaaggcucuuuucagagccaccaaaaaaaaaaaaaaaaaaaaaaaaaaaaaaaaaaaaaaaaaaaaaaaaaaaaaaaaaaaaaaaaagaauu

SEQ ID NO: 28987 - RNA, 1781 nt, Artificial Sequence
  mRNA product Design b-4 (hSL-A64-N5) comprising derived and/or modified sequence from LASV(G1180-SLE-2010;Clade IV)__AIT17168__GPCmut5 (opt1)
aggagagucccgcagucggcguccagcggcucugcuuguucgugugugugucguugcaggccuuauucaagcuuaccaugggccagaucgugaccuucuuccaggaggucccccacgugaucgaggaggugaugaacaucguccugaucgcccucagcauccuggccgugcugaaggggcucuacaacuucgcgaccugcggccugguggggcugcucaccuuccugcugcucugcggccgcuccugcaccgccagccgguacaagggggucuacgagcugcagacccuggagcucaacauggagacccugaacaugacgaugccgcuguccugcaccaagaacaacagccaccacuacaucauggugggcaacgagaccggccucgagcugacccugacgaacaccuccaucaucaaccacaaguucugcaaccucagcgacgcccacaagaagaaccuguacgaccacgcccugauguccaucaucagcaccuuccaccucuccauccccaacuucaaccaguacgaggccaugagcugcgacuucaacgggggcaagaucuccgugcaguacaaccugagccacuccuacgcgggggacgccgccaaccacugcggcaccgucgccaacggggugcugcagacguucaugcgcauggcguggggcggcagcuacaucgcccucgacuccgggugcggcagcugggacugcaucaugaccuccuaccaguaccugaucauccagaacaccaccugggaggaccacugccaguucagccggcccucccccaucggguaccugggccuccugagccagcgcacgcgggacaucuacaucagccgccggcugcucggcaccuucaccuggacccuguccgacagcgaggggaaggacacgccgggcggguacugccugacccgcuggaugcucaucgaggccgagcugaagugcuucggcaacaccgccguggccaagugcaacgagaagcacgacgaggaguucugcgacaugcugcggcuguucgacuucaacaagcaggcgauccagcgccugaaggcccccgcccagauguccauccagcugaucaacaaggccgucaacgcccucaucaacgaccagcugaucaugaagaaccaccuccgggacaucaugugcauccccuacugcaacuacagcaaguacugguaccucaaccacaccacgaccggcaagaccucccugcccaagugcuggcuggugagcaacggcuccuaccucaacgagacccacuucagcgacgacaucgagcagcaggcggacaacaugaucacggagaugcugcagaaggaguacauggagcgccaggggaagacgccccugggccucguggaccuguucgucuucuccaccagcuucuaccugaucuccaucuuccugcaccucgugaagaucccgacccaccggcacaucgugggcaagagcugccccaagccccaccgccugaaccacauggggaucugcuccugcgggcuguacaagcagcccggcgucccggugaaguggaagcggugaggacuaguaauaaggaaacuguaugaaugucugugggcaggaagugaagagauccuucuguaaagguuuuuggaauuaugucugcugaauaauaaacuuuuuugaaauaauaaaucugguagaaaaaugagaucucaaaggcucuuuucagagccaccaaaaaaaaaaaaaaaaaaaaaaaaaaaaaaaaaaaaaaaaaaaaaaaaaaaaaaaaaaaaaaaaagaauu

SEQ ID NO: 28988 - RNA, 1781 nt, Artificial Sequence
  mRNA product Design b-4 (hSL-A64-N5) comprising derived and/or modified sequence from LASV(G1442-SLE-2011;Clade IV)__AIT17180__GPCmut5 (opt1)
aggagagucccgcagucggcguccagcggcucugcuuguucgugugugugucguugcaggccuuauucaagcuuaccaugggccagaucgugaccuucuuccaggaggucccccacgugaucgaggaggugaugaacaucguccugaucgcccucagcauccuggccgugcugaaggggcucuacaacguggcgaccugcggccugaucgggcuggucacguuccuccugcugugcggccgcuccugcaccaccacccucuacaaggggguguacgagcugcagacgcuggagcucaacauggagacccugaacaugaccaugccgcugagcugcaccaagaacaacucccaccacuacauccgggugggcaacgagacgggccucgagcugacccugaccaacaccagcaucaucaaccacaaguucugcaaccucuccgacgcccacaagaagaaccuguacgaccacgcccugaugagcaucaucuccacguuccaccucagcauccccaacuucaaccaguacgaggccauguccugcgacuucaacgggggcaagaucagcguccaguacaaccugucccacagcuacgccggggacgcggccaaccacugcggcaccguggccaacggggugcugcagaccuucaugcgcauggccuggggcggcuccuacaucgcgcucgacagcgggugcggcaacugggacugcaucaugaccuccuaccaguaccugaucauccagaacacgaccugggacgaccacugccaguucagccgccccucccccaucggguaccugggccuccugagccagcggacccgcgacgucuacaucucccggcgccugcucggcaccuucacguggacccugagcgacagcgaggggaaggacaccccgggcggguacugccugacccgguggaugcucaucgaggccgagcugaagugcuucggcaacacggccguggccaagugcaacgagaagcacgacgaggaguucugcgacaugcugcgccucuucgacuucaacaagcaggccauccagcggcugaaggcgcccgcccagauguccauccagcugaucaacaaggccgugaacgcccucaucaacgaccagcugaucaugaagaaccaccuccgcgacaucaugugcauccccuacugcaacuacagcaaguacugguaccugaacaacaccgccaccggcaagaccucccugcccaagugcuggcugaucagcaacggcuccuaccucaacgagacgcacuucagcgacgacaucgagcaggaggcggacaacaugaucaccgagaugcugcagaaggaguacauggagcggcaggggaagacgccccugggccucgucgaccuguucguguucuccaccagcuucuaccugaucuccaucuuccugcaccucgugaagaucccgacccaccgccacaucgucggcaagagcugccccaagccccaccggcugaaccacauggggaucugcuccugcgggcuguacaagcagcccggcgugccggugcgcuggaagcggugaggacuaguaauaaggaaacuguaugaaugucugugggcaggaagugaagagauccuucuguaaagguuuuuggaauuaugucugcugaauaauaaacuuuuuugaaauaauaaaucugguagaaaaaugagaucucaaaggcucuuuucagagccaccaaaaaaaaaaaaaaaaaaaaaaaaaaaaaaaaaaaaaaaaaaaaaaaaaaaaaaaaaaaaaaaaagaauu

SEQ ID NO: 28989 - RNA, 1781 nt, Artificial Sequence
  mRNA product Design b-4 (hSL-A64-N5) comprising derived and/or modified sequence from LASV(G3010-SLE-2013;Clade IV)__AIT17344__GPCmut5 (opt1)
aggagagucccgcagucggcguccagcggcucugcuuguucgugugugugucguugcaggccuuauucaagcuuaccaugggccagaucgugaccuucuuccaggaggucccccacgugaucgaggaggugaugaacaucguccugaucgcccucagcauccuggccgugcugaaggggcucuacaacuucgcgaccugcggccugguggggcuggucacguuccuccugcugugcggccgcuccugcaccaccagccucuacaaggggguguacgagcugcagacccuggagcucaacauggagacgcugaacaugaccaugccgcuguccugcaccaagaacaacagccaccacuacaucauggugggcaacgagaccggccucgagcugacgcugaccaacaccuccaucaucaaccacaaguucugcaaccucagcgacgcccacaagaagaaccuguacaaccacgcccugauguccaucaucagcaccuuccaccucuccauccccaacuucaaccaguacgaggccaugagcugcgacuucaacgggggcaagaucuccguccaguacaaccugagccacuccuacgccggggacgcggccagccacugcggcacgguggccaacggggugcugcagaccuucaugcggauggccuggggcggcuccuacaucgcgcucgacagcgggugcggcaagugggacugcaucaugaccuccuaccaguaccugaucauccagaacaccacgugggaggaccacugccaguucagccgccccucccccaucggguaccugggccuccugagccagcggacccgcgacaucuacaucagccggcgccugcucggcaccuucaccuggacgcuguccgacagcgaggggaaggacaccccgggcggguacugccugacccgguggaugcucaucgaggccgagcugaagugcuucggcaacaccgccgucgccaagugcaacgagaagcacgacgaggaguucugcgacaugcugcgccucuucgacuucaacaagcaggccauccagcggcugaagacgcccgcgcagauguccauccagcugaucaacaaggccgugaacgcccucaucaacgaccagcugaucaugaagaaccaccuccgcgacaucaugugcauccccuacugcaacuacagcaaguacugguaccugaaccacaccaccaccggcaagacgucccugcccaagugcuggcuggugagcaacggcuccuaccucaacgagacccacuucagcgacgacaucgagcagcaggccgacaacaugaucaccgagaugcugcagaaggaguacauggagcggcaggggaagacgccccugggccucgucgaccuguucguguucuccaccagcuucuaccugaucuccaucuuccugcaccucgugaagaucccgacccaccgccacaucgucggcaagagcugccccaagccccaccggcugaaccacauggggaucugcuccugcgggcuguacaagcagcccggcgugccggugcgcuggaagcggugaggacuaguaauaaggaaacuguaugaaugucugugggcaggaagugaagagauccuucuguaaagguuuuuggaauuaugucugcugaauaauaaacuuuuuugaaauaauaaaucugguagaaaaaugagaucucaaaggcucuuuucagagccaccaaaaaaaaaaaaaaaaaaaaaaaaaaaaaaaaaaaaaaaaaaaaaaaaaaaaaaaaaaaaaaaaagaauu

SEQ ID NO: 28990 - RNA, 1781 nt, Artificial Sequence
  mRNA product Design b-4 (hSL-A64-N5) comprising derived and/or modified sequence from LASV(G502-SLE-2009;Clade IV)__AIT17126__GPCmut5 (opt1)
aggagagucccgcagucggcguccagcggcucugcuuguucgugugugugucguugcaggccuuauucaagcuuaccaugggccagaucgugaccuucuuccaggaggucccccacgugaucgaggaggugaugaacaucguccugaucgcccucagcauccuggccgugcugaaggggcucuacaacuucgcgaccugcggccugguggggcugcucacguuccugcugcucugcggccgcuccugcaccaccgggcuguacaagggcgucuacgagcugcagacccucgagcugaacauggagacgcugaacaugaccaugccgcucagcugcaccaagaacaacucccaccacuacaucauggugggcaacgagaccgggcuggagcugacgcucaccaacaccagcaucaucaaccacaaguucugcaaccuguccgacgcccacaagaagaaccuguacgaccacgcccucaugagcaucaucuccaccuuccaccugagcauccccaacuucaaccaguacgaggccauguccugcgacuucaacggcgggaagaucagcgugcaguacaaccugucccacagcuacgccggcgacgcggccgaccacugcgggacggucgccaacggcgugcuccagaccuucaugcggauggccuggggcggguccuacaucgcgcuggacagcggcugcgggcggugggacugcaucaugaccuccuaccaguaccugaucauccagaacaccacgugggaggaccacugccaguucagccgccccucccccaucggcuaccucggccugcugagccagcggacccgcgacaucuacaucucccggcgccuccuggggaccuucaccuggacgcugagcgacagcgagggcaaggacacccccgggggcuacugccucacccgguggaugcugaucgaggccgagcugaagugcuucgggaacaccgccguggccaagugcaacgagaagcacgacgaggaguucugcgacaugcuccgccuguucgacuucaacaagcaggccauccagcggcugaaggcgcccgcccagauguccauccagcucaucaacaaggccgucaacgcccugaucaacgaccagcuggugaugaagaaccaccuccgcgacaucaugugcauccccuacugcaacuacagccgguacugguaccugaaccacacgaccaccggccgcaccucccugcccaagugcuggcucgugagcaacggguccuaccugaacgagacgcacuucagcgacgacaucgagcagcaggccgacaacaugaucaccgagaugcugcagaaggaguacauggagcggcagggcaagaccccgcucgggcuggucgaccuguucguguucuccaccagcuucuaccugaucuccaucuuccuccaccuggugaagaucccgacgcaccgccacaucgucggcaagagcugccccaagccccaccggcugaaccacauggggaucugcuccugcggccucuacaagcagcccggcgugccggugaaguggaagcgcugaggacuaguaauaaggaaacuguaugaaugucugugggcaggaagugaagagauccuucuguaaagguuuuuggaauuaugucugcugaauaauaaacuuuuuugaaauaauaaaucugguagaaaaaugagaucucaaaggcucuuuucagagccaccaaaaaaaaaaaaaaaaaaaaaaaaaaaaaaaaaaaaaaaaaaaaaaaaaaaaaaaaaaaaaaaaagaauu

SEQ ID NO: 28991 - RNA, 1781 nt, Artificial Sequence
  mRNA product Design b-4 (hSL-A64-N5) comprising derived and/or modified sequence from LASV(G733-SLE-2010;Clade IV)__AIT17154__GPCmut5 (opt1)
aggagagucccgcagucggcguccagcggcucugcuuguucgugugugugucguugcaggccuuauucaagcuuaccaugggccagaucgugaccuucuuccaggaggucccccacgugaucgaggaggugaugaacaucguccugaucgcccucagcauccuggccgugcugaaggggcucuacaacuucgcgaccugcggcaucguggggcuggucuccuuccugcuccugugcggccgcagcugcacgaccucccuguacaaggggguguacgagcuccagacccuggagcugaacauggagacccucaacaugacgaugccgcugagcugcaccaagaacaacucccaccacuacaucauggugggcaacgagaccggccuggagcucacccugacgaacaccagcaucaucaaccacaaguucugcaaccuguccgacgcccacaagaagaaccucuacgaccacgcccugaugagcaucaucuccaccuuccaccugagcauccccaacuucaaccaguacgaggccauguccugcgacuucaacgggggcaagaucagcguccaguacaaccucucccacagcuacgccggggacgcggccaaccacugcggcaccaucgccaacggggugcugcagacguucaugcggauggccuggggcggcuccuacaucgcgcuggacagcgggugcgaccggugggacugcaucaugaccuccuaccaguaccucaucauccagaacaccaccugggaggaccacugccaguucagccgccccucccccaucggcuaccuggggcugcucagccagcggacgcgcgacaucuacaucagccggcgccugcugggcaccuucaccuggacccucuccgacagcgagggcaaggacacgcccgggggcuacugccugacccgguggaugcugaucgaggccgagcucaagugcuucgggaacaccgccguggccaagugcaacgagaagcacgacgaggaguucugcgacaugcugcgccuguucgacuucaacaagcaggccauccagcggcucaaggcgcccgcccagauguccauccagcugaucaacaaggccgucaacgcccugaucaacgaccagcucaucaugaagaaccaccuccgcgacaucaugugcauccccuacugcaacuacagcaaguacugguaccugaaccacaccacgaccgggaagaccucccugcccaagugcuggcuggugagcaacggcuccuaccugaacgagacccacuucagcgacgacaucgagcagcaggccgacaacaugaucacggagaugcuccagaaggaguacauggagcggcagggcaagaccccgcuggggcugguggaccucuucgucuucuccaccagcuucuaccugaucuccaucuuccugcaccuggugaagaucccgacccaccgccacguggucggcaagagcugccccaagccccaccggcucaaccacauggggaucugcuccugcggccuguacgggcagcccggcgugccggugaaguggaagcgcugaggacuaguaauaaggaaacuguaugaaugucugugggcaggaagugaagagauccuucuguaaagguuuuuggaauuaugucugcugaauaauaaacuuuuuugaaauaauaaaucugguagaaaaaugagaucucaaaggcucuuuucagagccaccaaaaaaaaaaaaaaaaaaaaaaaaaaaaaaaaaaaaaaaaaaaaaaaaaaaaaaaaaaaaaaaaagaauu

SEQ ID NO: 28992 - RNA, 1781 nt, Artificial Sequence
  mRNA product Design b-4 (hSL-A64-N5) comprising derived and/or modified sequence from MOPV/LASV reassortant(IGS-1;Clade IV)__AFY05576__GPCmut5 (opt1)
aggagagucccgcagucggcguccagcggcucugcuuguucgugugugugucguugcaggccuuauucaagcuuaccaugggccagaucgugaccuucuuccaggaggucccccacgugaucgaggaggugaugaacaucguccugaucgcccucagcgugcuggccgugcugaaggggcucuacaacuucgcgaccugcggccuggucgggcuggugacguuccuccugcugugcggccgcuccugcaccaccagccucuacaaggggguguacgagcugcagacccuggagcucaacauggagacgcugaacaugaccaugccgcuguccugcaccaagaacaacagccaccacuacaucauggucggcaacgagaccggccucgagcugacgcugaccaacaccuccaucaucaaccacaaguucugcaaccucagcgacgcccacaagaagaaccuguacgaccacgcccugauguccaucaucagcaccuuccaccucuccauccccaacuucaaccaguacgaggccaugagcugcgacuucaacgggggcaagaucuccgugcaguacaaccugagccacuccuacgccggggacgcggccaaccacugcggcacgguggccaacgggguccugcagaccuucaugcggauggccuggggcggcagcuacaucgcgcucgacuccgggugcggcaacugggacugcaucaugaccagcuaccaguaccugaucauccagaacaccacgugggaggaccacugccaguucucccggcccagccccaucggguaccugggccuccugucccagcgcacccgggacaucuacaucagccgccggcugcucggcaccuucaccuggacgcugagcgacuccgagggggaggacaccccgggcggguacugccugacccgcuggaugcucaucgaggccgagcugaagugcuucggcaacaccgccguggccaagugcaacgagaagcacgacgaggaguucugcgacaugcugcggcuguucgacuucaacaagcaggccauccagcgccugaaggcgcccgcccagaugagcauccagcugaucaacaaggccgugaacgcccucaucaacgaccagcugaucaugaagaaccaccuccgggacaucaugugcauccccuacugcaacuacuccaaguacugguaccucaaccacacgaccaccggccgcaccagccugcccaagugcuggcuggucuccaacggcagcuaccucaacgagacgcacuucuccgacgacaucgagcagcaggccgacaacaugaucaccgagaugcugcagaaggaguacauggagcggcaggggaagacgccccugggccucguggaccuguucguguucagcaccuccuucuaccugaucagcaucuuccugcaccucgucaagaucccgacccaccgccacaucguggggaaguccugccccaagccccaccggcugaaccacaugggcaucugcagcugcgggcuguacaagcagcccggcgugccggucaaguggaagcgcugaggacuaguaauaaggaaacuguaugaaugucugugggcaggaagugaagagauccuucuguaaagguuuuuggaauuaugucugcugaauaauaaacuuuuuugaaauaauaaaucugguagaaaaaugagaucucaaaggcucuuuucagagccaccaaaaaaaaaaaaaaaaaaaaaaaaaaaaaaaaaaaaaaaaaaaaaaaaaaaaaaaaaaaaaaaaagaauu

SEQ ID NO: 28993 - RNA, 1781 nt, Artificial Sequence
  mRNA product Design b-4 (hSL-A64-N5) comprising derived and/or modified sequence from LASV(LM765-SLE-2012;Clade IV)__AIT17814__GPCmut5 (opt1)
aggagagucccgcagucggcguccagcggcucugcuuguucgugugugugucguugcaggccuuauucaagcuuaccaugggccagaucgugaccuucuuccaggaggucccccacgugaucgaggaggugaugaacaucguccugaucgcccucagcauccuggccgugcugaaggggcucuacaacuucgcgaccugcggccugguggggcuggucacguuccuccugcugugcggccgcuccugcaccaccagccucuacaaggggguguacgagcugcagacccuggagcucaacauggagacgcugaacaugaccaugccgcuguccugcaccaagaacaacagccaccacuacaucauggugggcaacgagaccggccucgagcugacgcugaccaacaccuccaucaucgaccacaaguucugcaaccucagcgacgcccaccggaagaaccuguacgaccacgcccugauguccaucaucagcaccuuccaccucuccauccccaacuucaaccaguacgaggccaugagcugcgacuucaacgggggcaagaucuccguccaguacaaccugagccacuccuacgccaaggacgcggccgaccacugcgggacgguggccaacggcgugcugcagaccuucaugcgcauggccuggggcgggagcuacaucgcgcucgacuccggcugcgggcgcugggacugcaucaugaccagcuaccaguaccugaucauccagaacaccacgugggaggaccacugccaguucucccggcccagccccaucggcuaccuggggcuccugucccagcgcacccgggacaucuacaucagccgccggcugcucggcaccuucaccuggacgcugagcgacuccgagggcaaggacacccccgggggcuacugccugacccgcuggaugcucaucgaggccgagcugaagugcuucgggaacaccgccgucgccaagugcaacgagaagcacgacgaggaguucugcgacaugcugcggcuguucgacuucaacaagcaggccauccagcgccugaaggcgcccgcccagaugagcauccagcugaucaacaaggccgugaacgcccucaucaacgaccagcugaucaugaagaaccaccuccgggacaucaugugcauccccuacugcaacuacuccaaguacugguaccucaaccacacgaccaccgggaagaccagccugcccaagugcuggcugguguccaacggcagcuaccucaacgagacgcacuucuccgacgacaucgagcagcaggccgacaacaugaucaccgagaugcugcagaaggaguacauggagcgccagggcaagaccccgcuggggcucgucgaccuguucguguucagcaccuccuucuaccugaucagcaucuuccugcaccucgugaagaucccgacgcaccggcacaucgucggcaagcccugccccaagccccaccgccugaaccacauggggaucugcuccugcggccuguacaagcagccgggggugcccgugaaguggaagcggugaggacuaguaauaaggaaacuguaugaaugucugugggcaggaagugaagagauccuucuguaaagguuuuuggaauuaugucugcugaauaauaaacuuuuuugaaauaauaaaucugguagaaaaaugagaucucaaaggcucuuuucagagccaccaaaaaaaaaaaaaaaaaaaaaaaaaaaaaaaaaaaaaaaaaaaaaaaaaaaaaaaaaaaaaaaaagaauu

SEQ ID NO: 28994 - RNA, 1781 nt, Artificial Sequence
  mRNA product Design b-4 (hSL-A64-N5) comprising derived and/or modified sequence from LASV(LM776-SLE-2012;Clade IV)__AIT17824__GPCmut5 (opt1)
aggagagucccgcagucggcguccagcggcucugcuuguucgugugugugucguugcaggccuuauucaagcuuaccaugggccagaucgugaccuucuuccaggaggucccccacgugaucgaggaggugaugaacaucguccugaucgcccucagcauccuggccgugcugaaggggcucuacaacuucgcgaccugcggccugguggggcuggucacguuccuccugcugugcggccgcuccugcaccaccagcguguacaaggggguguacgagcuccagacccuggagcugaacauggagacgcucaacaugaccaugccgcuguccugcaccaagaacaacagccaccacuacaucauggucggcaacgagaccggccuggagcucacgcugaccaacaccuccaucaucaaccacaaguucugcaaccugagcgacgcccacaagaagaaccucuacgaccacgcccugauguccaucaucagcaccuuccaccuguccauccccaacuucaaccaguacgaggccaugagcugcgacuucaacgggggcaagaucuccgugcaguacaaccucagccacuccuacgccggggacgcggccaaccacugcggcacgguggccaacgggguccugcagaccuucaugcggauggccuggggcggcagcuacaucgcgcuggacuccgggugcggcaagugggacugcaucaugaccagcuaccaguaccucaucauccagaacaccacgugggaggaccacugccaguucucccgccccagccccaucggguaccugggccugcucucccagcggacccgcgacaucuacaucagccggcgccugcugggcaccuucaccuggacgcucagcgacuccgaggggaaggacaccccgggcggguacugccugacccgguggaugcugaucgaggccgagcucaagugcuucggcaacaccgccguggccaagugcaacgagaagcacgacgaggaguucugcgacaugcugcgccuguucgacuucaacaagcaggccauccagcggcucaaggcgcccgcccagaugagcauccagcugaucaacaaggccgugaacgcccugaucaacgaccagcucaucaugaagaaccaccuccgcgacaucaugugcauccccuacugcaacuacuccaaguacugguaccugaaccacacgaccaccggcaagaccagccugcccaagugcuggcuggucuccaacggcagcuaccugaacgagacgcacuucuccgacgacaucgagcagcaggccgacaacaugaucaccgagaugcuccagaaggaguacauggagcggcaggggaagacgccccugggccugguggaccucuucguguucagcaccuccuucuaccugaucagcaucuuccugcaccuggucaagaucccgacccaccgccacaucguggggaaguccugccccaagccccaccggcucaaccacaugggcaucugcagcugcgggcuguacaagcagcccggcgugccgguccgcuggaagcggugaggacuaguaauaaggaaacuguaugaaugucugugggcaggaagugaagagauccuucuguaaagguuuuuggaauuaugucugcugaauaauaaacuuuuuugaaauaauaaaucugguagaaaaaugagaucucaaaggcucuuuucagagccaccaaaaaaaaaaaaaaaaaaaaaaaaaaaaaaaaaaaaaaaaaaaaaaaaaaaaaaaaaaaaaaaaagaauu

SEQ ID NO: 28995 - RNA, 1781 nt, Artificial Sequence
  mRNA product Design b-4 (hSL-A64-N5) comprising derived and/or modified sequence from LASV(Mad39;Clade IV)__ANH09722__GPCmut5 (opt1)
aggagagucccgcagucggcguccagcggcucugcuuguucgugugugugucguugcaggccuuauucaagcuuaccaugggccagaucgugaccuucuuccaggaggucccccacgugaucgaggaggugaugaacaucguccugaucgcccucagcauccuggccgugcugaaggggcucuacaacguggcgaccugcggccugaucgggcuggucacguuccuccugcugugcggccgcuccugcaccaccacccucuacaaggggguguacgagcugcaggcccuggagcucaacauggagacgcugaacaugaccaugccgcugagcugcaccaagaacaacucccaccacuacauccgggugggcaacgagaccggccucgagcugacgcugaccaacaccagccucaucaaccacaaguucugcaaccuguccgacgcccacaagaagaaccuguacgaccacgcccucaugagcaucaucuccaccuuccaccugagcauccccaacuucaaccaguacgaggccauguccugcgacuucaacgacgggaagaucagcguccaguacaaccugucccacacguacgcgggcgacaccgccaaccacugcgggaccguggccaacggcgugcuccagaccuucaugcgcauggccuggggcgggagcuacaucgcgcuggacuccggcugcgggggcugggacugcaucaugacgagcuaccaguaccugaucauccagaacaccaccugggaggaccacugccaguucucccggcccagccccaucggguaccucggccugcugucccagcggacccgcgacaucuacaucagccggcgccuccugggcacguucaccuggacccuguccgacagcgaggggaaggacaccccgggcggguacugccucacgcgguggaugcugaucgaggccgagcugaagugcuucggcaacaccgccgucgccaagugcaacgagaagcacgacgaggaguucugcgacaugcuccgccuguucgacuucaacaagcaggccauccagcggcugaaggcgcccgcccagaugagcauccagcucaucaacaaggccgugaacgcccugaucaacgaccagcugaucaugaagaaccaccuccgcgacaucaugugcauccccuacugcaacuacuccaaguacugguaccugaaccacaccgugaccggcaagacgagccugcccaagugcuggcucgucuccaacggcagcuaccugaacgagacccacuucuccgacgacaucgagcagcaggccgacaacaugaucaccgagaugcugcagaaggaguacauggagcggcaggggaagacgccccucggccugguggaccuguucguguucagcaccuccuucuaccugaucagcaucuuccuccaccuggucaagaucccgacccaccgccacgugguggggaagcccugccccaagccccaccggcugaaccacaugggcaucugcuccugcggguucuacaagcagccgggcguccccgugcgcuggaagcggugaggacuaguaauaaggaaacuguaugaaugucugugggcaggaagugaagagauccuucuguaaagguuuuuggaauuaugucugcugaauaauaaacuuuuuugaaauaauaaaucugguagaaaaaugagaucucaaaggcucuuuucagagccaccaaaaaaaaaaaaaaaaaaaaaaaaaaaaaaaaaaaaaaaaaaaaaaaaaaaaaaaaaaaaaaaaagaauu

SEQ ID NO: 28996 - RNA, 1781 nt, Artificial Sequence
  mRNA product Design b-4 (hSL-A64-N5) comprising derived and/or modified sequence from LASV(Z0947-SLE-2011;Clade IV)__AIT17840__GPCmut5 (opt1)
aggagagucccgcagucggcguccagcggcucugcuuguucgugugugugucguugcaggccuuauucaagcuuaccaugggccagaucgugaccuucuuccaggaggucccccacgugaucgaggaggugaugaacaucguccugaucgcccucagcauccuggccgugcugaaggggcucuacaacuucgcgaccugcggccugguggggcuggucacguuccuccugcugugcggccgcuccugcaccaucagccucuacaaggggguguacgagcugcagacccuggagcucaacauggagacccugaacaugacgaugccgcuguccugcaccaagaacaacagccaccacuacaucauggugggcaacgagaccggccucgagcugacccugacgaacaccuccaucaucaaccacaaguucugcaaccucagcgacgcccacaagaagaaccuguacgaccacgcccugauguccaucaucagcaccuuccaccucuccauccccaacuucaaccaguacgaggccaugagcugcgacuucaacgggggcaagaucuccguccaguacaaccugagccacuccuacgccggggacgcggccaaccacugcggcaccguggccaacggggugcugcagacguucaugcggauggccuggggcggcagcuacaucgcgcucgacuccgggugcgaccggugggacugcaucaugaccagcuaccaguaccugaucauccagaacaccaccugggaggaccacugccaguucucccgccccagccccaucggcuaccuggggcuccugucccagcggacgcgcgacaucuacaucagccggcgccugcucggcaccuucaccuggacccugagcgacuccgagggcaaggacacgcccgggggcuacugccugacccgguggaugcucaucgaggccgagcugaagugcuucgggaacaccgccgucgccaagugcaacgagaagcacgacgaggaguucugcgacaugcugcgccucuucgacuucaacaagcaggccauccagcggcugaaggcgcccgcccagaugagcauccagcugaucaacaaggccgugaacgcccucaucaacgaccagcugaucaugaagaaccaccuccgcgacaucaugugcauccccuacugcaacuacuccaaguacugguaccugaaccacaccacgaccgggaagaccagccugcccaagugcuggcugguguccaacggcagcuaccucaacgagacccacuucuccgacgacaucgagcagcaggccgacaacaugaucacggagaugcugcagaaggaguacauggagcggcagggcaagaccccgcuggggcucgucgaccuguucguguucagcaccuccuucuaccugaucagcaucuuccugcaccucgugaagaucccgacccaccgccacaucgucggcaagcccugccccaagccccaccggcugaaccacauggggaucugcuccugcggccuguacaagcagccgggggugcccgugaaguggaagcgcugaggacuaguaauaaggaaacuguaugaaugucugugggcaggaagugaagagauccuucuguaaagguuuuuggaauuaugucugcugaauaauaaacuuuuuugaaauaauaaaucugguagaaaaaugagaucucaaaggcucuuuucagagccaccaaaaaaaaaaaaaaaaaaaaaaaaaaaaaaaaaaaaaaaaaaaaaaaaaaaaaaaaaaaaaaaaagaauu

SEQ ID NO: 28997 - RNA, 1781 nt, Artificial Sequence
  mRNA product Design b-4 (hSL-A64-N5) comprising derived and/or modified sequence from LASV(Josiah;Clade IV)__NP_694870__GPCmut5 (opt1)
aggagagucccgcagucggcguccagcggcucugcuuguucgugugugugucguugcaggccuuauucaagcuuaccaugggccagaucgugaccuucuuccaggaggucccccacgugaucgaggaggugaugaacaucguccugaucgcccucagcgugcuggccgugcugaaggggcucuacaacuucgcgaccugcggccuggucgggcuggugacguuccuccugcugugcggccgcuccugcaccaccagccucuacaaggggguguacgagcugcagacccuggagcucaacauggagacgcugaacaugaccaugccgcuguccugcaccaagaacaacagccaccacuacaucauggucggcaacgagaccggccucgagcugacgcugaccaacaccuccaucaucaaccacaaguucugcaaccucagcgacgcccacaagaagaaccuguacgaccacgcccugauguccaucaucagcaccuuccaccucuccauccccaacuucaaccaguacgaggccaugagcugcgacuucaacgggggcaagaucuccgugcaguacaaccugagccacuccuacgccggggacgcggccaaccacugcggcacgguggccaacgggguccugcagaccuucaugcggauggccuggggcggcagcuacaucgcgcucgacuccgggugcggcaacugggacugcaucaugaccagcuaccaguaccugaucauccagaacaccacgugggaggaccacugccaguucucccgccccagccccaucggguaccugggccuccugucccagcggacccgcgacaucuacaucagccggcgccugcucggcaccuucaccuggacgcugagcgacuccgaggggaaggacaccccgggcggguacugccugacccgguggaugcucaucgaggccgagcugaagugcuucggcaacaccgccguggccaagugcaacgagaagcacgacgaggaguucugcgacaugcugcgccucuucgacuucaacaagcaggccauccagcggcugaaggcgcccgcccagaugagcauccagcugaucaacaaggccgugaacgcccucaucaacgaccagcugaucaugaagaaccaccuccgcgacaucaugugcauccccuacugcaacuacuccaaguacugguaccugaaccacacgaccaccgggcggaccagccugcccaagugcuggcuggucuccaacggcagcuaccucaacgagacgcacuucuccgacgacaucgagcagcaggccgacaacaugaucaccgagaugcugcagaaggaguacauggagcgccagggcaagaccccgcuggggcugguggaccucuucguguucagcaccuccuucuaccugaucagcaucuuccugcaccucgucaagauccccacgcaccggcacaucgugggcaaguccugccccaagccccaccgccugaaccacauggggaucugcagcugcggccuguacaagcagccgggggugcccgucaaguggaagcggugaggacuaguaauaaggaaacuguaugaaugucugugggcaggaagugaagagauccuucuguaaagguuuuuggaauuaugucugcugaauaauaaacuuuuuugaaauaauaaaucugguagaaaaaugagaucucaaaggcucuuuucagagccaccaaaaaaaaaaaaaaaaaaaaaaaaaaaaaaaaaaaaaaaaaaaaaaaaaaaaaaaaaaaaaaaaagaauu

SEQ ID NO: 28998 - RNA, 1778 nt, Artificial Sequence
  mRNA product Design b-4 (hSL-A64-N5) comprising derived and/or modified sequence from LASV(LP;Clade I)__AAF86701__GPCmut5 (opt1)
aggagagucccgcagucggcguccagcggcucugcuuguucgugugugugucguugcaggccuuauucaagcuuaccaugggccagaucaucaccuucuuccaggaggugccccacgucaucgaggaggugaugaacaucgugcugaucgcccucagccugcuggccauccucaaggggcuguacaacaucgcgaccugcggcaucaucgggcuggucgccuuccucuuccugugcggcaaguccugcagccugacgcucaagggcggguacgagcugcagacccuggagcucaacauggagacccugaacaugaccaugccgcuguccugcacgaagaacagcucccaccacuacauccgcgugggcaacgagaccgggcucgagcugacccugaccaacacgagcaucaucaaccacaaguucugcaaccucuccgacgcccacaagaagaaccuguacgaccacgcccugaugagcaucaucuccaccuuccaccucagcauccccaacuucaaccaguacgaggccauguccugcgacuucaacggcgggaagaucagcgugcaguacaaccugucccacagcuacgcgggcgacgccgccgagcacugcgggaccgucgccaacggcgugcugcagaccuucaugcggauggcguggggcgggcgcuacaucgcccucgacuccggcugcgggaacugggacugcaucaugacgagcuaccaguaccugaucauccagaacaccaccugggaggaccacugccaguucucccggcccagccccaucggcuaccugggccuccugucccagcgcacccgggacaucuacaucagccgccggcugcucgggacguucaccuggacccugagcgacuccgagggcaacgagacccccgggggcuacugccugacgcgcuggaugcucaucgaggccgagcugaagugcuucgggaacaccgccguggccaagugcaacgagaagcacgacgaggaguucugcgacaugcugcggcuguucgacuucaacaagcaggcgauccgccggcugaaggccccggcccagaugagcauccagcugaucaacaaggccgucaacgcccucaucaacgaccagcugaucaugaagaaccaccuccgcgacaucaugugcauccccuacugcaacuacuccaaguacugguaccucaaccacaccagcuccggccggaccagccugcccaagugcuggcugaucuccaacggcagcuaccucaacgagacgcaguucuccgacgacaucgagcagcaggcggacaacaugaucaccgagaugcugcagaaggaguacaucgagcgccaggggaagaccccgcugggccugguggacaucuucaucuucagcaccuccuucuaccucaucagcaucuuccugcaccugaucaagauccccacgcaccggcacaucguggggaagcccugccccaagccgcaccgccucaaccacaugggcgucugcuccugcgggcuguacaagcaccccggcgugcccaccaaguggaagcggugaggacuaguaauaaggaaacuguaugaaugucugugggcaggaagugaagagauccuucuguaaagguuuuuggaauuaugucugcugaauaauaaacuuuuuugaaauaauaaaucugguagaaaaaugagaucucaaaggcucuuuucagagccaccaaaaaaaaaaaaaaaaaaaaaaaaaaaaaaaaaaaaaaaaaaaaaaaaaaaaaaaaaaaaaaaaagaauu

SEQ ID NO: 28999 - RNA, 1778 nt, Artificial Sequence
  mRNA product Design b-4 (hSL-A64-N5) comprising derived and/or modified sequence from LASV(803213;Clade II)__AAF86703__GPCmut5 (opt1)
aggagagucccgcagucggcguccagcggcucugcuuguucgugugugugucguugcaggccuuauucaagcuuaccaugggccagaucaucaccuucuuccaggaggugccccacgucaucgaggaggugaugaacaucgugcugaucgcccucagccugcuggccauccucaaggggaucuacaacgucgcgaccugcggccuguucgggcugaucuccuuccuccugcugugcggccgcagcugcuccgugacguacaaggggguguacgagcuccagacccuggagcugaacauggccaaccucaacaugaccaugccgcugagcugcaccaagaacaacucccaccacuacaucauggucggcaacgagacgggccuggagcucacccugaccaacaccagcaucaucaaccacaaguucugcaaccuguccgacgcccacaagaagaaccucuacgaccacgcccugaugagcaucaucuccacguuccaccugagcauccccaacuucaaccaguacgaggccauguccugcgacuucaacgggggcaagaucagcgugcaguacaaccucucccacagcuucgcgguggacgccgccaaccacugcgggaccaucgccaacggcguccugcagaccuucaugcggauggcguggggcggguccuacaucgcccuggacagcggcugcgggaacugggacugcaucaugaccuccuaccaguaccucaucauccagaacacgaccugggaggaccacugccaguucagccgccccucccccaucggcuaccuggggcugcucagccagcggacccgcgacaucuacaucagccggcgccugcugggcaccuucacguggacccucuccgacagcgagggcaacgaggcccccgggggcuacugccugacccgguggaugcugaucgaggccgagcucaagugcuucgggaacaccgccguggcgaagugcaacgagaagcacgacgaggaguucugcgacaugcugcgccuguucgacuucaacaagcaggccaucaagcggcucaagacgccggcccagauguccauccagcugaucaacaaggccgugaacgcccugaucaacgaccagcucaucaugaagaaccaccuccgcgacaucaugugcauccccuacugcaacuacagccgguacugguaccugaaccacaccgucaccggcaagaccucccugccccgcugcuggcuggugagcaacggguccuaccugaacgagacgcacuucagcgacgacaucgagcagcaggcggacaacaugaucaccgagaugcuccagaaggaguacauggaccggcagggcaagaccccgcugggccugguggaccuguucgucuucuccaccagcuucuaccucaucuccaucuuccugcaccuggugaagauccccacgcaccgccacaucguggggaagcccugccccaagccgcaccggcucaaccacaugggcaucugcagcugcgggcuguacaagcaccccggcguccccgugaaguggaagcgcugaggacuaguaauaaggaaacuguaugaaugucugugggcaggaagugaagagauccuucuguaaagguuuuuggaauuaugucugcugaauaauaaacuuuuuugaaauaauaaaucugguagaaaaaugagaucucaaaggcucuuuucagagccaccaaaaaaaaaaaaaaaaaaaaaaaaaaaaaaaaaaaaaaaaaaaaaaaaaaaaaaaaaaaaaaaaagaauu

SEQ ID NO: 29000 - RNA, 1778 nt, Artificial Sequence
  mRNA product Design b-4 (hSL-A64-N5) comprising derived and/or modified sequence from LASV(GA391;Clade III)__CAA36645__GPCmut5 (opt1)
aggagagucccgcagucggcguccagcggcucugcuuguucgugugugugucguugcaggccuuauucaagcuuaccaugggccagaucgugaccuucuuccaggaggucccccacgugaucgaggaggugaugaacaucguccugaucgcccucagcauccuggccauccugaaggggcucuacaacguggcgaccugcggccugaucgggcuggugacguuccuccugcuguccggccgcagcugcucccucaucuacaaggggaccuacgagcugcagacccuggagcucaacauggagacccugaacaugacgaugccgcugagcugcaccaagaacaacucccaccacuacauccgggucggcaacgagaccggccucgagcugacccugacgaacaccagcauccucaaccacaaguucugcaaccuguccgacgcccacaagcgcaaccuguacgaccacagccucauguccaucaucagcaccuuccaccuguccauccccaacuucaaccaguacgaggccaugagcugcgacuucaacgggggcaagaucaccgugcaguacaaccugucccacagcuucgccguggacgccgcggggcacugcggcacgcucgccaacgggguccugcagaccuucaugcggauggccuggggcggcuccuacaucgcccuggacagcgggugcggcaacugggacugcaucaugaccuccuaccaguaccucaucauccagaacaccacgugggacgaccacugccaguucagccgccccucccccaucggguaccugggccugcucagccagcggacccgcgacaucuacaucagccggcgccugcugggcaccuucaccuggacgcucuccgacagcgaggggaacgagaccccgggcggguacugccugacccgguggaugcugaucgaggcggagcucaagugcuucggcaacaccgccguggccaagugcaacgagaagcacgacgaggaguucugcgacaugcugcgccuguucgacuucaacaagcaggccauccggcgccucaagacgcccgcccagauguccauccagcugaucaacaaggcggugaacgcccugaucaacgaccagcucaucaugaagaaccaccuccgggacaucaugugcauccccuacugcaacuacagccgcuacugguaccugaaccacaccuccaccgggaagaccagccugccccggugcuggcugaucuccaacggcagcuaccugaacgagacgaaguucuccgacgacaucgagcagcaggccgacaacaugaucaccgagaugcugcagaaggaguacaucgaccgccagggcaagaccccgcucgggcuggucgaccuguucguguucagcaccuccuucuaccucaucagcaucuuccugcaccuggugaagauccccacgcaccggcacaucgucggcaagcccugccccaagccgcaccgccucaaccacauggggaucugcuccugcggccuguacaagcagcccggggugcccgugcgguggaagcgcugaggacuaguaauaaggaaacuguaugaaugucugugggcaggaagugaagagauccuucuguaaagguuuuuggaauuaugucugcugaauaauaaacuuuuuugaaauaauaaaucugguagaaaaaugagaucucaaaggcucuuuucagagccaccaaaaaaaaaaaaaaaaaaaaaaaaaaaaaaaaaaaaaaaaaaaaaaaaaaaaaaaaaaaaaaaaagaauu

SEQ ID NO: 29001 - RNA, 1781 nt, Artificial Sequence
  mRNA product Design b-4 (hSL-A64-N5) comprising derived and/or modified sequence from LASV(AV;Clade V)__CCA30314__GPCmut5 (opt1)
aggagagucccgcagucggcguccagcggcucugcuuguucgugugugugucguugcaggccuuauucaagcuuaccaugggccagaucgugaccuucuuccaggaggucccccacgugaucgaggaggugaugaacaucguccugaucgcccucagcauccuggccgugcugaaggggcucuacaacaucgcgaccugcggccugaucgggcugaucacguuccuccugcugugcggccgcuccugcagcuccaaccucuacaaggggguguacgagcugcagagccuggaccucaacauggagacccugaacaugaccaugccgcuguccugcaccaagaacaacagccaccacuacauccgggucggcaacgacacgggccucgagcugacccugaccaacaccuccauccucaaccacaaguucugcaaccugagcgacgcccacaagaaggaccuguacgaccacgcccucauguccaucaucagcacguuccaccuguccauccccaacuucaaccaguacgaggccaugagcugcgacuucaacgggggcaagaucuccgugcaguacaaccugagccacuccuacgccaucgacgcggccaaccacugcgggaccguggccaacggcauccuccagaccuucaugcgcauggccuggggcgggagcuacaucgcgcuggacuccggcugcgggaacugggacugcaucaugaccagcuaccaguaccugaucauccagaacacgaccugggagaaccacugccaguucucccggcccagccccaucggcuaccucgggcugcugagccagcgcacccgggacaucuacaucucccgccggcuccugggcaccuucacguggacccugagcgacuccgagggcaacgccacccccgggggcuacugccucacccgcuggaugcugaucgaggccgagcugaagugcuucgggaacacggccgucgccaagugcaacgagaagcacgacgaggaguucugcgacaugcuccggcuguucgacuucaacaagcaggcgaucagccgccugaaguccccggcccagaugagcauccagcucaucaacaaggccgugaacgcccugaucaacgaccagcugaucaugaagaaccaccuccgggacaucaugugcauccccuacugcaacuacuccaaguacugguaccugaaccacaccaucaccggcaagaccagccugcccaagugcuggcucguguccaacgggagcuaccugaacgagacgcacuucuccgacgacaucgagcagcaggccgacaacaugaucaccgagaugcugcagaaggaguacauggagcgccagggcaagaccccgcugggccucgucgaccuguucguguucagcaccuccuucuaccugaucagcaucuuccuccggcuggugaagauccccacgcaccgccacaucgucgggaagcccugccccaagccgcaccggcugaaccacaugggcaucugcuccugcgggcucuacaagcagcccggcgugcccgugcgcuggaagcggugaggacuaguaauaaggaaacuguaugaaugucugugggcaggaagugaagagauccuucuguaaagguuuuuggaauuaugucugcugaauaauaaacuuuuuugaaauaauaaaucugguagaaaaaugagaucucaaaggcucuuuucagagccaccaaaaaaaaaaaaaaaaaaaaaaaaaaaaaaaaaaaaaaaaaaaaaaaaaaaaaaaaaaaaaaaaagaauu

SEQ ID NO: 29002 - RNA, 1778 nt, Artificial Sequence
  mRNA product Design b-4 (hSL-A64-N5) comprising derived and/or modified sequence from LASV(Togo/2016/7082;Clade VI)__AMR44577__GPCmut5 (opt1)
aggagagucccgcagucggcguccagcggcucugcuuguucgugugugugucguugcaggccuuauucaagcuuaccaugggccagaucaucaccuucuuccaggaggugccccacgucaucgaggaggugaugaacaucgugcugaucgcccucagccugcuggccauccucaagggggucuacaacguggcgaccugcggcaucaucgggcuggugacguuccuguuccucugcggccgcuccugcagccugaucuacaagggguccuacgagcugcagacccucgagcugaacauggagacccugaacaugaccaugccgcucagcugcacgaagaacuccagccaccacuacauccgggucggcaacgagaccggccuggagcugacccucaccaacacguccaucaucaaccacaaguucugcaaccugagcgacgcccacaagcgcaaccuguacgaccacgcccucauguccauccugagcaccuuccaccuguccauccccaacuucaaccaguacgaggccaugagcugcgacuucaacgggggcaagaucuccgugcaguacaaccucagccacgccuacgcgguggacgccgccgagcacugcgggaccgucgccaacggcgugcugcagaccuucaugcggauggcguggggcggguccuacaucgcccuggacagcggcugcgggaacugggacugcaucaugacguccuaccaguaccucaucauccagaacaccaccugggaggaccacugccaguucagccgccccucccccaucggcuaccuggggcugcucagccagcggacccgcgacaucuacaucagccggcgccugcugggcacguucaccuggacccucuccgacagcgagggcaacgagacccccgggggcuacugccugacgcgguggaugcugaucgaggccgagcucaagugcuucgggaacaccgccguggccaagugcaacgagaagcacgacgaggaguucugcgacaugcugcgccuguucgacuucaacaagcaggcgauccagcggcucaaguccccggcccagaugagcauccagcugaucaacaaggccgucaacgcccugaucaacgaccagcucaucaugaagaaccaccuccgcgacaugaugugcauccccuacugcaacuacuccaaguacugguaccugaaccacaccagcuccggccggaccagccugcccaagugcuggcugguguccaacgggagcuaccugaacgagacgcacuucuccgacgacaucgagcagcaggccgacaacaugaucaccgagaugcuccagaaggaguacaucgaccgccagggcaagaccccgcugggccugguggaccuguucgucuucagcaccuccuucuaccucaucagcaucuuccugcaccugaucaagauccccacgcaccggcacaucguggggaagcccugccccaagccgcaccgccucaaccacaugggcaucugcuccugcgggcuguacaagcagcccggcgugcccacccgguggaagcgcugaggacuaguaauaaggaaacuguaugaaugucugugggcaggaagugaagagauccuucuguaaagguuuuuggaauuaugucugcugaauaauaaacuuuuuugaaauaauaaaucugguagaaaaaugagaucucaaaggcucuuuucagagccaccaaaaaaaaaaaaaaaaaaaaaaaaaaaaaaaaaaaaaaaaaaaaaaaaaaaaaaaaaaaaaaaaagaauu

SEQ ID NO: 29003 - RNA, 1778 nt, Artificial Sequence
  mRNA product Design b-4 (hSL-A64-N5) comprising derived and/or modified sequence from LASV(KAK-428;Clade n.d. (VII))__ANH09740__GPCmut5 (opt1)
aggagagucccgcagucggcguccagcggcucugcuuguucgugugugugucguugcaggccuuauucaagcuuaccaugggccagaucgugaccuucuuccaggaggucccccacgugaucgaggaggugaugaacaucguccugaucgcccucagccugcuggccauccucaaggggcuguacaacuucgcgaccugcggcgugaucgggcugaucacguuccuccugcugugcggccgcuccugcagcgccaccuacaaggggcaguacgagcuccagacccuggagcugaacauggagucccucaacaugaccaugccgcugagcugcacgaagaacaacucccaccacuacauccgggccggcaacaacaccggccuggagcucacccugaccaacacgagcaucaucucccacaaguucugcaaccugagcgacgcccacaagaagaaccucuacgaccacacccugauguccaucaucaccaccuuccaccugagcauccccaacuucaaccaguacgaggccauguccugcgacuucaacgggggcaagaucagcauccaguacaaccucucccacagcuacgcgggggacgccgcccagcacugcggcacgguggccaacgggguccugcagaccuucaugcgcauggcguggggcggcuccuaccuggcccucgacagcgggugccggggcugggacugcaucaucuccagcuaccaguaccugaucauccagaacaccaccugggacgaccacugccaguucucccgccccagccccaucggguaccugggcuucgugagccagaagacgcgggacaucuacaucucccgccggcuccugggcaccuucaccuggacccugagcgacuccgaggggcacgacaugccgggcggguacugccucacgcgcuggaugcugaucgaggccgaccugaagugcuucggcaacaccgccguggccaagugcaacgagaagcacgacgaggaguucugcgacauguggcggcuguucgacuucaacaagcaggcgauccagcgccugaaggcccccgcccagaugaacauccagcugaucaacaaggccgucaacgcccucaucaacgaccagcugaugaugaagaaccaccuccgggacaucaugugcauccccuacugcaacuacagcaaguucugguaccucaacaacaccaccacggggcgcaccucccugccccggugcuggcugaucagcaacggcuccuaccucaacgagacccacuucagcgacgacaucgagcagcaggcggacaacaugaucaccgagaugcugcagaaggaguacauggaccgccagggcaagacgccgcuggggcucguggaccuguucguguucuccaccagcuucuaccugaucaccaucuuccugcaccucgucaagauccccacccaccggcacaucgugggcaagcccugccccaagccgcaccgccugaaccacauggggaucugcuccugcggccuguacaagcagcccggggugcccguccgguggaagcgcugaggacuaguaauaaggaaacuguaugaaugucugugggcaggaagugaagagauccuucuguaaagguuuuuggaauuaugucugcugaauaauaaacuuuuuugaaauaauaaaucugguagaaaaaugagaucucaaaggcucuuuucagagccaccaaaaaaaaaaaaaaaaaaaaaaaaaaaaaaaaaaaaaaaaaaaaaaaaaaaaaaaaaaaaaaaaagaauu

SEQ ID NO: 29004 - RNA, 1778 nt, Artificial Sequence; identical to SEQ ID NO: 28998
  mRNA product Design b-4 (hSL-A64-N5) comprising derived and/or modified sequence from LASV(Pinneo-NIG-1969;Clade I)__AIT17836__GPCmut5 (opt1)

SEQ ID NO: 29005 - RNA, 1778 nt, Artificial Sequence
  mRNA product Design b-4 (hSL-A64-N5) comprising derived and/or modified sequence from LASV(ISTH0009-NIG-2011;Clade II)__AIT17404__GPCmut5 (opt1)
aggagagucccgcagucggcguccagcggcucugcuuguucgugugugugucguugcaggccuuauucaagcuuaccaugggccagaucaucaccuucuuccaggaggugccccacgucaucgaggaggugaugaacaucgugcugaucgcccucagccugcuggccauccucaaggggaucuacaacgucgcgaccugcggccuguucgggcugguguccuuccuccugcugugcggccgcagcugcuccacgaccuacaaggggguguacgagcuccagacccuggagcuggacauggccagccucaacaugaccaugccgcuguccugcacgaagaacaacagccaccacuacaucauggucggcaacgagaccggccuggagcucacccugaccaacacguccaucaucaaccacaaguucugcaaccugagcgacgcccacaagaagaaccucuacgaccacgcccugauguccaucaucagcaccuuccaccuguccauccccaacuucaaccaguacgaggccaugagcugcgacuucaacgggggcaagaucuccgugcaguacaaccucagccacgcguacgccguggacgccgccaaccacugcgggaccaucgcgaacggcguccugcagaccuucaugcggauggccuggggcggguccuacaucgcccuggacagcggcugcggguccugggacugcaucaugacgagcuaccaguaccucaucauccagaacaccaccugggaggaccacugccaguucucccgccccagccccaucggcuaccuggggcugcucagccagcggacccgcgacaucuacaucucccggcgccugcugggcacguucaccuggacccucagcgacuccgagggcaacgagacccccgggggcuacugccugacgcgguggaugcugaucgaggccgagcucaagugcuucgggaacaccgccguggcgaagugcaacgagaagcacgacgaggaguucugcgacaugcugcgccuguucgacuucaacaagcaggccauccggcgccucaagaccccggcccagaugagcauccagcugaucaacaaggccgugaacgcccugaucaacgaccagcucaucaugaagaaccaccuccgggacaucaugugcauccccuacugcaacuacuccaaguacugguaccugaaccacaccgucacgggcaagaccagccugccccgcugcuggcugguguccaacgggagcuaccugaacgagacccacuucuccgacgacaucgagcagcaggcggacaacaugaucaccgagcuccugcagaaggaguacauggaccggcagggcaagacgccgcugggccugguggaccucuucgucuucagcaccuccuucuaccugaucagcaucuuccugcaccucaucaagauccccacccaccgccacaucaccgggaagcccugccccaagccgcaccggcugaaccacaugggcaucugcuccugcgggcuguacaagcaccccggcgugcccgugaaguggaagcgcugaggacuaguaauaaggaaacuguaugaaugucugugggcaggaagugaagagauccuucuguaaagguuuuuggaauuaugucugcugaauaauaaacuuuuuugaaauaauaaaucugguagaaaaaugagaucucaaaggcucuuuucagagccaccaaaaaaaaaaaaaaaaaaaaaaaaaaaaaaaaaaaaaaaaaaaaaaaaaaaaaaaaaaaaaaaaagaauu

SEQ ID NO: 29006 - RNA, 1778 nt, Artificial Sequence
  mRNA product Design b-4 (hSL-A64-N5) comprising derived and/or modified sequence from LASV(ISTH2010-NIG-2012;Clade II)__AIT17482__GPCmut5 (opt1)
aggagagucccgcagucggcguccagcggcucugcuuguucgugugugugucguugcaggccuuauucaagcuuaccaugggccagaucaucaccuucuuccaggaggugccccacgucaucgaggaggugaugaacaucgugcugaucgcccucagccugcuggccauccucaaggggaucuacaacgucgcgaccugcggccuguucgggcugguguccuuccuccugcugugcggccgcagcugcuccacgaccuacaaggggguguacgagcuccagacccuggagcuggacauggccagccucaacaugaccaugccgcuguccugcacgaagaacaacagccaccacuacaucauggucggcaacgagaccggccuggagcucacccugaccaacacguccaucaucaaccacaaguucugcaaccugagcgacgcccacaagaagaaccucuacgaccacgcccugauguccaucaucagcaccuuccaccuguccauccccaacuucaaccaguacgaggccaugagcugcgacuucaacgggggcaagaucuccgugcaguacaaccucagccacgcguacgccguggacgccgccaaccacugcgggaccaucgcgaacggcguccugcagaccuucaugcggauggccuggggcggguccuacaucgcccuggacagcggcugcggguccugggacugcaucaugacgagcuaccaguaccucaucauccagaacaucaccugggaggaccacugccaguucucccgccccagccccaucggcuaccuggggcugcucagccagcggacccgcgacaucuacaucucccggcgccugcugggcaccuucacguggacccucagcgacuccgagggcaacgagacccccgggggcuacugccugacccgguggaugcugaucgaggccgagcucaagugcuucgggaacacggccguggcgaagugcaacgagaagcacgacgaggaguucugcgacaugcugcgccuguucgacuucaacaagcaggccauccggcgccucaagaccccggcccagaugagcauccagcugaucaacaaggccgugaacgcccugaucaacgaccagcucaucaugaagaaccaccuccgggacaucaugugcauccccuacugcaacuacuccaaguacugguaccugaaccacaccgucaccggcaagacgagccugccccgcugcuggcugguguccaacgggagcuaccugaacgagacccacuucuccgacgacaucgagcagcaggcggacaacaugaucaccgagcuccugcagaaggaguacaucgaccggcagggcaagaccccgcugggccugguggaccucuucgucuucagcacguccuucuaccugaucagcaucuuccugcaccucgugaagauccccacccaccgccacguggucgggaagcccugccccaagccgcaccggcugaaccacaugggcaucugcuccugcgggcuguacaagcaccccggcgugcccgugaaguggaagcgcugaggacuaguaauaaggaaacuguaugaaugucugugggcaggaagugaagagauccuucuguaaagguuuuuggaauuaugucugcugaauaauaaacuuuuuugaaauaauaaaucugguagaaaaaugagaucucaaaggcucuuuucagagccaccaaaaaaaaaaaaaaaaaaaaaaaaaaaaaaaaaaaaaaaaaaaaaaaaaaaaaaaaaaaaaaaaagaauu

SEQ ID NO: 29007 - RNA, 1778 nt, Artificial Sequence
  mRNA product Design b-4 (hSL-A64-N5) comprising derived and/or modified sequence from LASV(Lassa virus/H.sapiens-wt/NGA/2015/ISTH_0543;Clade II)__AVO03639__GPCmut5 (opt1)
aggagagucccgcagucggcguccagcggcucugcuuguucgugugugugucguugcaggccuuauucaagcuuaccaugggccagaucaucaccuucuuccaggaggugccccacgucaucgaggaggugaugaacaucgugcugaucgcccucagccugcuggccauccucaaggggaucuacaacgucgcgaccugcggccuguucgggcugguguccuuccuccugcugugcggccgcagcugcuccacgaccuacaaggggguguacgagcuccagacccuggagcuggacauggccaaccucaacaugaccaugccgcugagcugcacgaagaacaacucccaccacuacaucauggucggcaacgagaccggccuggagcucacccugaccaacacgagcaucaucaaccacaaguucugcaaccuguccgacgcccacaagaagaaccucuacgaccacgcccugaugagcaucaucuccaccuuccaccugagcauccccaacuucaaccaguacgaggccauguccugcgacuucaacgggggcaagaucagcgugcaguacaaccucucccacaccuacgcgguggacgccgccaaccacugcgggaccaucgccaacggcguccugcagacguucaugcggauggcguggggcgggagcuacaucgcccuggacuccggcugcgggagcugggacugcaucaugaccuccuaccaguaccucgugauccagaacaccaccugggaggaccacugccaguucagccgccccucccccaucggcuaccuggggcugcucagccagcggacgcgcgacaucuacaucagccggcgccugcugggcaccuucaccuggacccucuccgacagcgagggcaacgagacgcccgggggcuacugccugacccgguggaugcugaucgaggccgagcucaagugcuucgggaacaccgccguggccaagugcaacgagaagcacgacgaggaguucugcgacaugcugcgccuguucgacuucaacaagcaggcgauccggcgccucaagaccccggcccagauguccauccagcugaucaacaaggccgucaacgcccugaucaacgaccagcucaucaugaagaaccaccuccgggacaucaugugcauccccuacugcaacuacagcaaguacugguaccugaaccacacggugaccggcaagaccucccugccccgcugcuggcuggugagcaacggguccuaccugaacgagacccacuucagcgacgacaucgagcagcaggccgacaacaugaucacggagcuccugcagaaggaguacaucgaccggcagggcaagaccccgcugggccuggucgaccucuucguguucuccaccagcuucuaccugaucuccaucuuccugcaccucgugaagauccccacccaccgccacaucacggggaagcccugccccaagccgcaccggcugaaccacaugggcaucugcagcugcgggcuguacaagcaccccggcguccccgugaaguggaagcgcugaggacuaguaauaaggaaacuguaugaaugucugugggcaggaagugaagagauccuucuguaaagguuuuuggaauuaugucugcugaauaauaaacuuuuuugaaauaauaaaucugguagaaaaaugagaucucaaaggcucuuuucagagccaccaaaaaaaaaaaaaaaaaaaaaaaaaaaaaaaaaaaaaaaaaaaaaaaaaaaaaaaaaaaaaaaaagaauu

SEQ ID NO: 29008 - RNA, 1778 nt, Artificial Sequence
  mRNA product Design b-4 (hSL-A64-N5) comprising derived and/or modified sequence from LASV(Lassa virus/H.sapiens-wt/NGA/2016/ISTH_0009;Clade II)__AVO03571__GPCmut5 (opt1)
aggagagucccgcagucggcguccagcggcucugcuuguucgugugugugucguugcaggccuuauucaagcuuaccaugggccagaucaucaccuucuuccaggaggugccccacgucaucgaggaggugaugaacaucgugcugaucgcccucagccugcuggccauccucaaggggaucuacaacgucgcgaccugcggccugcuggggcucguguccuuccugcugcucugcggccgcagcugcuccacgaccuacaaggggguguacgagcugcagacccuggagcucgacauggccagccugaacaugaccaugccgcuguccugcacgaagaacaacagccaccacuacaucauggucggcaacgagaccggccucgagcugacccugaccaacacguccaucaucaaccacaaguucugcaaccucagcgacgcccacaagaagaaccuguacgaccacgcccugauguccaucaucagcaccuuccaccucuccauccccaacuucaaccaguacgaggccaugagcugcgacuucaacgggggccggaucuccgugcaguacaaccugagccacuccuacgcgguggacgccgccaaccacugcgggaccaucgccaacggcguccugcagaccuucaugcgcauggcguggggcgggagcuacaucgcccucgacuccggcugcgggagcugggacugcaucaugacguccuaccaguaccugaucauccagaacaccaccugggaggaccacugccaguucagccggcccagccccaucggcuaccuggggcuccugucccagcgcacccgggacaucuacaucagccgccggcugcucggcacguucaccuggacccuguccgacagcgagggcaacgagacccccgggggcuacugccugacgcgcuggaugcucaucgaggccgagcugaagugcuucgggaacaccgccguggccaagugcaacgagaagcacgacgaggaguucugcgacaugcugcggcuguucgacuucaacaagcaggcgauccgccggcugaagaccccggcccagauguccauccagcugaucaacaaggccgugaacgcccucaucaacgaccagcugaucaugaagaaccaccuccgcgacaucaugugcauccccuacugcaacuacagcaaguacugguaccucaaccacaccgucacgggcaagaccucccugccccggugcuggcuggugagcaacggguccuaccucaacgagacccacuucagcgacgacaucgagcagcaggccgacaacaugaucaccgagcugcugcagaaggaguacaucgaccgccagggcaagacgccgcugggccucguggaccuguucgucuucuccaccagcuucuaccugaucuccaucuuccuccaccuggugaagauccccacccaccggcacaucaccgggaagcccugccccaagccgcaccgccugaaccacaugggcaucugcagcugcgggcucuacaaccaccccggcgugcccgucaaguggaagcggugaggacuaguaauaaggaaacuguaugaaugucugugggcaggaagugaagagauccuucuguaaagguuuuuggaauuaugucugcugaauaauaaacuuuuuugaaauaauaaaucugguagaaaaaugagaucucaaaggcucuuuucagagccaccaaaaaaaaaaaaaaaaaaaaaaaaaaaaaaaaaaaaaaaaaaaaaaaaaaaaaaaaaaaaaaaaagaauu

SEQ ID NO: 29009 - RNA, 1778 nt, Artificial Sequence
  mRNA product Design b-4 (hSL-A64-N5) comprising derived and/or modified sequence from LASV(Lassa virus/H.sapiens-wt/NGA/2016/ISTH_0017;Clade II)__AVO03567__GPCmut5 (opt1)
aggagagucccgcagucggcguccagcggcucugcuuguucgugugugugucguugcaggccuuauucaagcuuaccaugggccagaucaucaccuucuuccaggaggugccccacgucaucgaggaggugaugaacaucgugcugaucgcccucagccugcuggccauccucaaggggaucuacaacgucgcgaccugcggccuguucgggcugguguccuuccuccugcugugcggccgcagcugcuccacgaccuacaaggggguguacgagcuccagacccuggagcuggacauggccagccucaacaugaccaugccgcuguccugcacgaagaacaacagccaccacuacaucauggucggcaacgagaccggccuggagcucacccugaccaacacguccaucaucaaccacaaguucugcaaccugagcgacgcccacaagaagaaccucuacgaccacgcccugauguccaucaucagcaccuuccaccuguccauccccaacuucaaccaguacgaggccaugagcugcgacuucaacgggggcaagaucuccgugcaguacaaccucagccacaccuacgcgaucgacgccgccaaccacugcgggaccaucgccaacggcgugcugcagacguucaugcggauggcguggggcggguccuacaucgcccuggacagcggcugcggguccugggacugcaucaugaccagcuaccaguaccucaucauccagaacaccaccugggaggaccacugccaguucucccgccccagccccaucggcuaccuggggcugcucagccagcggacgcgcgacaucuacaucucccggcgccugcugggcaccuucaccuggacccucagcgacuccgagggcaacgagacgcccgggggcuacugccugacccgguggaugcugaucgaggccgagcucaagugcuucgggaacaccgccgucgccaagugcaacgagaagcacgacgaggaguucugcgacaugcugcgccuguucgacuucaacaagcaggcgauccggcgccucaagaccccggcccagaugagcauccagcugaucaacaaggccgugaacgcccugaucaacgaccagcucaucaugaagaaccaccuccgggacaucaugugcauccccuacugcaacuacuccaaguacugguaccugaaccacacggugaccggcaagaccagccugccccgcugcuggcuggucuccaacgggagcuaccugaacgagacccacuucuccgacgacaucgagcagcaggccgacaacaugaucacggagcuccugcagaaggaguacauggaccggcagggcaagaccccgcugggccugguggaccucuucguguucagcaccuccuucuaccugaucagcaucuuccugcaccucguccgcauccccacccaccggcacgugaucgggaagcccugccccaagccgcaccgccugaaccacaugggcaucugcuccugcgggcuguacaagcaccccggcgugcccgucaaguggaagcggugaggacuaguaauaaggaaacuguaugaaugucugugggcaggaagugaagagauccuucuguaaagguuuuuggaauuaugucugcugaauaauaaacuuuuuugaaauaauaaaucugguagaaaaaugagaucucaaaggcucuuuucagagccaccaaaaaaaaaaaaaaaaaaaaaaaaaaaaaaaaaaaaaaaaaaaaaaaaaaaaaaaaaaaaaaaaagaauu

SEQ ID NO: 29010 - RNA, 1778 nt, Artificial Sequence
  mRNA product Design b-4 (hSL-A64-N5) comprising derived and/or modified sequence from LASV(Lassa virus/H.sapiens-wt/NGA/2018/ISTH_0959;Clade II)__AVV65099__GPCmut5 (opt1)
aggagagucccgcagucggcguccagcggcucugcuuguucgugugugugucguugcaggccuuauucaagcuuaccaugggccagaucaucaccuucuuccaggaggugccccacgucaucgaggaggugaugaacaucgugcugaucgcccucagccugcuggccauccucaaggggaucuacaacgucgugaccugcggccuguucgggcugguguccuuccuccugcugugcggccgcagcugcuccacgaccuacaagggggucuacgagcuccagacccuggagcuggacauggcgagccucaacaugaccaugccgcuguccugcacgaagaacaacagccaccacuacaucauggugggcaacgagaccggccuggagcucacccugaccaacacguccaucaucaaccacaaguucugcaaccugagcgacgcccacaagaagaaccucuacgaccacgcccugauguccaucaucagcaccuuccaccuguccauccccaacuucaaccaguacgaggccaugagcugcgacuucaacgggggcaagaucuccgugcaguacaaccucagccacgccuacgcgaucgacgccgccaaccacugcgggaccaucgccaacggcguccugcagaccuucaugcggauggcguggggcggguccuacaucgcccuggacagcggcugcggguccugggacugcaucaugacgagcuaccaguaccucaucauccagaacaccaccugggaggaccacugccaguucucccgccccagccccaucggcuaccuggggcugcucagccagcggacccgcgacaucuacaucucccggcgccugcugggcacguucaccuggacccucagcgacuccgagggcaacgagacccccgggggcuacugccugacgcgguggaugcugaucgaggccgagcucaagugcuucgggaacaccgccguggccaagugcaacgagaagcacgacgaggaguucugcgacaugcugcgccuguucgacuucaacaagcaggcgauccggcgccucaagaccccggcccagaugagcauccagcugaucaacaaggccgugaacgcccugaucaacgaccagcucaucaugaagaaccaccuccgggacaucaugugcauccccuacugcaacuacuccaaguacugguaccugaaccacaccgucacgggcaagaccagccugccccgcugcuggcugguguccaacgggagcuaccugaacgagacccacuucuccgacgacaucgagcagcaggccgacaacaugaucaccgagcuccugcagaaggaguacaucgaccggcagggcaagacgccgcugggccugguggaccucuucgucuucagcaccuccuucuaccugaucagcaucuuccugcaccucgugaagauccccacccaccgccacgugaucgggaagcccugccccaagccgcaccggcugaaccacaugggcaucugcuccugcgggcuguacaagcaccccggcguccccgugaaguggaagcgcugaggacuaguaauaaggaaacuguaugaaugucugugggcaggaagugaagagauccuucuguaaagguuuuuggaauuaugucugcugaauaauaaacuuuuuugaaauaauaaaucugguagaaaaaugagaucucaaaggcucuuuucagagccaccaaaaaaaaaaaaaaaaaaaaaaaaaaaaaaaaaaaaaaaaaaaaaaaaaaaaaaaaaaaaaaaaagaauu

SEQ ID NO: 29011 - RNA, 1778 nt, Artificial Sequence
  mRNA product Design b-4 (hSL-A64-N5) comprising derived and/or modified sequence from LASV(LASV003-NIG-2008;Clade II)__AIT17580__GPCmut5 (opt1)
aggagagucccgcagucggcguccagcggcucugcuuguucgugugugugucguugcaggccuuauucaagcuuaccaugggccagaucaucaccuucuuccaggaggugccccacgucaucgaggaggugaugaacaucgugcugaucgcccucagccugcuggccauccucaaggggaucuacaacgucgcgaccugcggccuguucgggcugguguccuuccuccugcugugcggccgcagcugcuccacgaccuacaaggggguguacgagcuccagacccuggagcuggacauggccagccucaacaugaccaugccgcuguccugcacgaagaacaacagccaccacuacaucauggucggcaacgagaccggccuggagcucacccugaccaacacguccaucaucaaccacaaguucugcaaccugagcgacgcccacaagaagaaccucuacgaccacgcccugauguccaucaucagcaccuuccaccuguccauccccaacuucaaccaguacgaggccaugagcugcgacuucaacgggggcaagaucuccgugcaguacaaccucagccacaccuacgcgguggacgccgccaaccacugcgggaccaucgccaacggcguccugcagacguucaugcggauggcguggggcggguccuacaucgcccuggacagcggcugcggguccugggacugcaucaugaccagcuaccaguaccucaucauccagaacaccaccugggaggaccacugccaguucucccgccccagccccaucggcuaccuggggcugcucagccagcggacgcgcgacaucuacaucucccggcgccugcugggcaccuucaccuggacccucagcgacuccgagagcaacgagacgccgggcggguacugccugacccgguggaugcugaucgaggccgagcucaagugcuucggcaacaccgccguggccaagugcaacgagaagcacgacgaggaguucugcgacaugcugcgccuguucgacuucaacaagcaggcgauccggcgccucaaggcccccgcccagauguccauccagcugaucaacaaggccgugaacgcccugaucaacgaccagcucaucaugaagaaccaccuccgggacaucaugugcauccccuacugcaacuacagcaaguacugguaccugaaccacaccgucacggggcgcaccucccugccccggugcuggcuggugagcaacggcuccuaccugaacgagacccacuucagcgacgacaucgagcagcaggcggacaacaugaucaccgagcuccugcagaaggaguacauggaccgccaggggaagacgccgcugggccugguggaccucuucgucuucuccaccagcuucuaccugaucuccaucuuccugcaccucgugaagauccccacccaccggcacgugaucggcaagcccugccccaagccgcaccgccugaaccacauggggaucugcagcugcggccuguacaagcaccccgggguccccgugaaguggaagcggugaggacuaguaauaaggaaacuguaugaaugucugugggcaggaagugaagagauccuucuguaaagguuuuuggaauuaugucugcugaauaauaaacuuuuuugaaauaauaaaucugguagaaaaaugagaucucaaaggcucuuuucagagccaccaaaaaaaaaaaaaaaaaaaaaaaaaaaaaaaaaaaaaaaaaaaaaaaaaaaaaaaaaaaaaaaaagaauu

SEQ ID NO: 29012 - RNA, 1778 nt, Artificial Sequence
  mRNA product Design b-4 (hSL-A64-N5) comprising derived and/or modified sequence from LASV(LASV035-NIG-2009;Clade II)__AIT17588__GPCmut5 (opt1)
aggagagucccgcagucggcguccagcggcucugcuuguucgugugugugucguugcaggccuuauucaagcuuaccaugggccagaucaucaccuucuuccaggaggugccccacgucaucgaggaggugaugaacaucgugcugaucgcccucagccugcuggccauccucaaggggaucuacaacgucgcgaccugcggccuguucgggcugguguccuuccuccugcugugcggccgcagcugcuccacgaccuacaaggggguguacgagcuccagacccuggagcuggacauggccagccucaacaugaccaugccgcuguccugcacgaagaacaacagccaccacuacaucauggucggcaacgagaccggccuggagcucacccugaccaacacguccaucaucaaccacaaguucugcaaccugagcgacgcccacaagaagaaccucuacgaccacgcccugauguccaucaucagcaccuuccaccuguccauccccaacuucaaccaguacgaggccaugagcugcgacuucaacgggggcaagaucuccgugcaguacaaccucagccacgcguacgccguggacgccgccaaccacugcgggaccaucgcgaacggcguccugcagaccuucaugcggauggccuggggcggguccuacaucgcccuggacagcggcugcggguccugggacugcaucaugacgagcuaccaguaccucaucauccagaacaccaccugggaggaccacugccaguucucccgccccagccccaucggcuaccuggggcugcucagccagcggacccgcgacaucuacaucucccggcgccugcugggcacguucaccuggacccucagcgacuccgagggcaacgagacccccgggggcuacugccugacgcgguggaugcugaucgaggccgagcucaagugcuucgggaacaccgccguggcgaagugcaacgagaagcacgacgaggaguucugcgacaugcugcgccuguucgacuucaacaagcaggccauccggcgccucaaggccccggcccagaugagcauccagcugaucaacaaggccgugaacgcgcugaucaacgaccagcucaucaugaagaaccaccuccgggacaucaugugcauccccuacugcaacuacuccaaguacugguaccugaaccacaccgucaccggcaagacgagccugccccgcugcuggcugguguccaacgggagcuaccugaacgagacccacuucuccgacgacaucgagcagcaggccgacaacaugaucaccgagcuccugcagaaggaguacaucgaccggcagggcaagaccccgcugggccugguggaccucuucgucuucagcacguccuucuaccugaucagcaucuuccugcaccucgugaagauccccacccaccgccacgugaucgggaagcccugccccaagccgcaccggcugaaccacaugggcaucugcuccugcgggcuguacaagcaccccggcguccccgugaaguggaagcgcugaggacuaguaauaaggaaacuguaugaaugucugugggcaggaagugaagagauccuucuguaaagguuuuuggaauuaugucugcugaauaauaaacuuuuuugaaauaauaaaucugguagaaaaaugagaucucaaaggcucuuuucagagccaccaaaaaaaaaaaaaaaaaaaaaaaaaaaaaaaaaaaaaaaaaaaaaaaaaaaaaaaaaaaaaaaaagaauu

SEQ ID NO: 29013 - RNA, 1778 nt, Artificial Sequence
  mRNA product Design b-4 (hSL-A64-N5) comprising derived and/or modified sequence from LASV(LASV1000-NIG-2009;Clade II)__AIT17782__GPCmut5 (opt1)
aggagagucccgcagucggcguccagcggcucugcuuguucgugugugugucguugcaggccuuauucaagcuuaccaugggccagaucaucaccuucuuccaggaggugccccacgucaucgaggaggugaugaacaucgugcugaucgcccucagccugcuggccauccucaaggggaucuacaacgucgcgaccugcggccuguucgggcugguguccuuccuccugcugugcggccgcagcugcuccacgaccuacaaggggguguacgagcuccagacccuggagcuggacauggccagccucaacaugaccaugccgcuguccugcacgaagaacaacagccaccacuacaucauggucggcaacgagaccggccuggagcucacccugaccaacacguccaucaucaaccacaaguucugcaaccugagcgacgcccacaagaagaaccucuacgaccacgcccugauguccaucaucagcaccuuccaccuguccauccccaacuucaaccaguacgaggccaugagcugcgacuucaacgggggcaagaucuccgugcaguacaaccucagccacaccuacgcgguggacgccgccaaccacugcgggaccaucgccaacggcguccugcagacguucaugcggauggcguggggcggguccuacaucgcccuggacagcggcugcggguccugggacugcaucaugaccagcuaccaguaccucaucauccagaacaccaccugggaggaccacugccaguucucccgccccagccccaucggcuaccuggggcugcucagccagcggacgcgcgacaucuacaucucccggcgccugcugggcaccuucaccuggacccucagcgacuccgagggcaacgagacgcccgggggcuacugccugacccgguggaugcugaucgaggccgagcucaagugcuucgggaacaccgccguggccaagugcaacgagaagcacgacgaggaguucugcgacaugcugcgccuguucgacuucaacaagcaggcgaucaagcggcucaagaccccggcccagaugagcauccagcugaucaacaaggccgugaacgcccugaucaacgaccagcucaucaugaagaaccaccuccgcgacaucaugugcauccccuacugcaacuacuccaaguacugguaccugaaccacacggucaccggcaagaccagccugccccggugcuggcugguguccaacgggagcuaccugaacgagacccacuucuccgacgacaucgagcagcaggccgacaacaugaucacggagcuccugcagaaggaguacaucgaccgccagggcaagaccccgcugggccugguggaccucuucgucuucagcaccuccuucuaccugaucagcaucuuccugcaccucgugaagauccccacccaccggcacguggucgggaagcccugccccaagccgcaccgccugaaccacaugggcaucugcuccugcgggcuguacaagcaccccggcgugcccgugaaguggaagcggugaggacuaguaauaaggaaacuguaugaaugucugugggcaggaagugaagagauccuucuguaaagguuuuuggaauuaugucugcugaauaauaaacuuuuuugaaauaauaaaucugguagaaaaaugagaucucaaaggcucuuuucagagccaccaaaaaaaaaaaaaaaaaaaaaaaaaaaaaaaaaaaaaaaaaaaaaaaaaaaaaaaaaaaaaaaaagaauu

SEQ ID NO: 29014 - RNA, 1778 nt, Artificial Sequence
  mRNA product Design b-4 (hSL-A64-N5) comprising derived and/or modified sequence from LASV(LASV221-NIG-2010;Clade II)__AIT17624__GPCmut5 (opt1)
aggagagucccgcagucggcguccagcggcucugcuuguucgugugugugucguugcaggccuuauucaagcuuaccaugggccagaucaucaccuucuuccaggaggugccccacgucaucgaggaggugaugaacaucgugcugaucgcccucagccugcuggccauccucaaggggaucuacaacgucgcgaccugcggccuguucgggcugguguccuuccuccugcugugcggccgcagcugcuccacgaccuacaaggggguguacgagcuccagacccuggagcuggacauggccagccucaacaugaccaugccgcuguccugcacgaagaacaacagccaccacuacaucauggucggcaacgagaccggccuggagcucacccugaccaacacguccaucaucaaccacaaguucugcaaccugagcgacgcccacaagaagaaccucuacgaccacgcccugauguccaucaucagcaccuuccaccuguccauccccaacuucaaccaguacgaggccaugagcugcgacuucaacgggggcaagaucuccgugcaguacaaccucagccacaccuacgcgaucgacgccgccaaccacugcgggaccaucgccaacggcgugcugcagacguucaugcggauggcguggggcggguccuacaucgcccuggacagcggcugcggguccugggacugcaucaugaccagcuaccaguaccucaucauccagaacaccaccugggaggaccacugccaguucucccgccccagccccaucggcuaccuggggcugcucagccagcggacgcgcgacaucuacaucucccggcgccugcugggcaccuucaccuggacccucagcgacuccgagggcaacgagacgcccgggggcuacugccugacccgguggaugcugaucgaggccgagcucaagugcuucgggaacaccgccgucgccaagugcaacgagaagcacgacgaggaguucugcgacaugcugcgccuguucgacuucaacaagcaggcgauccggcgccucaagaccccggcccagaugagcauccagcugaucaacaaggccgugaacgcccugaucaacgaccagcucaucaugaagaaccaccuccgggacaucaugugcauccccuacugcaacuacuccaaguacugguaccugaaccacacggugaccggcaagaccagccugccccgcugcuggcuggucuccaacgggagcuaccugaacgagacccacuucuccgacgacaucgagcagcaggccgacaacaugaucacggagaugcuccagaaggaguacauggaccggcagggcaagaccccgcugggccugguggaccuguucguguucagcaccuccuucuaccucaucagcaucuuccugcaccuggucaagauccccacccaccgccacgugaucgggaagcccugccccaagccgcaccggcucaaccacaugggcaucugcuccugcgggcuguacaagcaccccggcgugcccgucaaguggaagcgcugaggacuaguaauaaggaaacuguaugaaugucugugggcaggaagugaagagauccuucuguaaagguuuuuggaauuaugucugcugaauaauaaacuuuuuugaaauaauaaaucugguagaaaaaugagaucucaaaggcucuuuucagagccaccaaaaaaaaaaaaaaaaaaaaaaaaaaaaaaaaaaaaaaaaaaaaaaaaaaaaaaaaaaaaaaaaagaauu

SEQ ID NO: 29015 - RNA, 1778 nt, Artificial Sequence
  mRNA product Design b-4 (hSL-A64-N5) comprising derived and/or modified sequence from LASV(LASV237-NIG-2010;Clade II)__AIT17638__GPCmut5 (opt1)
aggagagucccgcagucggcguccagcggcucugcuuguucgugugugugucguugcaggccuuauucaagcuuaccaugggccagaucaucaccuucuuccaggaggugccccacgucaucgaggaggugaugaacaucgugcugaucgcccucagccugcuggccauccucaaggggaucuacaacgucgcgaccugcggccuguucgggcugguguccuuccuccugcugugcggccgcagcugcuccacgaccuacaaggggguguacgagcuccagacccuggagcuggacauggccagccucaacaugaccaugccgcuguccugcacgaagaacaacagccaccacuacaucauggucggcaacgagaccggccuggagcucacccugaccaacacguccaucaucaaccacaaguucugcaaccugagcgacgcccacaagaaggaccucuacgaccacgcccugauguccaucaucagcaccuuccaccuguccauccccaacuucaaccaguacgaggccaugagcugcgacuucaacgggggcaagaucuccgugcaguacaaccucagccacaccuacgcgguggacgccgccaaccacugcgggaccaucgccaacggcguccugcagacguucaugcggauggcguggggcggguccuacaucgcccuggacagcggcugcggguccugggacugcaucaugaccagcuaccaguaccucaucauccagaacaccaccugggaggaccacugccaguucucccgccccagccccaucggcuaccuggggcugcucagccagcggacgcgcgacaucuacaucucccggcgccugcugggcaccuucaccuggacccucagcgacuccgagggcaacgagacgcccgggggcuacugccugacccgguggaugcugaucgaggccgagcucaagugcuucgggaacaccgccguggccaagugcaacgagaagcacgacgaggaguucugcgacaugcugcgccuguucgacuucaacaagcaggcgauccggcgccucaagaccccggcccagaugagcauccagcugaucaacaaggccgugaacgcccugaucaacgaccagcucaucaugaagaaccaccuccgggacaucaugugcauccccuacugcaacuacuccaaguacugguaccugaaccacacggucaccggcaagaccagccugccccgcugcuggcugguguccaacgggagcuaccugaacgagacccacuucuccgacgacaucgagcagcaggccgacaacaugaucacggagcuccugcagaaggaguacauggaccggcagggcaagaccccgcugggccugguggaccucuucgucuucagcaccuccuucuaccugaucagcaucuuccugcaccucaucaagauccccacccaccgccacaucacggggaagcccugccccaagccgcaccggcugaaccacaugggcaucugcuccugcgggcuguacaagcaccccggcgugcccgugaaguggaagcgcugaggacuaguaauaaggaaacuguaugaaugucugugggcaggaagugaagagauccuucuguaaagguuuuuggaauuaugucugcugaauaauaaacuuuuuugaaauaauaaaucugguagaaaaaugagaucucaaaggcucuuuucagagccaccaaaaaaaaaaaaaaaaaaaaaaaaaaaaaaaaaaaaaaaaaaaaaaaaaaaaaaaaaaaaaaaaagaauu

SEQ ID NO: 29016 - RNA, 1778 nt, Artificial Sequence
  mRNA product Design b-4 (hSL-A64-N5) comprising derived and/or modified sequence from LASV(LASV253-NIG-2011;Clade II)__AIT17670__GPCmut5 (opt1)
aggagagucccgcagucggcguccagcggcucugcuuguucgugugugugucguugcaggccuuauucaagcuuaccaugggccagaucaucaccuucuuccaggaggugccccacgucaucgaggaggugaugaacaucgugcugaucgcccucagccugcuggccauccucaaggggaucuacaacgucgcgaccugcggccuguucgggcugguguccuuccuccugcugugcggccgcagcugcuccacgaccuacaaggggguguacgagcuccagacccuggagcuggacauggccagccucaacaugaccaugccgcuguccugcacgaagaacaacagccaccacuacaucauggucggcaacgagaccggccuggagcucacccugaccaacacguccaucaucaaccacaaguucugcaaccugagcgacgcccacaagaagaaccucuacgaccacgcccugauguccaucaucagcaccuuccaccuguccauccccaacuucaaccaguacgaggccaugagcugcgacuucaacgggggcaagaucuccgugcaguacaaccucagccacaccuacgcgguggacgccgccaaccacugcgggaccaucgccaacggcguccugcagacguucaugcggauggcguggggcggguccuacaucgcccuggacagcggcugcggguccugggacugcaucaugaccagcuaccaguaccucaucauccagaacaccaccugggaggaccacugccaguucucccgccccagccccaucggcuaccuggggcugcucagccagcggacgcgcgacaucuacaucucccggcgccugcugggcaccuucaccuggacccucagcgacuccgagggcaacgagacgcccgggggcuacugccugacccgguggaugcugaucgaggccgagcucaagugcuucgggaacaccgccguggccaagugcaacgagaagcacgacgaggaguucugcgacaugcugcgccuguucgacuucaacaagcaggcgauccggcgccucaaggccccggcccagaugagcauccagcugaucaacaaggccgugaacgcccugaucaacgaccagcucaucaugaagaaccaccuccgggacaucaugugcauccccuacugcaacuacuccaaguacugguaccugaaccacaccgucacgggccgcaccagccugccccggugcuggcugguguccaacgggagcuaccugaacgagacccacuucuccgacgacaucgagcagcaggcggacaacaugaucaccgagcuccugcagaaggaguacaucgaccgccagggcaagacgccgcugggccugguggaccucuucgucuucagcaccuccuucuaccugaucagcaucuuccugcaccucgugaagauccccacccaccggcacaucaucgggaagcccugccccaagccgcaccgccugaaccacaugggcaucugcuccugcgggcuguacaagcaccccggcgugcccgucaaguggaagcggugaggacuaguaauaaggaaacuguaugaaugucugugggcaggaagugaagagauccuucuguaaagguuuuuggaauuaugucugcugaauaauaaacuuuuuugaaauaauaaaucugguagaaaaaugagaucucaaaggcucuuuucagagccaccaaaaaaaaaaaaaaaaaaaaaaaaaaaaaaaaaaaaaaaaaaaaaaaaaaaaaaaaaaaaaaaaagaauu

SEQ ID NO: 29017 - RNA, 1778 nt, Artificial Sequence
  mRNA product Design b-4 (hSL-A64-N5) comprising derived and/or modified sequence from LASV(LASV254-NIG-2011;Clade II)__AIT17674__GPCmut5 (opt1)
aggagagucccgcagucggcguccagcggcucugcuuguucgugugugugucguugcaggccuuauucaagcuuaccaugggccagaucaucaccuucuuccaggaggugccccacgucaucgaggaggugaugaacaucgugcugaucgcccucagccugcuggccauccucaaggggaucuacaacgucgcgaccugcggccuguucgggcugguguccuuccuccugcugugcggccgcagcugcuccacgaccuacaaggggguguacgagcuccagacccuggagcuggacaugaccaaccucaacaugacgaugccgcugagcugcaccaagaacaacucccaccacuacaucauggucggcaacgagaccggccuggagcucacccugacgaacaccagcaucaucaaccacaaguucugcaaccuguccgacgcccacaagaagaaccucuacaaccacgcccugaugagcaucaucuccaccuuccaccugagcauccccaacuucaaccaguacgaggccauguccugcgacuucaacgggggcaagaucagcgugcaguacaaccucucccacagcuacgccguggacgcggccaaccacugcgggaccaucgccaacggcguccugcagacguucaugcggauggccuggggcggguccuacaucgcgcuggacagcggcugcgggaacugggacugcaucaugaccuccuaccaguaccucaucauccagaacaccaccugggaggaccacugccaguucagccgccccucccccaucggcuaccuggggcugcucagccagcggacgcgcgacaucuacaucagccggcgccugcugggcaccuucaccuggacccucuccgacagcgagggcaacgagacgcccgggggcuacugccugacccgguggaugcugaucgaggccgagcucaagugcuucgggaacaccgccguggccaagugcaacgagaagcacgacgaggaguucugcgacaugcugcgccuguucgacuucaacaagcaggccauccggcgccucaagaccccggcgcaggccaacauccagcugaucaacaaggccgugaacgcccugaucaacgaccagcucaucaugaagaaccaccuccgggacaucaugugcauccccuacugcaacuacuccaaguacugguaccugaaccacacggucaccggcaagaccagccugccccgcugcuggcugguguccaacgggagcuaccugaacgagacccacuucuccgacgacaucgagcagcaggccgacaacaugaucacggagcuccugcagaaggaguacauggaccggcagggcaagaccccgcugggccugguggaccucuucgucuucagcaccuccuucuaccugaucagcaucuuccugcaccucgugaagauccccacccaccgccacgugaucgggaagcccugccccaagccgcaccggcugaaccacaugggcaucugcuccugcgggcuguacaagcaccccggcguccccgugaaguggaagcgcugaggacuaguaauaaggaaacuguaugaaugucugugggcaggaagugaagagauccuucuguaaagguuuuuggaauuaugucugcugaauaauaaacuuuuuugaaauaauaaaucugguagaaaaaugagaucucaaaggcucuuuucagagccaccaaaaaaaaaaaaaaaaaaaaaaaaaaaaaaaaaaaaaaaaaaaaaaaaaaaaaaaaaaaaaaaaagaauu

SEQ ID NO: 29018 - RNA, 1778 nt, Artificial Sequence
  mRNA product Design b-4 (hSL-A64-N5) comprising derived and/or modified sequence from LASV(Nig08-A19;Clade III)__ADU56618__GPCmut5 (opt1)
aggagagucccgcagucggcguccagcggcucugcuuguucgugugugugucguugcaggccuuauucaagcuuaccaugggccagaucgugaccuucuuccaggaggucccccacgugaucgaggaggugaugaacaucguccugaucgcccucagcauccuggccauccugaaggggcucuacaacaucgcgaccugcggccugaucgggcuggugacguuccuccugcuguccggccgcagcugcuccaugaccuacaaggggguguacgagcuccagacccuggagcugaacaugaacacccucaacaugacgaugccgcugagcugcaccaagaacaacucccaccacuacaucauggucggcaacgagaccggccuggagcucacccugacgaacaccagccugcuccaccacaaguucugcaaccuguccgacgcccacaagaagaaccuguacgaccacacccucaugagcaucaucuccaccuuccaccugagcauccccaacuucaaccaguacgaggccauguccugcgacuucaacgggggcaagaucacggugcaguacaaccugagccacuccuacgccaucgacgccgcgaaccacugcgggaccguggccaacggcguccuccagaccuucaugcggauggccuggggcgggagcuacaucgcccuggacuccggcugcgggaagugggacugcaucaugaccagcuaccaguaccugaucauccagaacacgaccugggaggaccacugccaguucucccgccccagccccaucggcuaccucgggcugcugucccagcggacccgcgacaucuacaucagccggcgccuccugggcaccuucacguggacccugagcgacuccgagggcaacgagacccccgggggcuacugccucacccgguggaugcugaucgaggcggagcugaagugcuucgggaacacggccguggccaagugcaacgagaagcacgacgaggaguucugcgacaugcuccgccuguucgacuucaacaagcaggccauccggcgccugaaggccccggcgcagaugagcauccagcucaucaacaaggccgugaacgcccugaucaacgaccagcugaucaugaagaaccaccuccgggacaucaugugcauccccuacugcaacuacuccaaguacugguaccugaaccacaccagcaccggccgcaccucccugccccggugcuggcucgucagcaacggguccuaccugaacgagacgcacuucagcgacgacaucgagcagcaggccgacaacaugaucaccgagaugcugcagaaggaguaccuggaccgccagggcaagaccccgcucggccugguggaccuguucguguucuccaccagcuucuaccucaucuccaucuuccugcaccuggucaagauccccacgcaccggcacaucguggggaagcccugccccaagccgcaccgccucaaccacaugggcaucugcagcugcgggcuguacaagcagcccggcgugcccguccgguggaagcgcugaggacuaguaauaaggaaacuguaugaaugucugugggcaggaagugaagagauccuucuguaaagguuuuuggaauuaugucugcugaauaauaaacuuuuuugaaauaauaaaucugguagaaaaaugagaucucaaaggcucuuuucagagccaccaaaaaaaaaaaaaaaaaaaaaaaaaaaaaaaaaaaaaaaaaaaaaaaaaaaaaaaaaaaaaaaaagaauu

SEQ ID NO: 29019 - RNA, 1781 nt, Artificial Sequence
  mRNA product Design b-4 (hSL-A64-N5) comprising derived and/or modified sequence from LASV(G1180-SLE-2010;Clade IV)__AIT17168__GPCmut5 (opt1)
aggagagucccgcagucggcguccagcggcucugcuuguucgugugugugucguugcaggccuuauucaagcuuaccaugggccagaucgugaccuucuuccaggaggucccccacgugaucgaggaggugaugaacaucguccugaucgcccucagcauccuggccgugcugaaggggcucuacaacuucgcgaccugcggccugguggggcugcucacguuccugcugcucugcggccgcuccugcaccgccagccgguacaagggggucuacgagcugcagacccuggagcucaacauggagacccugaacaugacgaugccgcuguccugcaccaagaacaacagccaccacuacaucauggugggcaacgagaccggccucgagcugacccugacgaacaccuccaucaucaaccacaaguucugcaaccucagcgacgcccacaagaagaaccuguacgaccacgcccugauguccaucaucagcaccuuccaccucuccauccccaacuucaaccaguacgaggccaugagcugcgacuucaacgggggcaagaucuccgugcaguacaaccugagccacuccuacgcgggggacgccgccaaccacugcggcaccgucgccaacggggugcugcagacguucaugcgcauggcguggggcggcagcuacaucgcccucgacuccgggugcggcagcugggacugcaucaugaccuccuaccaguaccugaucauccagaacaccaccugggaggaccacugccaguucagccggcccucccccaucggguaccugggccuccugagccagcgcacgcgggacaucuacaucagccgccggcugcucggcaccuucaccuggacccuguccgacagcgaggggaaggacacgccgggcggguacugccugacccgcuggaugcucaucgaggccgagcugaagugcuucggcaacaccgccguggccaagugcaacgagaagcacgacgaggaguucugcgacaugcugcggcuguucgacuucaacaagcaggcgauccagcgccugaaggcccccgcccagauguccauccagcugaucaacaaggccgucaacgcccucaucaacgaccagcugaucaugaagaaccaccuccgggacaucaugugcauccccuacugcaacuacagcaaguacugguaccucaaccacaccacgaccgggaagaccucccugcccaagugcuggcuggugagcaacggcuccuaccucaacgagacccacuucagcgacgacaucgagcagcaggcggacaacaugaucacggagaugcugcagaaggaguacauggagcgccagggcaagaccccgcuggggcugguggaccucuucgucuucuccaccagcuucuaccugaucuccaucuuccugcaccucgugaagauccccacccaccggcacaucgugggcaagagcugccccaagccccaccgccugaaccacauggggaucugcuccugcggccuguacaagcagccggggguccccgugaaguggaagcggugaggacuaguaauaaggaaacuguaugaaugucugugggcaggaagugaagagauccuucuguaaagguuuuuggaauuaugucugcugaauaauaaacuuuuuugaaauaauaaaucugguagaaaaaugagaucucaaaggcucuuuucagagccaccaaaaaaaaaaaaaaaaaaaaaaaaaaaaaaaaaaaaaaaaaaaaaaaaaaaaaaaaaaaaaaaaagaauu

SEQ ID NO: 29020 - RNA, 1781 nt, Artificial Sequence
  mRNA product Design b-4 (hSL-A64-N5) comprising derived and/or modified sequence from LASV(G1442-SLE-2011;Clade IV)__AIT17180__GPCmut5 (opt1)
aggagagucccgcagucggcguccagcggcucugcuuguucgugugugugucguugcaggccuuauucaagcuuaccaugggccagaucgugaccuucuuccaggaggucccccacgugaucgaggaggugaugaacaucguccugaucgcccucagcauccuggccgugcugaaggggcucuacaacguggcgaccugcggccugaucgggcuggucacguuccuccugcugugcggccgcuccugcaccaccacccucuacaaggggguguacgagcugcagacgcuggagcucaacauggagacccugaacaugaccaugccgcugagcugcaccaagaacaacucccaccacuacauccgggugggcaacgagacgggccucgagcugacccugaccaacaccagcaucaucaaccacaaguucugcaaccucuccgacgcccacaagaagaaccuguacgaccacgcccugaugagcaucaucuccacguuccaccucagcauccccaacuucaaccaguacgaggccauguccugcgacuucaacgggggcaagaucagcguccaguacaaccugucccacagcuacgccggggacgcggccaaccacugcggcaccguggccaacggggugcugcagaccuucaugcgcauggccuggggcggcuccuacaucgcgcucgacagcgggugcggcaacugggacugcaucaugaccuccuaccaguaccugaucauccagaacacgaccugggacgaccacugccaguucagccggcccucccccaucggguaccugggccuccugagccagcgcacccgggacgucuacaucucccgccggcugcucggcaccuucacguggacccugagcgacagcgaggggaaggacaccccgggcggguacugccugacccgcuggaugcucaucgaggccgagcugaagugcuucggcaacacggccguggccaagugcaacgagaagcacgacgaggaguucugcgacaugcugcggcuguucgacuucaacaagcaggccauccagcgccugaaggcgcccgcccagauguccauccagcugaucaacaaggccgugaacgcccucaucaacgaccagcugaucaugaagaaccaccuccgggacaucaugugcauccccuacugcaacuacagcaaguacugguaccucaacaacaccgccaccgggaagaccucccugcccaagugcuggcugaucagcaacggcuccuaccucaacgagacgcacuucagcgacgacaucgagcaggaggcggacaacaugaucaccgagaugcugcagaaggaguacauggagcgccagggcaagaccccgcuggggcuggucgaccucuucguguucuccaccagcuucuaccugaucuccaucuuccugcaccucgugaagauccccacgcaccggcacaucgucggcaagagcugccccaagccccaccgccugaaccacauggggaucugcuccugcggccuguacaagcagccgggggugcccgugcgguggaagcgcugaggacuaguaauaaggaaacuguaugaaugucugugggcaggaagugaagagauccuucuguaaagguuuuuggaauuaugucugcugaauaauaaacuuuuuugaaauaauaaaucugguagaaaaaugagaucucaaaggcucuuuucagagccaccaaaaaaaaaaaaaaaaaaaaaaaaaaaaaaaaaaaaaaaaaaaaaaaaaaaaaaaaaaaaaaaaagaauu

SEQ ID NO: 29021 - RNA, 1781 nt, Artificial Sequence
  mRNA product Design b-4 (hSL-A64-N5) comprising derived and/or modified sequence from LASV(G3010-SLE-2013;Clade IV)__AIT17344__GPCmut5 (opt1)
aggagagucccgcagucggcguccagcggcucugcuuguucgugugugugucguugcaggccuuauucaagcuuaccaugggccagaucgugaccuucuuccaggaggucccccacgugaucgaggaggugaugaacaucguccugaucgcccucagcauccuggccgugcugaaggggcucuacaacuucgcgaccugcggccugguggggcuggucacguuccuccugcugugcggccgcuccugcaccaccagccucuacaaggggguguacgagcugcagacccuggagcucaacauggagacgcugaacaugaccaugccgcuguccugcaccaagaacaacagccaccacuacaucauggugggcaacgagaccggccucgagcugacgcugaccaacaccuccaucaucaaccacaaguucugcaaccucagcgacgcccacaagaagaaccuguacaaccacgcccugauguccaucaucagcaccuuccaccucuccauccccaacuucaaccaguacgaggccaugagcugcgacuucaacgggggcaagaucuccguccaguacaaccugagccacuccuacgccggggacgcggccagccacugcggcacgguggccaacggggugcugcagaccuucaugcggauggccuggggcggcuccuacaucgcgcucgacagcgggugcggcaagugggacugcaucaugaccuccuaccaguaccugaucauccagaacaccacgugggaggaccacugccaguucagccgccccucccccaucggguaccugggccuccugagccagcggacccgcgacaucuacaucagccggcgccugcucggcaccuucaccuggacgcuguccgacagcgaggggaaggacaccccgggcggguacugccugacccgguggaugcucaucgaggccgagcugaagugcuucggcaacaccgccgucgccaagugcaacgagaagcacgacgaggaguucugcgacaugcugcgccucuucgacuucaacaagcaggccauccagcggcugaagacgcccgcgcagauguccauccagcugaucaacaaggccgugaacgcccucaucaacgaccagcugaucaugaagaaccaccuccgcgacaucaugugcauccccuacugcaacuacagcaaguacugguaccugaaccacaccaccaccgggaagacgucccugcccaagugcuggcuggugagcaacggcuccuaccucaacgagacccacuucagcgacgacaucgagcagcaggccgacaacaugaucaccgagaugcugcagaaggaguacauggagcggcagggcaagaccccgcuggggcuggucgaccucuucguguucuccacgagcuucuaccugaucuccaucuuccugcaccucgugaagauccccacccaccgccacaucgucggcaagagcugccccaagccccaccggcugaaccacauggggaucugcuccugcggccuguacaagcagccgggggugcccgugcgcuggaagcggugaggacuaguaauaaggaaacuguaugaaugucugugggcaggaagugaagagauccuucuguaaagguuuuuggaauuaugucugcugaauaauaaacuuuuuugaaauaauaaaucugguagaaaaaugagaucucaaaggcucuuuucagagccaccaaaaaaaaaaaaaaaaaaaaaaaaaaaaaaaaaaaaaaaaaaaaaaaaaaaaaaaaaaaaaaaaagaauu

SEQ ID NO: 29022 - RNA, 1781 nt, Artificial Sequence
  mRNA product Design b-4 (hSL-A64-N5) comprising derived and/or modified sequence from LASV(G502-SLE-2009;Clade IV)__AIT17126__GPCmut5 (opt1)
aggagagucccgcagucggcguccagcggcucugcuuguucgugugugugucguugcaggccuuauucaagcuuaccaugggccagaucgugaccuucuuccaggaggucccccacgugaucgaggaggugaugaacaucguccugaucgcccucagcauccuggccgugcugaaggggcucuacaacuucgcgaccugcggccugguggggcugcucacguuccugcugcucugcggccgcuccugcaccaccgggcuguacaagggcgucuacgagcugcagacccucgagcugaacauggagacgcugaacaugaccaugccgcucagcugcaccaagaacaacucccaccacuacaucauggugggcaacgagaccgggcuggagcugacgcucaccaacaccagcaucaucaaccacaaguucugcaaccuguccgacgcccacaagaagaaccuguacgaccacgcccucaugagcaucaucuccaccuuccaccugagcauccccaacuucaaccaguacgaggccauguccugcgacuucaacggcgggaagaucagcgugcaguacaaccugucccacagcuacgccggcgacgcggccgaccacugcgggacggucgccaacggcgugcuccagaccuucaugcggauggccuggggcggguccuacaucgcgcuggacagcggcugcgggcgcugggacugcaucaugaccuccuaccaguaccugaucauccagaacaccacgugggaggaccacugccaguucagccggcccucccccaucggcuaccucggccugcugagccagcgcacccgggacaucuacaucucccgccggcuccuggggaccuucaccuggacgcugagcgacagcgagggcaaggacacccccgggggcuacugccucacccgcuggaugcugaucgaggccgagcugaagugcuucgggaacaccgccguggccaagugcaacgagaagcacgacgaggaguucugcgacaugcuccggcuguucgacuucaacaagcaggccauccagcgccugaaggcgccggcccagauguccauccagcucaucaacaaggccgucaacgcccugaucaacgaccagcuggugaugaagaaccaccuccgggacaucaugugcauccccuacugcaacuacagccgcuacugguaccugaaccacacgaccaccggccggaccucccugcccaagugcuggcucgugagcaacggcuccuaccugaacgagacgcacuucagcgacgacaucgagcagcaggccgacaacaugaucaccgagaugcugcagaaggaguacauggagcgccaggggaagaccccgcugggccucgucgaccuguucguguucuccaccagcuucuaccugaucuccaucuuccuccaccuggugaagauccccacgcaccggcacaucgucggcaagagcugccccaagccccaccgccugaaccacauggggaucugcuccugcgggcucuacaagcagccgggcgugcccgugaaguggaagcggugaggacuaguaauaaggaaacuguaugaaugucugugggcaggaagugaagagauccuucuguaaagguuuuuggaauuaugucugcugaauaauaaacuuuuuugaaauaauaaaucugguagaaaaaugagaucucaaaggcucuuuucagagccaccaaaaaaaaaaaaaaaaaaaaaaaaaaaaaaaaaaaaaaaaaaaaaaaaaaaaaaaaaaaaaaaaagaauu

SEQ ID NO: 29023 - RNA, 1781 nt, Artificial Sequence
  mRNA product Design b-4 (hSL-A64-N5) comprising derived and/or modified sequence from LASV(G733-SLE-2010;Clade IV)__AIT17154__GPCmut5 (opt1)
aggagagucccgcagucggcguccagcggcucugcuuguucgugugugugucguugcaggccuuauucaagcuuaccaugggccagaucgugaccuucuuccaggaggucccccacgugaucgaggaggugaugaacaucguccugaucgcccucagcauccuggccgugcugaaggggcucuacaacuucgcgaccugcggcaucguggggcuggucuccuuccugcuccugugcggccgcagcugcacgaccucccuguacaaggggguguacgagcuccagacccuggagcugaacauggagacccucaacaugacgaugccgcugagcugcaccaagaacaacucccaccacuacaucauggugggcaacgagaccggccuggagcucacccugacgaacaccagcaucaucaaccacaaguucugcaaccuguccgacgcccacaagaagaaccucuacgaccacgcccugaugagcaucaucuccaccuuccaccugagcauccccaacuucaaccaguacgaggccauguccugcgacuucaacgggggcaagaucagcguccaguacaaccucucccacagcuacgccggggacgcggccaaccacugcggcaccaucgccaacggggugcugcagacguucaugcggauggccuggggcggcuccuacaucgcgcuggacagcgggugcgaccgcugggacugcaucaugaccuccuaccaguaccucaucauccagaacaccaccugggaggaccacugccaguucagccggcccucccccaucggcuaccuggggcugcucagccagcgcacgcgggacaucuacaucagccgccggcugcugggcaccuucaccuggacccucuccgacagcgagggcaaggacacgcccgggggcuacugccugacccgcuggaugcugaucgaggccgagcucaagugcuucgggaacaccgccguggccaagugcaacgagaagcacgacgaggaguucugcgacaugcugcggcuguucgacuucaacaagcaggccauccagcgccucaaggcgccggcccagauguccauccagcugaucaacaaggccgucaacgcccugaucaacgaccagcucaucaugaagaaccaccuccgggacaucaugugcauccccuacugcaacuacagcaaguacugguaccugaaccacaccacgaccggcaagaccucccugcccaagugcuggcuggugagcaacggguccuaccugaacgagacccacuucagcgacgacaucgagcagcaggccgacaacaugaucacggagaugcuccagaaggaguacauggagcgccagggcaagaccccgcugggccugguggaccuguucgucuucuccaccagcuucuaccucaucuccaucuuccugcaccuggugaagauccccacccaccggcacguggucggcaagagcugccccaagccccaccgccucaaccacauggggaucugcuccugcgggcuguacggccagccgggggugcccgugaaguggaagcggugaggacuaguaauaaggaaacuguaugaaugucugugggcaggaagugaagagauccuucuguaaagguuuuuggaauuaugucugcugaauaauaaacuuuuuugaaauaauaaaucugguagaaaaaugagaucucaaaggcucuuuucagagccaccaaaaaaaaaaaaaaaaaaaaaaaaaaaaaaaaaaaaaaaaaaaaaaaaaaaaaaaaaaaaaaaaagaauu

SEQ ID NO: 29024 - RNA, 1781 nt, Artificial Sequence
  mRNA product Design b-4 (hSL-A64-N5) comprising derived and/or modified sequence from MOPV/LASV reassortant(IGS-1;Clade IV)__AFY05576__GPCmut5 (opt1)
aggagagucccgcagucggcguccagcggcucugcuuguucgugugugugucguugcaggccuuauucaagcuuaccaugggccagaucgugaccuucuuccaggaggucccccacgugaucgaggaggugaugaacaucguccugaucgcccucagcgugcuggccgugcugaaggggcucuacaacuucgcgaccugcggccuggucgggcuggugacguuccuccugcugugcggccgcuccugcaccaccagccucuacaaggggguguacgagcugcagacccuggagcucaacauggagacgcugaacaugaccaugccgcuguccugcaccaagaacaacagccaccacuacaucauggucggcaacgagaccggccucgagcugacgcugaccaacaccuccaucaucaaccacaaguucugcaaccucagcgacgcccacaagaagaaccuguacgaccacgcccugauguccaucaucagcaccuuccaccucuccauccccaacuucaaccaguacgaggccaugagcugcgacuucaacgggggcaagaucuccgugcaguacaaccugagccacuccuacgccggggacgcggccaaccacugcggcacgguggccaacgggguccugcagaccuucaugcggauggccuggggcggcagcuacaucgcgcucgacuccgggugcggcaacugggacugcaucaugaccagcuaccaguaccugaucauccagaacaccacgugggaggaccacugccaguucucccgccccagccccaucggguaccugggccuccugucccagcggacccgcgacaucuacaucagccggcgccugcucggcaccuucaccuggacgcugagcgacuccgagggggaggacaccccgggcggguacugccugacccgguggaugcucaucgaggccgagcugaagugcuucggcaacaccgccguggccaagugcaacgagaagcacgacgaggaguucugcgacaugcugcgccucuucgacuucaacaagcaggccauccagcggcugaaggcgcccgcccagaugagcauccagcugaucaacaaggccgugaacgcccucaucaacgaccagcugaucaugaagaaccaccuccgcgacaucaugugcauccccuacugcaacuacuccaaguacugguaccugaaccacacgaccaccgggcggaccagccugcccaagugcuggcuggucuccaacggcagcuaccucaacgagacgcacuucuccgacgacaucgagcagcaggccgacaacaugaucaccgagaugcugcagaaggaguacauggagcgccagggcaagaccccgcuggggcugguggaccucuucguguucagcaccuccuucuaccugaucagcaucuuccugcaccucgucaagauccccacgcaccggcacaucgugggcaaguccugccccaagccccaccgccugaaccacauggggaucugcagcugcggccuguacaagcagccgggggugcccgucaaguggaagcggugaggacuaguaauaaggaaacuguaugaaugucugugggcaggaagugaagagauccuucuguaaagguuuuuggaauuaugucugcugaauaauaaacuuuuuugaaauaauaaaucugguagaaaaaugagaucucaaaggcucuuuucagagccaccaaaaaaaaaaaaaaaaaaaaaaaaaaaaaaaaaaaaaaaaaaaaaaaaaaaaaaaaaaaaaaaaagaauu

SEQ ID NO: 29025 - RNA, 1781 nt, Artificial Sequence
  mRNA product Design b-4 (hSL-A64-N5) comprising derived and/or modified sequence from LASV(LM765-SLE-2012;Clade IV)__AIT17814__GPCmut5 (opt1)
aggagagucccgcagucggcguccagcggcucugcuuguucgugugugugucguugcaggccuuauucaagcuuaccaugggccagaucgugaccuucuuccaggaggucccccacgugaucgaggaggugaugaacaucguccugaucgcccucagcauccuggccgugcugaaggggcucuacaacuucgcgaccugcggccugguggggcuggucacguuccuccugcugugcggccgcuccugcaccaccagccucuacaaggggguguacgagcugcagacccuggagcucaacauggagacgcugaacaugaccaugccgcuguccugcaccaagaacaacagccaccacuacaucauggugggcaacgagaccggccucgagcugacgcugaccaacaccuccaucaucgaccacaaguucugcaaccucagcgacgcccaccggaagaaccuguacgaccacgcccugauguccaucaucagcaccuuccaccucuccauccccaacuucaaccaguacgaggccaugagcugcgacuucaacgggggcaagaucuccguccaguacaaccugagccacuccuacgccaaggacgcggccgaccacugcgggacgguggccaacggcgugcugcagaccuucaugcgcauggccuggggcgggagcuacaucgcgcucgacuccggcugcgggcggugggacugcaucaugaccagcuaccaguaccugaucauccagaacaccacgugggaggaccacugccaguucucccgccccagccccaucggcuaccuggggcuccugucccagcggacccgcgacaucuacaucagccggcgccugcucggcaccuucaccuggacgcugagcgacuccgagggcaaggacacccccgggggcuacugccugacccgguggaugcucaucgaggccgagcugaagugcuucgggaacaccgccgucgccaagugcaacgagaagcacgacgaggaguucugcgacaugcugcgccucuucgacuucaacaagcaggccauccagcggcugaaggcgccggcccagaugagcauccagcugaucaacaaggccgugaacgcccucaucaacgaccagcugaucaugaagaaccaccuccgcgacaucaugugcauccccuacugcaacuacuccaaguacugguaccugaaccacacgaccaccggcaagaccagccugcccaagugcuggcugguguccaacgggagcuaccucaacgagacgcacuucuccgacgacaucgagcagcaggccgacaacaugaucaccgagaugcugcagaaggaguacauggagcggcagggcaagaccccgcugggccuggucgaccucuucguguucagcaccuccuucuaccugaucagcaucuuccugcaccucgugaagauccccacgcaccgccacaucgucgggaagcccugccccaagccgcaccggcugaaccacaugggcaucugcuccugcgggcuguacaagcagcccggcgugcccgugaaguggaagcgcugaggacuaguaauaaggaaacuguaugaaugucugugggcaggaagugaagagauccuucuguaaagguuuuuggaauuaugucugcugaauaauaaacuuuuuugaaauaauaaaucugguagaaaaaugagaucucaaaggcucuuuucagagccaccaaaaaaaaaaaaaaaaaaaaaaaaaaaaaaaaaaaaaaaaaaaaaaaaaaaaaaaaaaaaaaaaagaauu

SEQ ID NO: 29026 - RNA, 1781 nt, Artificial Sequence
  mRNA product Design b-4 (hSL-A64-N5) comprising derived and/or modified sequence from LASV(LM776-SLE-2012;Clade IV)__AIT17824__GPCmut5 (opt1)
aggagagucccgcagucggcguccagcggcucugcuuguucgugugugugucguugcaggccuuauucaagcuuaccaugggccagaucgugaccuucuuccaggaggucccccacgugaucgaggaggugaugaacaucguccugaucgcccucagcauccuggccgugcugaaggggcucuacaacuucgcgaccugcggccugguggggcuggucacguuccuccugcugugcggccgcuccugcaccaccagcguguacaaggggguguacgagcuccagacccuggagcugaacauggagacgcucaacaugaccaugccgcuguccugcaccaagaacaacagccaccacuacaucauggucggcaacgagaccggccuggagcucacgcugaccaacaccuccaucaucaaccacaaguucugcaaccugagcgacgcccacaagaagaaccucuacgaccacgcccugauguccaucaucagcaccuuccaccuguccauccccaacuucaaccaguacgaggccaugagcugcgacuucaacgggggcaagaucuccgugcaguacaaccucagccacuccuacgccggggacgcggccaaccacugcggcacgguggccaacgggguccugcagaccuucaugcggauggccuggggcggcagcuacaucgcgcuggacuccgggugcggcaagugggacugcaucaugaccagcuaccaguaccucaucauccagaacaccacgugggaggaccacugccaguucucccgccccagccccaucggguaccugggccugcucucccagcggacccgcgacaucuacaucagccggcgccugcugggcaccuucaccuggacgcucagcgacuccgaggggaaggacaccccgggcggguacugccugacccgguggaugcugaucgaggccgagcucaagugcuucggcaacaccgccguggccaagugcaacgagaagcacgacgaggaguucugcgacaugcugcgccuguucgacuucaacaagcaggccauccagcggcucaaggcgcccgcccagaugagcauccagcugaucaacaaggccgugaacgcccugaucaacgaccagcucaucaugaagaaccaccuccgcgacaucaugugcauccccuacugcaacuacuccaaguacugguaccugaaccacacgaccaccgggaagaccagccugcccaagugcuggcuggucuccaacggcagcuaccugaacgagacgcacuucuccgacgacaucgagcagcaggccgacaacaugaucaccgagaugcuccagaaggaguacauggagcggcagggcaagaccccgcuggggcugguggaccuguucguguucagcaccuccuucuaccucaucagcaucuuccugcaccuggucaagauccccacgcaccgccacaucgugggcaaguccugccccaagccccaccggcucaaccacauggggaucugcagcugcggccuguacaagcagccgggggugcccguccgcuggaagcggugaggacuaguaauaaggaaacuguaugaaugucugugggcaggaagugaagagauccuucuguaaagguuuuuggaauuaugucugcugaauaauaaacuuuuuugaaauaauaaaucugguagaaaaaugagaucucaaaggcucuuuucagagccaccaaaaaaaaaaaaaaaaaaaaaaaaaaaaaaaaaaaaaaaaaaaaaaaaaaaaaaaaaaaaaaaaagaauu

SEQ ID NO: 29027 - RNA, 1781 nt, Artificial Sequence
  mRNA product Design b-4 (hSL-A64-N5) comprising derived and/or modified sequence from LASV(Mad39;Clade IV)__ANH09722__GPCmut5 (opt1)
aggagagucccgcagucggcguccagcggcucugcuuguucgugugugugucguugcaggccuuauucaagcuuaccaugggccagaucgugaccuucuuccaggaggucccccacgugaucgaggaggugaugaacaucguccugaucgcccucagcauccuggccgugcugaaggggcucuacaacguggcgaccugcggccugaucgggcuggucacguuccuccugcugugcggccgcuccugcaccaccacccucuacaaggggguguacgagcugcaggcccuggagcucaacauggagacgcugaacaugaccaugccgcugagcugcaccaagaacaacucccaccacuacauccgggugggcaacgagaccggccucgagcugacgcugaccaacaccagccucaucaaccacaaguucugcaaccuguccgacgcccacaagaagaaccuguacgaccacgcccucaugagcaucaucuccaccuuccaccugagcauccccaacuucaaccaguacgaggccauguccugcgacuucaacgacgggaagaucagcguccaguacaaccugucccacacguacgcgggcgacaccgccaaccacugcgggaccguggccaacggcgugcuccagaccuucaugcgcauggccuggggcgggagcuacaucgcgcuggacuccggcugcgggggcugggacugcaucaugacgagcuaccaguaccugaucauccagaacaccaccugggaggaccacugccaguucucccggcccagccccaucggguaccucggccugcugucccagcgcacccgggacaucuacaucagccgccggcuccugggcacguucaccuggacccuguccgacagcgaggggaaggacaccccgggcggguacugccucacgcgcuggaugcugaucgaggccgagcugaagugcuucggcaacaccgccgucgccaagugcaacgagaagcacgacgaggaguucugcgacaugcuccggcuguucgacuucaacaagcaggccauccagcgccugaaggcgcccgcccagaugagcauccagcucaucaacaaggccgugaacgcccugaucaacgaccagcugaucaugaagaaccaccuccgggacaucaugugcauccccuacugcaacuacuccaaguacugguaccugaaccacaccgugaccgggaagacgagccugcccaagugcuggcucgucuccaacggcagcuaccugaacgagacccacuucuccgacgacaucgagcagcaggccgacaacaugaucaccgagaugcugcagaaggaguacauggagcgccagggcaagaccccgcuggggcucguggaccuguucguguucagcacguccuucuaccugaucagcaucuuccuccaccuggucaagauccccacccaccggcacguggugggcaagcccugccccaagccgcaccgccugaaccacauggggaucugcuccugcggcuucuacaagcagcccgggguccccgugcgguggaagcgcugaggacuaguaauaaggaaacuguaugaaugucugugggcaggaagugaagagauccuucuguaaagguuuuuggaauuaugucugcugaauaauaaacuuuuuugaaauaauaaaucugguagaaaaaugagaucucaaaggcucuuuucagagccaccaaaaaaaaaaaaaaaaaaaaaaaaaaaaaaaaaaaaaaaaaaaaaaaaaaaaaaaaaaaaaaaaagaauu

SEQ ID NO: 29028 - RNA, 1781 nt, Artificial Sequence
  mRNA product Design b-4 (hSL-A64-N5) comprising derived and/or modified sequence from LASV(Z0947-SLE-2011;Clade IV)__AIT17840__GPCmut5 (opt1)
aggagagucccgcagucggcguccagcggcucugcuuguucgugugugugucguugcaggccuuauucaagcuuaccaugggccagaucgugaccuucuuccaggaggucccccacgugaucgaggaggugaugaacaucguccugaucgcccucagcauccuggccgugcugaaggggcucuacaacuucgcgaccugcggccugguggggcuggucacguuccuccugcugugcggccgcuccugcaccaucagccucuacaaggggguguacgagcugcagacccuggagcucaacauggagacccugaacaugacgaugccgcuguccugcaccaagaacaacagccaccacuacaucauggugggcaacgagaccggccucgagcugacccugacgaacaccuccaucaucaaccacaaguucugcaaccucagcgacgcccacaagaagaaccuguacgaccacgcccugauguccaucaucagcaccuuccaccucuccauccccaacuucaaccaguacgaggccaugagcugcgacuucaacgggggcaagaucuccguccaguacaaccugagccacuccuacgccggggacgcggccaaccacugcggcaccguggccaacggggugcugcagacguucaugcggauggccuggggcggcagcuacaucgcgcucgacuccgggugcgaccgcugggacugcaucaugaccagcuaccaguaccugaucauccagaacaccaccugggaggaccacugccaguucucccggcccagccccaucggcuaccuggggcuccugucccagcgcacgcgggacaucuacaucagccgccggcugcucggcaccuucaccuggacccugagcgacuccgagggcaaggacacgcccgggggcuacugccugacccgcuggaugcucaucgaggccgagcugaagugcuucgggaacaccgccgucgccaagugcaacgagaagcacgacgaggaguucugcgacaugcugcggcuguucgacuucaacaagcaggccauccagcgccugaaggcgccggcccagaugagcauccagcugaucaacaaggccgugaacgcccucaucaacgaccagcugaucaugaagaaccaccuccgggacaucaugugcauccccuacugcaacuacuccaaguacugguaccucaaccacaccacgaccggcaagaccagccugcccaagugcuggcugguguccaacgggagcuaccucaacgagacccacuucuccgacgacaucgagcagcaggccgacaacaugaucacggagaugcugcagaaggaguacauggagcgccagggcaagaccccgcugggccuggucgaccucuucguguucagcaccuccuucuaccugaucagcaucuuccugcaccucgugaagauccccacccaccggcacaucgucgggaagcccugccccaagccgcaccgccugaaccacaugggcaucugcuccugcgggcuguacaagcagcccggcgugcccgugaaguggaagcggugaggacuaguaauaaggaaacuguaugaaugucugugggcaggaagugaagagauccuucuguaaagguuuuuggaauuaugucugcugaauaauaaacuuuuuugaaauaauaaaucugguagaaaaaugagaucucaaaggcucuuuucagagccaccaaaaaaaaaaaaaaaaaaaaaaaaaaaaaaaaaaaaaaaaaaaaaaaaaaaaaaaaaaaaaaaaagaauu

SEQ ID NO: 29029 - RNA, 1781 nt, Artificial Sequence
  mRNA product Design b-4 (hSL-A64-N5) comprising derived and/or modified sequence from LASV(Josiah;Clade IV)__NP_694870__GPCmut5 (opt4)
aggagagucccgcagucggcguccagcggcucugcuuguucgugugugugucguugcaggccuuauucaagcuuaccaugggccagaucgugaccuucuuccaggaggugccccacgugaucgaggaggugaugaacaucgugcugaucgcccugagcgugcuggccgugcugaagggccuguacaacuucgccaccugcggccuggugggccuggugaccuuccugcugcugugcggcagaagcugcaccaccagccuguacaagggcguguacgagcugcagacccuggagcugaacauggagacccugaacaugaccaugccccugagcugcaccaagaacaacagccaccacuacaucauggugggcaacgagaccggccuggagcugacccugaccaacaccagcaucaucaaccacaaguucugcaaccugagcgacgcccacaagaagaaccuguacgaccacgcccugaugagcaucaucagcaccuuccaccugagcauccccaacuucaaccaguacgaggccaugagcugcgacuucaacggcggcaagaucagcgugcaguacaaccugagccacagcuacgccggcgacgccgccaaccacugcggcaccguggccaacggcgugcugcagaccuucaugagaauggccuggggcggcagcuacaucgcccuggacagcggcugcggcaacugggacugcaucaugaccagcuaccaguaccugaucauccagaacaccaccugggaggaccacugccaguucagcagacccagccccaucggcuaccugggccugcugagccagagaaccagagacaucuacaucagcagaagacugcugggcaccuucaccuggacccugagcgacagcgagggcaaggacacccccggcggcuacugccugaccagauggaugcugaucgaggccgagcugaagugcuucggcaacaccgccguggccaagugcaacgagaagcacgacgaggaguucugcgacaugcugagacuguucgacuucaacaagcaggccauccagagacugaaggcccccgcccagaugagcauccagcugaucaacaaggccgugaacgcccugaucaacgaccagcugaucaugaagaaccaccugagagacaucaugugcauccccuacugcaacuacagcaaguacugguaccugaaccacaccaccaccggcagaaccagccugcccaagugcuggcuggugagcaacggcagcuaccugaacgagacccacuucagcgacgacaucgagcagcaggccgacaacaugaucaccgagaugcugcagaaggaguacauggagagacagggcaagaccccccugggccugguggaccuguucguguucagcaccagcuucuaccugaucagcaucuuccugcaccuggugaagauccccacccacagacacaucgugggcaagagcugccccaagccccacagacugaaccacaugggcaucugcagcugcggccuguacaagcagcccggcgugcccgugaaguggaagagaugaggacuaguaauaaggaaacuguaugaaugucugugggcaggaagugaagagauccuucuguaaagguuuuuggaauuaugucugcugaauaauaaacuuuuuugaaauaauaaaucugguagaaaaaugagaucucaaaggcucuuuucagagccaccaaaaaaaaaaaaaaaaaaaaaaaaaaaaaaaaaaaaaaaaaaaaaaaaaaaaaaaaaaaaaaaaagaauu

SEQ ID NO: 29030 - RNA, 1778 nt, Artificial Sequence
  mRNA product Design b-4 (hSL-A64-N5) comprising derived and/or modified sequence from LASV(LP;Clade I)__AAF86701__GPCmut5 (opt4)
aggagagucccgcagucggcguccagcggcucugcuuguucgugugugugucguugcaggccuuauucaagcuuaccaugggccagaucaucaccuucuuccaggaggugccccacgugaucgaggaggugaugaacaucgugcugaucgcccugagccugcuggccauccugaagggccuguacaacaucgccaccugcggcaucaucggccugguggccuuccuguuccugugcggcaagagcugcagccugacccugaagggcggcuacgagcugcagacccuggagcugaacauggagacccugaacaugaccaugccccugagcugcaccaagaacagcagccaccacuacaucagagugggcaacgagaccggccuggagcugacccugaccaacaccagcaucaucaaccacaaguucugcaaccugagcgacgcccacaagaagaaccuguacgaccacgcccugaugagcaucaucagcaccuuccaccugagcauccccaacuucaaccaguacgaggccaugagcugcgacuucaacggcggcaagaucagcgugcaguacaaccugagccacagcuacgccggcgacgccgccgagcacugcggcaccguggccaacggcgugcugcagaccuucaugagaauggccuggggcggcagauacaucgcccuggacagcggcugcggcaacugggacugcaucaugaccagcuaccaguaccugaucauccagaacaccaccugggaggaccacugccaguucagcagacccagccccaucggcuaccugggccugcugagccagagaaccagagacaucuacaucagcagaagacugcugggcaccuucaccuggacccugagcgacagcgagggcaacgagacccccggcggcuacugccugaccagauggaugcugaucgaggccgagcugaagugcuucggcaacaccgccguggccaagugcaacgagaagcacgacgaggaguucugcgacaugcugagacuguucgacuucaacaagcaggccaucagaagacugaaggcccccgcccagaugagcauccagcugaucaacaaggccgugaacgcccugaucaacgaccagcugaucaugaagaaccaccugagagacaucaugugcauccccuacugcaacuacagcaaguacugguaccugaaccacaccagcagcggcagaaccagccugcccaagugcuggcugaucagcaacggcagcuaccugaacgagacccaguucagcgacgacaucgagcagcaggccgacaacaugaucaccgagaugcugcagaaggaguacaucgagagacagggcaagaccccccugggccugguggacaucuucaucuucagcaccagcuucuaccugaucagcaucuuccugcaccugaucaagauccccacccacagacacaucgugggcaagcccugccccaagccccacagacugaaccacaugggcgugugcagcugcggccuguacaagcaccccggcgugcccaccaaguggaagagaugaggacuaguaauaaggaaacuguaugaaugucugugggcaggaagugaagagauccuucuguaaagguuuuuggaauuaugucugcugaauaauaaacuuuuuugaaauaauaaaucugguagaaaaaugagaucucaaaggcucuuuucagagccaccaaaaaaaaaaaaaaaaaaaaaaaaaaaaaaaaaaaaaaaaaaaaaaaaaaaaaaaaaaaaaaaaagaauu

SEQ ID NO: 29031 - RNA, 1778 nt, Artificial Sequence
  mRNA product Design b-4 (hSL-A64-N5) comprising derived and/or modified sequence from LASV(803213;Clade II)__AAF86703__GPCmut5 (opt4)
aggagagucccgcagucggcguccagcggcucugcuuguucgugugugugucguugcaggccuuauucaagcuuaccaugggccagaucaucaccuucuuccaggaggugccccacgugaucgaggaggugaugaacaucgugcugaucgcccugagccugcuggccauccugaagggcaucuacaacguggccaccugcggccuguucggccugaucagcuuccugcugcugugcggcagaagcugcagcgugaccuacaagggcguguacgagcugcagacccuggagcugaacauggccaaccugaacaugaccaugccccugagcugcaccaagaacaacagccaccacuacaucauggugggcaacgagaccggccuggagcugacccugaccaacaccagcaucaucaaccacaaguucugcaaccugagcgacgcccacaagaagaaccuguacgaccacgcccugaugagcaucaucagcaccuuccaccugagcauccccaacuucaaccaguacgaggccaugagcugcgacuucaacggcggcaagaucagcgugcaguacaaccugagccacagcuucgccguggacgccgccaaccacugcggcaccaucgccaacggcgugcugcagaccuucaugagaauggccuggggcggcagcuacaucgcccuggacagcggcugcggcaacugggacugcaucaugaccagcuaccaguaccugaucauccagaacaccaccugggaggaccacugccaguucagcagacccagccccaucggcuaccugggccugcugagccagagaaccagagacaucuacaucagcagaagacugcugggcaccuucaccuggacccugagcgacagcgagggcaacgaggcccccggcggcuacugccugaccagauggaugcugaucgaggccgagcugaagugcuucggcaacaccgccguggccaagugcaacgagaagcacgacgaggaguucugcgacaugcugagacuguucgacuucaacaagcaggccaucaagagacugaagacccccgcccagaugagcauccagcugaucaacaaggccgugaacgcccugaucaacgaccagcugaucaugaagaaccaccugagagacaucaugugcauccccuacugcaacuacagcagauacugguaccugaaccacaccgugaccggcaagaccagccugcccagaugcuggcuggugagcaacggcagcuaccugaacgagacccacuucagcgacgacaucgagcagcaggccgacaacaugaucaccgagaugcugcagaaggaguacauggacagacagggcaagaccccccugggccugguggaccuguucguguucagcaccagcuucuaccugaucagcaucuuccugcaccuggugaagauccccacccacagacacaucgugggcaagcccugccccaagccccacagacugaaccacaugggcaucugcagcugcggccuguacaagcaccccggcgugcccgugaaguggaagagaugaggacuaguaauaaggaaacuguaugaaugucugugggcaggaagugaagagauccuucuguaaagguuuuuggaauuaugucugcugaauaauaaacuuuuuugaaauaauaaaucugguagaaaaaugagaucucaaaggcucuuuucagagccaccaaaaaaaaaaaaaaaaaaaaaaaaaaaaaaaaaaaaaaaaaaaaaaaaaaaaaaaaaaaaaaaaagaauu

SEQ ID NO: 29032 - RNA, 1778 nt, Artificial Sequence
  mRNA product Design b-4 (hSL-A64-N5) comprising derived and/or modified sequence from LASV(GA391;Clade III)__CAA36645__GPCmut5 (opt4)
aggagagucccgcagucggcguccagcggcucugcuuguucgugugugugucguugcaggccuuauucaagcuuaccaugggccagaucgugaccuucuuccaggaggugccccacgugaucgaggaggugaugaacaucgugcugaucgcccugagcauccuggccauccugaagggccuguacaacguggccaccugcggccugaucggccuggugaccuuccugcugcugagcggcagaagcugcagccugaucuacaagggcaccuacgagcugcagacccuggagcugaacauggagacccugaacaugaccaugccccugagcugcaccaagaacaacagccaccacuacaucagagugggcaacgagaccggccuggagcugacccugaccaacaccagcauccugaaccacaaguucugcaaccugagcgacgcccacaagagaaaccuguacgaccacagccugaugagcaucaucagcaccuuccaccugagcauccccaacuucaaccaguacgaggccaugagcugcgacuucaacggcggcaagaucaccgugcaguacaaccugagccacagcuucgccguggacgccgccggccacugcggcacccuggccaacggcgugcugcagaccuucaugagaauggccuggggcggcagcuacaucgcccuggacagcggcugcggcaacugggacugcaucaugaccagcuaccaguaccugaucauccagaacaccaccugggacgaccacugccaguucagcagacccagccccaucggcuaccugggccugcugagccagagaaccagagacaucuacaucagcagaagacugcugggcaccuucaccuggacccugagcgacagcgagggcaacgagacccccggcggcuacugccugaccagauggaugcugaucgaggccgagcugaagugcuucggcaacaccgccguggccaagugcaacgagaagcacgacgaggaguucugcgacaugcugagacuguucgacuucaacaagcaggccaucagaagacugaagacccccgcccagaugagcauccagcugaucaacaaggccgugaacgcccugaucaacgaccagcugaucaugaagaaccaccugagagacaucaugugcauccccuacugcaacuacagcagauacugguaccugaaccacaccagcaccggcaagaccagccugcccagaugcuggcugaucagcaacggcagcuaccugaacgagaccaaguucagcgacgacaucgagcagcaggccgacaacaugaucaccgagaugcugcagaaggaguacaucgacagacagggcaagaccccccugggccugguggaccuguucguguucagcaccagcuucuaccugaucagcaucuuccugcaccuggugaagauccccacccacagacacaucgugggcaagcccugccccaagccccacagacugaaccacaugggcaucugcagcugcggccuguacaagcagcccggcgugcccgugagauggaagagaugaggacuaguaauaaggaaacuguaugaaugucugugggcaggaagugaagagauccuucuguaaagguuuuuggaauuaugucugcugaauaauaaacuuuuuugaaauaauaaaucugguagaaaaaugagaucucaaaggcucuuuucagagccaccaaaaaaaaaaaaaaaaaaaaaaaaaaaaaaaaaaaaaaaaaaaaaaaaaaaaaaaaaaaaaaaaagaauu

SEQ ID NO: 29033 - RNA, 1781 nt, Artificial Sequence
  mRNA product Design b-4 (hSL-A64-N5) comprising derived and/or modified sequence from LASV(AV;Clade V)__CCA30314__GPCmut5 (opt4)
aggagagucccgcagucggcguccagcggcucugcuuguucgugugugugucguugcaggccuuauucaagcuuaccaugggccagaucgugaccuucuuccaggaggugccccacgugaucgaggaggugaugaacaucgugcugaucgcccugagcauccuggccgugcugaagggccuguacaacaucgccaccugcggccugaucggccugaucaccuuccugcugcugugcggcagaagcugcagcagcaaccuguacaagggcguguacgagcugcagagccuggaccugaacauggagacccugaacaugaccaugccccugagcugcaccaagaacaacagccaccacuacaucagagugggcaacgacaccggccuggagcugacccugaccaacaccagcauccugaaccacaaguucugcaaccugagcgacgcccacaagaaggaccuguacgaccacgcccugaugagcaucaucagcaccuuccaccugagcauccccaacuucaaccaguacgaggccaugagcugcgacuucaacggcggcaagaucagcgugcaguacaaccugagccacagcuacgccaucgacgccgccaaccacugcggcaccguggccaacggcauccugcagaccuucaugagaauggccuggggcggcagcuacaucgcccuggacagcggcugcggcaacugggacugcaucaugaccagcuaccaguaccugaucauccagaacaccaccugggagaaccacugccaguucagcagacccagccccaucggcuaccugggccugcugagccagagaaccagagacaucuacaucagcagaagacugcugggcaccuucaccuggacccugagcgacagcgagggcaacgccacccccggcggcuacugccugaccagauggaugcugaucgaggccgagcugaagugcuucggcaacaccgccguggccaagugcaacgagaagcacgacgaggaguucugcgacaugcugagacuguucgacuucaacaagcaggccaucagcagacugaagagccccgcccagaugagcauccagcugaucaacaaggccgugaacgcccugaucaacgaccagcugaucaugaagaaccaccugagagacaucaugugcauccccuacugcaacuacagcaaguacugguaccugaaccacaccaucaccggcaagaccagccugcccaagugcuggcuggugagcaacggcagcuaccugaacgagacccacuucagcgacgacaucgagcagcaggccgacaacaugaucaccgagaugcugcagaaggaguacauggagagacagggcaagaccccccugggccugguggaccuguucguguucagcaccagcuucuaccugaucagcaucuuccugagacuggugaagauccccacccacagacacaucgugggcaagcccugccccaagccccacagacugaaccacaugggcaucugcagcugcggccuguacaagcagcccggcgugcccgugagauggaagagaugaggacuaguaauaaggaaacuguaugaaugucugugggcaggaagugaagagauccuucuguaaagguuuuuggaauuaugucugcugaauaauaaacuuuuuugaaauaauaaaucugguagaaaaaugagaucucaaaggcucuuuucagagccaccaaaaaaaaaaaaaaaaaaaaaaaaaaaaaaaaaaaaaaaaaaaaaaaaaaaaaaaaaaaaaaaaagaauu

SEQ ID NO: 29034 - RNA, 1778 nt, Artificial Sequence
  mRNA product Design b-4 (hSL-A64-N5) comprising derived and/or modified sequence from LASV(Togo/2016/7082;Clade VI)__AMR44577__GPCmut5 (opt4)
aggagagucccgcagucggcguccagcggcucugcuuguucgugugugugucguugcaggccuuauucaagcuuaccaugggccagaucaucaccuucuuccaggaggugccccacgugaucgaggaggugaugaacaucgugcugaucgcccugagccugcuggccauccugaagggcguguacaacguggccaccugcggcaucaucggccuggugaccuuccuguuccugugcggcagaagcugcagccugaucuacaagggcagcuacgagcugcagacccuggagcugaacauggagacccugaacaugaccaugccccugagcugcaccaagaacagcagccaccacuacaucagagugggcaacgagaccggccuggagcugacccugaccaacaccagcaucaucaaccacaaguucugcaaccugagcgacgcccacaagagaaaccuguacgaccacgcccugaugagcauccugagcaccuuccaccugagcauccccaacuucaaccaguacgaggccaugagcugcgacuucaacggcggcaagaucagcgugcaguacaaccugagccacgccuacgccguggacgccgccgagcacugcggcaccguggccaacggcgugcugcagaccuucaugagaauggccuggggcggcagcuacaucgcccuggacagcggcugcggcaacugggacugcaucaugaccagcuaccaguaccugaucauccagaacaccaccugggaggaccacugccaguucagcagacccagccccaucggcuaccugggccugcugagccagagaaccagagacaucuacaucagcagaagacugcugggcaccuucaccuggacccugagcgacagcgagggcaacgagacccccggcggcuacugccugaccagauggaugcugaucgaggccgagcugaagugcuucggcaacaccgccguggccaagugcaacgagaagcacgacgaggaguucugcgacaugcugagacuguucgacuucaacaagcaggccauccagagacugaagagccccgcccagaugagcauccagcugaucaacaaggccgugaacgcccugaucaacgaccagcugaucaugaagaaccaccugagagacaugaugugcauccccuacugcaacuacagcaaguacugguaccugaaccacaccagcagcggcagaaccagccugcccaagugcuggcuggugagcaacggcagcuaccugaacgagacccacuucagcgacgacaucgagcagcaggccgacaacaugaucaccgagaugcugcagaaggaguacaucgacagacagggcaagaccccccugggccugguggaccuguucguguucagcaccagcuucuaccugaucagcaucuuccugcaccugaucaagauccccacccacagacacaucgugggcaagcccugccccaagccccacagacugaaccacaugggcaucugcagcugcggccuguacaagcagcccggcgugcccaccagauggaagagaugaggacuaguaauaaggaaacuguaugaaugucugugggcaggaagugaagagauccuucuguaaagguuuuuggaauuaugucugcugaauaauaaacuuuuuugaaauaauaaaucugguagaaaaaugagaucucaaaggcucuuuucagagccaccaaaaaaaaaaaaaaaaaaaaaaaaaaaaaaaaaaaaaaaaaaaaaaaaaaaaaaaaaaaaaaaaagaauu

SEQ ID NO: 29035 - RNA, 1778 nt, Artificial Sequence
  mRNA product Design b-4 (hSL-A64-N5) comprising derived and/or modified sequence from LASV(KAK-428;Clade n.d. (VII))__ANH09740__GPCmut5 (opt4)
aggagagucccgcagucggcguccagcggcucugcuuguucgugugugugucguugcaggccuuauucaagcuuaccaugggccagaucgugaccuucuuccaggaggugccccacgugaucgaggaggugaugaacaucgugcugaucgcccugagccugcuggccauccugaagggccuguacaacuucgccaccugcggcgugaucggccugaucaccuuccugcugcugugcggcagaagcugcagcgccaccuacaagggccaguacgagcugcagacccuggagcugaacauggagagccugaacaugaccaugccccugagcugcaccaagaacaacagccaccacuacaucagagccggcaacaacaccggccuggagcugacccugaccaacaccagcaucaucagccacaaguucugcaaccugagcgacgcccacaagaagaaccuguacgaccacacccugaugagcaucaucaccaccuuccaccugagcauccccaacuucaaccaguacgaggccaugagcugcgacuucaacggcggcaagaucagcauccaguacaaccugagccacagcuacgccggcgacgccgcccagcacugcggcaccguggccaacggcgugcugcagaccuucaugagaauggccuggggcggcagcuaccuggcccuggacagcggcugcagaggcugggacugcaucaucagcagcuaccaguaccugaucauccagaacaccaccugggacgaccacugccaguucagcagacccagccccaucggcuaccugggcuucgugagccagaagaccagagacaucuacaucagcagaagacugcugggcaccuucaccuggacccugagcgacagcgagggccacgacaugcccggcggcuacugccugaccagauggaugcugaucgaggccgaccugaagugcuucggcaacaccgccguggccaagugcaacgagaagcacgacgaggaguucugcgacauguggagacuguucgacuucaacaagcaggccauccagagacugaaggcccccgcccagaugaacauccagcugaucaacaaggccgugaacgcccugaucaacgaccagcugaugaugaagaaccaccugagagacaucaugugcauccccuacugcaacuacagcaaguucugguaccugaacaacaccaccaccggcagaaccagccugcccagaugcuggcugaucagcaacggcagcuaccugaacgagacccacuucagcgacgacaucgagcagcaggccgacaacaugaucaccgagaugcugcagaaggaguacauggacagacagggcaagaccccccugggccugguggaccuguucguguucagcaccagcuucuaccugaucaccaucuuccugcaccuggugaagauccccacccacagacacaucgugggcaagcccugccccaagccccacagacugaaccacaugggcaucugcagcugcggccuguacaagcagcccggcgugcccgugagauggaagagaugaggacuaguaauaaggaaacuguaugaaugucugugggcaggaagugaagagauccuucuguaaagguuuuuggaauuaugucugcugaauaauaaacuuuuuugaaauaauaaaucugguagaaaaaugagaucucaaaggcucuuuucagagccaccaaaaaaaaaaaaaaaaaaaaaaaaaaaaaaaaaaaaaaaaaaaaaaaaaaaaaaaaaaaaaaaaagaauu

SEQ ID NO: 29036 - RNA, 1778 nt, Artificial Sequence; identical to SEQ ID NO: 29030
  mRNA product Design b-4 (hSL-A64-N5) comprising derived and/or modified sequence from LASV(Pinneo-NIG-1969;Clade I)__AIT17836__GPCmut5 (opt4)

SEQ ID NO: 29037 - RNA, 1778 nt, Artificial Sequence
  mRNA product Design b-4 (hSL-A64-N5) comprising derived and/or modified sequence from LASV(ISTH0009-NIG-2011;Clade II)__AIT17404__GPCmut5 (opt4)
aggagagucccgcagucggcguccagcggcucugcuuguucgugugugugucguugcaggccuuauucaagcuuaccaugggccagaucaucaccuucuuccaggaggugccccacgugaucgaggaggugaugaacaucgugcugaucgcccugagccugcuggccauccugaagggcaucuacaacguggccaccugcggccuguucggccuggugagcuuccugcugcugugcggcagaagcugcagcaccaccuacaagggcguguacgagcugcagacccuggagcuggacauggccagccugaacaugaccaugccccugagcugcaccaagaacaacagccaccacuacaucauggugggcaacgagaccggccuggagcugacccugaccaacaccagcaucaucaaccacaaguucugcaaccugagcgacgcccacaagaagaaccuguacgaccacgcccugaugagcaucaucagcaccuuccaccugagcauccccaacuucaaccaguacgaggccaugagcugcgacuucaacggcggcaagaucagcgugcaguacaaccugagccacgccuacgccguggacgccgccaaccacugcggcaccaucgccaacggcgugcugcagaccuucaugagaauggccuggggcggcagcuacaucgcccuggacagcggcugcggcagcugggacugcaucaugaccagcuaccaguaccugaucauccagaacaccaccugggaggaccacugccaguucagcagacccagccccaucggcuaccugggccugcugagccagagaaccagagacaucuacaucagcagaagacugcugggcaccuucaccuggacccugagcgacagcgagggcaacgagacccccggcggcuacugccugaccagauggaugcugaucgaggccgagcugaagugcuucggcaacaccgccguggccaagugcaacgagaagcacgacgaggaguucugcgacaugcugagacuguucgacuucaacaagcaggccaucagaagacugaagacccccgcccagaugagcauccagcugaucaacaaggccgugaacgcccugaucaacgaccagcugaucaugaagaaccaccugagagacaucaugugcauccccuacugcaacuacagcaaguacugguaccugaaccacaccgugaccggcaagaccagccugcccagaugcuggcuggugagcaacggcagcuaccugaacgagacccacuucagcgacgacaucgagcagcaggccgacaacaugaucaccgagcugcugcagaaggaguacauggacagacagggcaagaccccccugggccugguggaccuguucguguucagcaccagcuucuaccugaucagcaucuuccugcaccugaucaagauccccacccacagacacaucaccggcaagcccugccccaagccccacagacugaaccacaugggcaucugcagcugcggccuguacaagcaccccggcgugcccgugaaguggaagagaugaggacuaguaauaaggaaacuguaugaaugucugugggcaggaagugaagagauccuucuguaaagguuuuuggaauuaugucugcugaauaauaaacuuuuuugaaauaauaaaucugguagaaaaaugagaucucaaaggcucuuuucagagccaccaaaaaaaaaaaaaaaaaaaaaaaaaaaaaaaaaaaaaaaaaaaaaaaaaaaaaaaaaaaaaaaaagaauu

SEQ ID NO: 29038 - RNA, 1778 nt, Artificial Sequence
  mRNA product Design b-4 (hSL-A64-N5) comprising derived and/or modified sequence from LASV(ISTH2010-NIG-2012;Clade II)__AIT17482__GPCmut5 (opt4)
aggagagucccgcagucggcguccagcggcucugcuuguucgugugugugucguugcaggccuuauucaagcuuaccaugggccagaucaucaccuucuuccaggaggugccccacgugaucgaggaggugaugaacaucgugcugaucgcccugagccugcuggccauccugaagggcaucuacaacguggccaccugcggccuguucggccuggugagcuuccugcugcugugcggcagaagcugcagcaccaccuacaagggcguguacgagcugcagacccuggagcuggacauggccagccugaacaugaccaugccccugagcugcaccaagaacaacagccaccacuacaucauggugggcaacgagaccggccuggagcugacccugaccaacaccagcaucaucaaccacaaguucugcaaccugagcgacgcccacaagaagaaccuguacgaccacgcccugaugagcaucaucagcaccuuccaccugagcauccccaacuucaaccaguacgaggccaugagcugcgacuucaacggcggcaagaucagcgugcaguacaaccugagccacgccuacgccguggacgccgccaaccacugcggcaccaucgccaacggcgugcugcagaccuucaugagaauggccuggggcggcagcuacaucgcccuggacagcggcugcggcagcugggacugcaucaugaccagcuaccaguaccugaucauccagaacaucaccugggaggaccacugccaguucagcagacccagccccaucggcuaccugggccugcugagccagagaaccagagacaucuacaucagcagaagacugcugggcaccuucaccuggacccugagcgacagcgagggcaacgagacccccggcggcuacugccugaccagauggaugcugaucgaggccgagcugaagugcuucggcaacaccgccguggccaagugcaacgagaagcacgacgaggaguucugcgacaugcugagacuguucgacuucaacaagcaggccaucagaagacugaagacccccgcccagaugagcauccagcugaucaacaaggccgugaacgcccugaucaacgaccagcugaucaugaagaaccaccugagagacaucaugugcauccccuacugcaacuacagcaaguacugguaccugaaccacaccgugaccggcaagaccagccugcccagaugcuggcuggugagcaacggcagcuaccugaacgagacccacuucagcgacgacaucgagcagcaggccgacaacaugaucaccgagcugcugcagaaggaguacaucgacagacagggcaagaccccccugggccugguggaccuguucguguucagcaccagcuucuaccugaucagcaucuuccugcaccuggugaagauccccacccacagacacguggugggcaagcccugccccaagccccacagacugaaccacaugggcaucugcagcugcggccuguacaagcaccccggcgugcccgugaaguggaagagaugaggacuaguaauaaggaaacuguaugaaugucugugggcaggaagugaagagauccuucuguaaagguuuuuggaauuaugucugcugaauaauaaacuuuuuugaaauaauaaaucugguagaaaaaugagaucucaaaggcucuuuucagagccaccaaaaaaaaaaaaaaaaaaaaaaaaaaaaaaaaaaaaaaaaaaaaaaaaaaaaaaaaaaaaaaaaagaauu

SEQ ID NO: 29039 - RNA, 1778 nt, Artificial Sequence
  mRNA product Design b-4 (hSL-A64-N5) comprising derived and/or modified sequence from LASV(Lassa virus/H.sapiens-wt/NGA/2015/ISTH_0543;Clade II)__AVO03639__GPCmut5 (opt4)
aggagagucccgcagucggcguccagcggcucugcuuguucgugugugugucguugcaggccuuauucaagcuuaccaugggccagaucaucaccuucuuccaggaggugccccacgugaucgaggaggugaugaacaucgugcugaucgcccugagccugcuggccauccugaagggcaucuacaacguggccaccugcggccuguucggccuggugagcuuccugcugcugugcggcagaagcugcagcaccaccuacaagggcguguacgagcugcagacccuggagcuggacauggccaaccugaacaugaccaugccccugagcugcaccaagaacaacagccaccacuacaucauggugggcaacgagaccggccuggagcugacccugaccaacaccagcaucaucaaccacaaguucugcaaccugagcgacgcccacaagaagaaccuguacgaccacgcccugaugagcaucaucagcaccuuccaccugagcauccccaacuucaaccaguacgaggccaugagcugcgacuucaacggcggcaagaucagcgugcaguacaaccugagccacaccuacgccguggacgccgccaaccacugcggcaccaucgccaacggcgugcugcagaccuucaugagaauggccuggggcggcagcuacaucgcccuggacagcggcugcggcagcugggacugcaucaugaccagcuaccaguaccuggugauccagaacaccaccugggaggaccacugccaguucagcagacccagccccaucggcuaccugggccugcugagccagagaaccagagacaucuacaucagcagaagacugcugggcaccuucaccuggacccugagcgacagcgagggcaacgagacccccggcggcuacugccugaccagauggaugcugaucgaggccgagcugaagugcuucggcaacaccgccguggccaagugcaacgagaagcacgacgaggaguucugcgacaugcugagacuguucgacuucaacaagcaggccaucagaagacugaagacccccgcccagaugagcauccagcugaucaacaaggccgugaacgcccugaucaacgaccagcugaucaugaagaaccaccugagagacaucaugugcauccccuacugcaacuacagcaaguacugguaccugaaccacaccgugaccggcaagaccagccugcccagaugcuggcuggugagcaacggcagcuaccugaacgagacccacuucagcgacgacaucgagcagcaggccgacaacaugaucaccgagcugcugcagaaggaguacaucgacagacagggcaagaccccccugggccugguggaccuguucguguucagcaccagcuucuaccugaucagcaucuuccugcaccuggugaagauccccacccacagacacaucaccggcaagcccugccccaagccccacagacugaaccacaugggcaucugcagcugcggccuguacaagcaccccggcgugcccgugaaguggaagagaugaggacuaguaauaaggaaacuguaugaaugucugugggcaggaagugaagagauccuucuguaaagguuuuuggaauuaugucugcugaauaauaaacuuuuuugaaauaauaaaucugguagaaaaaugagaucucaaaggcucuuuucagagccaccaaaaaaaaaaaaaaaaaaaaaaaaaaaaaaaaaaaaaaaaaaaaaaaaaaaaaaaaaaaaaaaaagaauu

SEQ ID NO: 29040 - RNA, 1778 nt, Artificial Sequence
  mRNA product Design b-4 (hSL-A64-N5) comprising derived and/or modified sequence from LASV(Lassa virus/H.sapiens-wt/NGA/2016/ISTH_0009;Clade II)__AVO03571__GPCmut5 (opt4)
aggagagucccgcagucggcguccagcggcucugcuuguucgugugugugucguugcaggccuuauucaagcuuaccaugggccagaucaucaccuucuuccaggaggugccccacgugaucgaggaggugaugaacaucgugcugaucgcccugagccugcuggccauccugaagggcaucuacaacguggccaccugcggccugcugggccuggugagcuuccugcugcugugcggcagaagcugcagcaccaccuacaagggcguguacgagcugcagacccuggagcuggacauggccagccugaacaugaccaugccccugagcugcaccaagaacaacagccaccacuacaucauggugggcaacgagaccggccuggagcugacccugaccaacaccagcaucaucaaccacaaguucugcaaccugagcgacgcccacaagaagaaccuguacgaccacgcccugaugagcaucaucagcaccuuccaccugagcauccccaacuucaaccaguacgaggccaugagcugcgacuucaacggcggcagaaucagcgugcaguacaaccugagccacagcuacgccguggacgccgccaaccacugcggcaccaucgccaacggcgugcugcagaccuucaugagaauggccuggggcggcagcuacaucgcccuggacagcggcugcggcagcugggacugcaucaugaccagcuaccaguaccugaucauccagaacaccaccugggaggaccacugccaguucagcagacccagccccaucggcuaccugggccugcugagccagagaaccagagacaucuacaucagcagaagacugcugggcaccuucaccuggacccugagcgacagcgagggcaacgagacccccggcggcuacugccugaccagauggaugcugaucgaggccgagcugaagugcuucggcaacaccgccguggccaagugcaacgagaagcacgacgaggaguucugcgacaugcugagacuguucgacuucaacaagcaggccaucagaagacugaagacccccgcccagaugagcauccagcugaucaacaaggccgugaacgcccugaucaacgaccagcugaucaugaagaaccaccugagagacaucaugugcauccccuacugcaacuacagcaaguacugguaccugaaccacaccgugaccggcaagaccagccugcccagaugcuggcuggugagcaacggcagcuaccugaacgagacccacuucagcgacgacaucgagcagcaggccgacaacaugaucaccgagcugcugcagaaggaguacaucgacagacagggcaagaccccccugggccugguggaccuguucguguucagcaccagcuucuaccugaucagcaucuuccugcaccuggugaagauccccacccacagacacaucaccggcaagcccugccccaagccccacagacugaaccacaugggcaucugcagcugcggccuguacaaccaccccggcgugcccgugaaguggaagagaugaggacuaguaauaaggaaacuguaugaaugucugugggcaggaagugaagagauccuucuguaaagguuuuuggaauuaugucugcugaauaauaaacuuuuuugaaauaauaaaucugguagaaaaaugagaucucaaaggcucuuuucagagccaccaaaaaaaaaaaaaaaaaaaaaaaaaaaaaaaaaaaaaaaaaaaaaaaaaaaaaaaaaaaaaaaaagaauu

SEQ ID NO: 29041 - RNA, 1778 nt, Artificial Sequence
  mRNA product Design b-4 (hSL-A64-N5) comprising derived and/or modified sequence from LASV(Lassa virus/H.sapiens-wt/NGA/2016/ISTH_0017;Clade II)__AVO03567__GPCmut5 (opt4)
aggagagucccgcagucggcguccagcggcucugcuuguucgugugugugucguugcaggccuuauucaagcuuaccaugggccagaucaucaccuucuuccaggaggugccccacgugaucgaggaggugaugaacaucgugcugaucgcccugagccugcuggccauccugaagggcaucuacaacguggccaccugcggccuguucggccuggugagcuuccugcugcugugcggcagaagcugcagcaccaccuacaagggcguguacgagcugcagacccuggagcuggacauggccagccugaacaugaccaugccccugagcugcaccaagaacaacagccaccacuacaucauggugggcaacgagaccggccuggagcugacccugaccaacaccagcaucaucaaccacaaguucugcaaccugagcgacgcccacaagaagaaccuguacgaccacgcccugaugagcaucaucagcaccuuccaccugagcauccccaacuucaaccaguacgaggccaugagcugcgacuucaacggcggcaagaucagcgugcaguacaaccugagccacaccuacgccaucgacgccgccaaccacugcggcaccaucgccaacggcgugcugcagaccuucaugagaauggccuggggcggcagcuacaucgcccuggacagcggcugcggcagcugggacugcaucaugaccagcuaccaguaccugaucauccagaacaccaccugggaggaccacugccaguucagcagacccagccccaucggcuaccugggccugcugagccagagaaccagagacaucuacaucagcagaagacugcugggcaccuucaccuggacccugagcgacagcgagggcaacgagacccccggcggcuacugccugaccagauggaugcugaucgaggccgagcugaagugcuucggcaacaccgccguggccaagugcaacgagaagcacgacgaggaguucugcgacaugcugagacuguucgacuucaacaagcaggccaucagaagacugaagacccccgcccagaugagcauccagcugaucaacaaggccgugaacgcccugaucaacgaccagcugaucaugaagaaccaccugagagacaucaugugcauccccuacugcaacuacagcaaguacugguaccugaaccacaccgugaccggcaagaccagccugcccagaugcuggcuggugagcaacggcagcuaccugaacgagacccacuucagcgacgacaucgagcagcaggccgacaacaugaucaccgagcugcugcagaaggaguacauggacagacagggcaagaccccccugggccugguggaccuguucguguucagcaccagcuucuaccugaucagcaucuuccugcaccuggugagaauccccacccacagacacgugaucggcaagcccugccccaagccccacagacugaaccacaugggcaucugcagcugcggccuguacaagcaccccggcgugcccgugaaguggaagagaugaggacuaguaauaaggaaacuguaugaaugucugugggcaggaagugaagagauccuucuguaaagguuuuuggaauuaugucugcugaauaauaaacuuuuuugaaauaauaaaucugguagaaaaaugagaucucaaaggcucuuuucagagccaccaaaaaaaaaaaaaaaaaaaaaaaaaaaaaaaaaaaaaaaaaaaaaaaaaaaaaaaaaaaaaaaaagaauu

SEQ ID NO: 29042 - RNA, 1778 nt, Artificial Sequence
  mRNA product Design b-4 (hSL-A64-N5) comprising derived and/or modified sequence from LASV(Lassa virus/H.sapiens-wt/NGA/2018/ISTH_0959;Clade II)__AVV65099__GPCmut5 (opt4)
aggagagucccgcagucggcguccagcggcucugcuuguucgugugugugucguugcaggccuuauucaagcuuaccaugggccagaucaucaccuucuuccaggaggugccccacgugaucgaggaggugaugaacaucgugcugaucgcccugagccugcuggccauccugaagggcaucuacaacguggugaccugcggccuguucggccuggugagcuuccugcugcugugcggcagaagcugcagcaccaccuacaagggcguguacgagcugcagacccuggagcuggacauggccagccugaacaugaccaugccccugagcugcaccaagaacaacagccaccacuacaucauggugggcaacgagaccggccuggagcugacccugaccaacaccagcaucaucaaccacaaguucugcaaccugagcgacgcccacaagaagaaccuguacgaccacgcccugaugagcaucaucagcaccuuccaccugagcauccccaacuucaaccaguacgaggccaugagcugcgacuucaacggcggcaagaucagcgugcaguacaaccugagccacgccuacgccaucgacgccgccaaccacugcggcaccaucgccaacggcgugcugcagaccuucaugagaauggccuggggcggcagcuacaucgcccuggacagcggcugcggcagcugggacugcaucaugaccagcuaccaguaccugaucauccagaacaccaccugggaggaccacugccaguucagcagacccagccccaucggcuaccugggccugcugagccagagaaccagagacaucuacaucagcagaagacugcugggcaccuucaccuggacccugagcgacagcgagggcaacgagacccccggcggcuacugccugaccagauggaugcugaucgaggccgagcugaagugcuucggcaacaccgccguggccaagugcaacgagaagcacgacgaggaguucugcgacaugcugagacuguucgacuucaacaagcaggccaucagaagacugaagacccccgcccagaugagcauccagcugaucaacaaggccgugaacgcccugaucaacgaccagcugaucaugaagaaccaccugagagacaucaugugcauccccuacugcaacuacagcaaguacugguaccugaaccacaccgugaccggcaagaccagccugcccagaugcuggcuggugagcaacggcagcuaccugaacgagacccacuucagcgacgacaucgagcagcaggccgacaacaugaucaccgagcugcugcagaaggaguacaucgacagacagggcaagaccccccugggccugguggaccuguucguguucagcaccagcuucuaccugaucagcaucuuccugcaccuggugaagauccccacccacagacacgugaucggcaagcccugccccaagccccacagacugaaccacaugggcaucugcagcugcggccuguacaagcaccccggcgugcccgugaaguggaagagaugaggacuaguaauaaggaaacuguaugaaugucugugggcaggaagugaagagauccuucuguaaagguuuuuggaauuaugucugcugaauaauaaacuuuuuugaaauaauaaaucugguagaaaaaugagaucucaaaggcucuuuucagagccaccaaaaaaaaaaaaaaaaaaaaaaaaaaaaaaaaaaaaaaaaaaaaaaaaaaaaaaaaaaaaaaaaagaauu

SEQ ID NO: 29043 - RNA, 1778 nt, Artificial Sequence
  mRNA product Design b-4 (hSL-A64-N5) comprising derived and/or modified sequence from LASV(LASV003-NIG-2008;Clade II)__AIT17580__GPCmut5 (opt4)
aggagagucccgcagucggcguccagcggcucugcuuguucgugugugugucguugcaggccuuauucaagcuuaccaugggccagaucaucaccuucuuccaggaggugccccacgugaucgaggaggugaugaacaucgugcugaucgcccugagccugcuggccauccugaagggcaucuacaacguggccaccugcggccuguucggccuggugagcuuccugcugcugugcggcagaagcugcagcaccaccuacaagggcguguacgagcugcagacccuggagcuggacauggccagccugaacaugaccaugccccugagcugcaccaagaacaacagccaccacuacaucauggugggcaacgagaccggccuggagcugacccugaccaacaccagcaucaucaaccacaaguucugcaaccugagcgacgcccacaagaagaaccuguacgaccacgcccugaugagcaucaucagcaccuuccaccugagcauccccaacuucaaccaguacgaggccaugagcugcgacuucaacggcggcaagaucagcgugcaguacaaccugagccacaccuacgccguggacgccgccaaccacugcggcaccaucgccaacggcgugcugcagaccuucaugagaauggccuggggcggcagcuacaucgcccuggacagcggcugcggcagcugggacugcaucaugaccagcuaccaguaccugaucauccagaacaccaccugggaggaccacugccaguucagcagacccagccccaucggcuaccugggccugcugagccagagaaccagagacaucuacaucagcagaagacugcugggcaccuucaccuggacccugagcgacagcgagagcaacgagacccccggcggcuacugccugaccagauggaugcugaucgaggccgagcugaagugcuucggcaacaccgccguggccaagugcaacgagaagcacgacgaggaguucugcgacaugcugagacuguucgacuucaacaagcaggccaucagaagacugaaggcccccgcccagaugagcauccagcugaucaacaaggccgugaacgcccugaucaacgaccagcugaucaugaagaaccaccugagagacaucaugugcauccccuacugcaacuacagcaaguacugguaccugaaccacaccgugaccggcagaaccagccugcccagaugcuggcuggugagcaacggcagcuaccugaacgagacccacuucagcgacgacaucgagcagcaggccgacaacaugaucaccgagcugcugcagaaggaguacauggacagacagggcaagaccccccugggccugguggaccuguucguguucagcaccagcuucuaccugaucagcaucuuccugcaccuggugaagauccccacccacagacacgugaucggcaagcccugccccaagccccacagacugaaccacaugggcaucugcagcugcggccuguacaagcaccccggcgugcccgugaaguggaagagaugaggacuaguaauaaggaaacuguaugaaugucugugggcaggaagugaagagauccuucuguaaagguuuuuggaauuaugucugcugaauaauaaacuuuuuugaaauaauaaaucugguagaaaaaugagaucucaaaggcucuuuucagagccaccaaaaaaaaaaaaaaaaaaaaaaaaaaaaaaaaaaaaaaaaaaaaaaaaaaaaaaaaaaaaaaaaagaauu

SEQ ID NO: 29044 - RNA, 1778 nt, Artificial Sequence
  mRNA product Design b-4 (hSL-A64-N5) comprising derived and/or modified sequence from LASV(LASV035-NIG-2009;Clade II)__AIT17588__GPCmut5 (opt4)
aggagagucccgcagucggcguccagcggcucugcuuguucgugugugugucguugcaggccuuauucaagcuuaccaugggccagaucaucaccuucuuccaggaggugccccacgugaucgaggaggugaugaacaucgugcugaucgcccugagccugcuggccauccugaagggcaucuacaacguggccaccugcggccuguucggccuggugagcuuccugcugcugugcggcagaagcugcagcaccaccuacaagggcguguacgagcugcagacccuggagcuggacauggccagccugaacaugaccaugccccugagcugcaccaagaacaacagccaccacuacaucauggugggcaacgagaccggccuggagcugacccugaccaacaccagcaucaucaaccacaaguucugcaaccugagcgacgcccacaagaagaaccuguacgaccacgcccugaugagcaucaucagcaccuuccaccugagcauccccaacuucaaccaguacgaggccaugagcugcgacuucaacggcggcaagaucagcgugcaguacaaccugagccacgccuacgccguggacgccgccaaccacugcggcaccaucgccaacggcgugcugcagaccuucaugagaauggccuggggcggcagcuacaucgcccuggacagcggcugcggcagcugggacugcaucaugaccagcuaccaguaccugaucauccagaacaccaccugggaggaccacugccaguucagcagacccagccccaucggcuaccugggccugcugagccagagaaccagagacaucuacaucagcagaagacugcugggcaccuucaccuggacccugagcgacagcgagggcaacgagacccccggcggcuacugccugaccagauggaugcugaucgaggccgagcugaagugcuucggcaacaccgccguggccaagugcaacgagaagcacgacgaggaguucugcgacaugcugagacuguucgacuucaacaagcaggccaucagaagacugaaggcccccgcccagaugagcauccagcugaucaacaaggccgugaacgcccugaucaacgaccagcugaucaugaagaaccaccugagagacaucaugugcauccccuacugcaacuacagcaaguacugguaccugaaccacaccgugaccggcaagaccagccugcccagaugcuggcuggugagcaacggcagcuaccugaacgagacccacuucagcgacgacaucgagcagcaggccgacaacaugaucaccgagcugcugcagaaggaguacaucgacagacagggcaagaccccccugggccugguggaccuguucguguucagcaccagcuucuaccugaucagcaucuuccugcaccuggugaagauccccacccacagacacgugaucggcaagcccugccccaagccccacagacugaaccacaugggcaucugcagcugcggccuguacaagcaccccggcgugcccgugaaguggaagagaugaggacuaguaauaaggaaacuguaugaaugucugugggcaggaagugaagagauccuucuguaaagguuuuuggaauuaugucugcugaauaauaaacuuuuuugaaauaauaaaucugguagaaaaaugagaucucaaaggcucuuuucagagccaccaaaaaaaaaaaaaaaaaaaaaaaaaaaaaaaaaaaaaaaaaaaaaaaaaaaaaaaaaaaaaaaaagaauu

SEQ ID NO: 29045 - RNA, 1778 nt, Artificial Sequence
  mRNA product Design b-4 (hSL-A64-N5) comprising derived and/or modified sequence from LASV(LASV1000-NIG-2009;Clade II)__AIT17782__GPCmut5 (opt4)
aggagagucccgcagucggcguccagcggcucugcuuguucgugugugugucguugcaggccuuauucaagcuuaccaugggccagaucaucaccuucuuccaggaggugccccacgugaucgaggaggugaugaacaucgugcugaucgcccugagccugcuggccauccugaagggcaucuacaacguggccaccugcggccuguucggccuggugagcuuccugcugcugugcggcagaagcugcagcaccaccuacaagggcguguacgagcugcagacccuggagcuggacauggccagccugaacaugaccaugccccugagcugcaccaagaacaacagccaccacuacaucauggugggcaacgagaccggccuggagcugacccugaccaacaccagcaucaucaaccacaaguucugcaaccugagcgacgcccacaagaagaaccuguacgaccacgcccugaugagcaucaucagcaccuuccaccugagcauccccaacuucaaccaguacgaggccaugagcugcgacuucaacggcggcaagaucagcgugcaguacaaccugagccacaccuacgccguggacgccgccaaccacugcggcaccaucgccaacggcgugcugcagaccuucaugagaauggccuggggcggcagcuacaucgcccuggacagcggcugcggcagcugggacugcaucaugaccagcuaccaguaccugaucauccagaacaccaccugggaggaccacugccaguucagcagacccagccccaucggcuaccugggccugcugagccagagaaccagagacaucuacaucagcagaagacugcugggcaccuucaccuggacccugagcgacagcgagggcaacgagacccccggcggcuacugccugaccagauggaugcugaucgaggccgagcugaagugcuucggcaacaccgccguggccaagugcaacgagaagcacgacgaggaguucugcgacaugcugagacuguucgacuucaacaagcaggccaucaagagacugaagacccccgcccagaugagcauccagcugaucaacaaggccgugaacgcccugaucaacgaccagcugaucaugaagaaccaccugagagacaucaugugcauccccuacugcaacuacagcaaguacugguaccugaaccacaccgugaccggcaagaccagccugcccagaugcuggcuggugagcaacggcagcuaccugaacgagacccacuucagcgacgacaucgagcagcaggccgacaacaugaucaccgagcugcugcagaaggaguacaucgacagacagggcaagaccccccugggccugguggaccuguucguguucagcaccagcuucuaccugaucagcaucuuccugcaccuggugaagauccccacccacagacacguggugggcaagcccugccccaagccccacagacugaaccacaugggcaucugcagcugcggccuguacaagcaccccggcgugcccgugaaguggaagagaugaggacuaguaauaaggaaacuguaugaaugucugugggcaggaagugaagagauccuucuguaaagguuuuuggaauuaugucugcugaauaauaaacuuuuuugaaauaauaaaucugguagaaaaaugagaucucaaaggcucuuuucagagccaccaaaaaaaaaaaaaaaaaaaaaaaaaaaaaaaaaaaaaaaaaaaaaaaaaaaaaaaaaaaaaaaaagaauu

SEQ ID NO: 29046 - RNA, 1778 nt, Artificial Sequence
  mRNA product Design b-4 (hSL-A64-N5) comprising derived and/or modified sequence from LASV(LASV221-NIG-2010;Clade II)__AIT17624__GPCmut5 (opt4)
aggagagucccgcagucggcguccagcggcucugcuuguucgugugugugucguugcaggccuuauucaagcuuaccaugggccagaucaucaccuucuuccaggaggugccccacgugaucgaggaggugaugaacaucgugcugaucgcccugagccugcuggccauccugaagggcaucuacaacguggccaccugcggccuguucggccuggugagcuuccugcugcugugcggcagaagcugcagcaccaccuacaagggcguguacgagcugcagacccuggagcuggacauggccagccugaacaugaccaugccccugagcugcaccaagaacaacagccaccacuacaucauggugggcaacgagaccggccuggagcugacccugaccaacaccagcaucaucaaccacaaguucugcaaccugagcgacgcccacaagaagaaccuguacgaccacgcccugaugagcaucaucagcaccuuccaccugagcauccccaacuucaaccaguacgaggccaugagcugcgacuucaacggcggcaagaucagcgugcaguacaaccugagccacaccuacgccaucgacgccgccaaccacugcggcaccaucgccaacggcgugcugcagaccuucaugagaauggccuggggcggcagcuacaucgcccuggacagcggcugcggcagcugggacugcaucaugaccagcuaccaguaccugaucauccagaacaccaccugggaggaccacugccaguucagcagacccagccccaucggcuaccugggccugcugagccagagaaccagagacaucuacaucagcagaagacugcugggcaccuucaccuggacccugagcgacagcgagggcaacgagacccccggcggcuacugccugaccagauggaugcugaucgaggccgagcugaagugcuucggcaacaccgccguggccaagugcaacgagaagcacgacgaggaguucugcgacaugcugagacuguucgacuucaacaagcaggccaucagaagacugaagacccccgcccagaugagcauccagcugaucaacaaggccgugaacgcccugaucaacgaccagcugaucaugaagaaccaccugagagacaucaugugcauccccuacugcaacuacagcaaguacugguaccugaaccacaccgugaccggcaagaccagccugcccagaugcuggcuggugagcaacggcagcuaccugaacgagacccacuucagcgacgacaucgagcagcaggccgacaacaugaucaccgagaugcugcagaaggaguacauggacagacagggcaagaccccccugggccugguggaccuguucguguucagcaccagcuucuaccugaucagcaucuuccugcaccuggugaagauccccacccacagacacgugaucggcaagcccugccccaagccccacagacugaaccacaugggcaucugcagcugcggccuguacaagcaccccggcgugcccgugaaguggaagagaugaggacuaguaauaaggaaacuguaugaaugucugugggcaggaagugaagagauccuucuguaaagguuuuuggaauuaugucugcugaauaauaaacuuuuuugaaauaauaaaucugguagaaaaaugagaucucaaaggcucuuuucagagccaccaaaaaaaaaaaaaaaaaaaaaaaaaaaaaaaaaaaaaaaaaaaaaaaaaaaaaaaaaaaaaaaaagaauu

SEQ ID NO: 29047 - RNA, 1778 nt, Artificial Sequence
  mRNA product Design b-4 (hSL-A64-N5) comprising derived and/or modified sequence from LASV(LASV237-NIG-2010;Clade II)__AIT17638__GPCmut5 (opt4)
aggagagucccgcagucggcguccagcggcucugcuuguucgugugugugucguugcaggccuuauucaagcuuaccaugggccagaucaucaccuucuuccaggaggugccccacgugaucgaggaggugaugaacaucgugcugaucgcccugagccugcuggccauccugaagggcaucuacaacguggccaccugcggccuguucggccuggugagcuuccugcugcugugcggcagaagcugcagcaccaccuacaagggcguguacgagcugcagacccuggagcuggacauggccagccugaacaugaccaugccccugagcugcaccaagaacaacagccaccacuacaucauggugggcaacgagaccggccuggagcugacccugaccaacaccagcaucaucaaccacaaguucugcaaccugagcgacgcccacaagaaggaccuguacgaccacgcccugaugagcaucaucagcaccuuccaccugagcauccccaacuucaaccaguacgaggccaugagcugcgacuucaacggcggcaagaucagcgugcaguacaaccugagccacaccuacgccguggacgccgccaaccacugcggcaccaucgccaacggcgugcugcagaccuucaugagaauggccuggggcggcagcuacaucgcccuggacagcggcugcggcagcugggacugcaucaugaccagcuaccaguaccugaucauccagaacaccaccugggaggaccacugccaguucagcagacccagccccaucggcuaccugggccugcugagccagagaaccagagacaucuacaucagcagaagacugcugggcaccuucaccuggacccugagcgacagcgagggcaacgagacccccggcggcuacugccugaccagauggaugcugaucgaggccgagcugaagugcuucggcaacaccgccguggccaagugcaacgagaagcacgacgaggaguucugcgacaugcugagacuguucgacuucaacaagcaggccaucagaagacugaagacccccgcccagaugagcauccagcugaucaacaaggccgugaacgcccugaucaacgaccagcugaucaugaagaaccaccugagagacaucaugugcauccccuacugcaacuacagcaaguacugguaccugaaccacaccgugaccggcaagaccagccugcccagaugcuggcuggugagcaacggcagcuaccugaacgagacccacuucagcgacgacaucgagcagcaggccgacaacaugaucaccgagcugcugcagaaggaguacauggacagacagggcaagaccccccugggccugguggaccuguucguguucagcaccagcuucuaccugaucagcaucuuccugcaccugaucaagauccccacccacagacacaucaccggcaagcccugccccaagccccacagacugaaccacaugggcaucugcagcugcggccuguacaagcaccccggcgugcccgugaaguggaagagaugaggacuaguaauaaggaaacuguaugaaugucugugggcaggaagugaagagauccuucuguaaagguuuuuggaauuaugucugcugaauaauaaacuuuuuugaaauaauaaaucugguagaaaaaugagaucucaaaggcucuuuucagagccaccaaaaaaaaaaaaaaaaaaaaaaaaaaaaaaaaaaaaaaaaaaaaaaaaaaaaaaaaaaaaaaaaagaauu

SEQ ID NO: 29048 - RNA, 1778 nt, Artificial Sequence
  mRNA product Design b-4 (hSL-A64-N5) comprising derived and/or modified sequence from LASV(LASV253-NIG-2011;Clade II)__AIT17670__GPCmut5 (opt4)
aggagagucccgcagucggcguccagcggcucugcuuguucgugugugugucguugcaggccuuauucaagcuuaccaugggccagaucaucaccuucuuccaggaggugccccacgugaucgaggaggugaugaacaucgugcugaucgcccugagccugcuggccauccugaagggcaucuacaacguggccaccugcggccuguucggccuggugagcuuccugcugcugugcggcagaagcugcagcaccaccuacaagggcguguacgagcugcagacccuggagcuggacauggccagccugaacaugaccaugccccugagcugcaccaagaacaacagccaccacuacaucauggugggcaacgagaccggccuggagcugacccugaccaacaccagcaucaucaaccacaaguucugcaaccugagcgacgcccacaagaagaaccuguacgaccacgcccugaugagcaucaucagcaccuuccaccugagcauccccaacuucaaccaguacgaggccaugagcugcgacuucaacggcggcaagaucagcgugcaguacaaccugagccacaccuacgccguggacgccgccaaccacugcggcaccaucgccaacggcgugcugcagaccuucaugagaauggccuggggcggcagcuacaucgcccuggacagcggcugcggcagcugggacugcaucaugaccagcuaccaguaccugaucauccagaacaccaccugggaggaccacugccaguucagcagacccagccccaucggcuaccugggccugcugagccagagaaccagagacaucuacaucagcagaagacugcugggcaccuucaccuggacccugagcgacagcgagggcaacgagacccccggcggcuacugccugaccagauggaugcugaucgaggccgagcugaagugcuucggcaacaccgccguggccaagugcaacgagaagcacgacgaggaguucugcgacaugcugagacuguucgacuucaacaagcaggccaucagaagacugaaggcccccgcccagaugagcauccagcugaucaacaaggccgugaacgcccugaucaacgaccagcugaucaugaagaaccaccugagagacaucaugugcauccccuacugcaacuacagcaaguacugguaccugaaccacaccgugaccggcagaaccagccugcccagaugcuggcuggugagcaacggcagcuaccugaacgagacccacuucagcgacgacaucgagcagcaggccgacaacaugaucaccgagcugcugcagaaggaguacaucgacagacagggcaagaccccccugggccugguggaccuguucguguucagcaccagcuucuaccugaucagcaucuuccugcaccuggugaagauccccacccacagacacaucaucggcaagcccugccccaagccccacagacugaaccacaugggcaucugcagcugcggccuguacaagcaccccggcgugcccgugaaguggaagagaugaggacuaguaauaaggaaacuguaugaaugucugugggcaggaagugaagagauccuucuguaaagguuuuuggaauuaugucugcugaauaauaaacuuuuuugaaauaauaaaucugguagaaaaaugagaucucaaaggcucuuuucagagccaccaaaaaaaaaaaaaaaaaaaaaaaaaaaaaaaaaaaaaaaaaaaaaaaaaaaaaaaaaaaaaaaaagaauu

SEQ ID NO: 29049 - RNA, 1778 nt, Artificial Sequence
  mRNA product Design b-4 (hSL-A64-N5) comprising derived and/or modified sequence from LASV(LASV254-NIG-2011;Clade II)__AIT17674__GPCmut5 (opt4)
aggagagucccgcagucggcguccagcggcucugcuuguucgugugugugucguugcaggccuuauucaagcuuaccaugggccagaucaucaccuucuuccaggaggugccccacgugaucgaggaggugaugaacaucgugcugaucgcccugagccugcuggccauccugaagggcaucuacaacguggccaccugcggccuguucggccuggugagcuuccugcugcugugcggcagaagcugcagcaccaccuacaagggcguguacgagcugcagacccuggagcuggacaugaccaaccugaacaugaccaugccccugagcugcaccaagaacaacagccaccacuacaucauggugggcaacgagaccggccuggagcugacccugaccaacaccagcaucaucaaccacaaguucugcaaccugagcgacgcccacaagaagaaccuguacaaccacgcccugaugagcaucaucagcaccuuccaccugagcauccccaacuucaaccaguacgaggccaugagcugcgacuucaacggcggcaagaucagcgugcaguacaaccugagccacagcuacgccguggacgccgccaaccacugcggcaccaucgccaacggcgugcugcagaccuucaugagaauggccuggggcggcagcuacaucgcccuggacagcggcugcggcaacugggacugcaucaugaccagcuaccaguaccugaucauccagaacaccaccugggaggaccacugccaguucagcagacccagccccaucggcuaccugggccugcugagccagagaaccagagacaucuacaucagcagaagacugcugggcaccuucaccuggacccugagcgacagcgagggcaacgagacccccggcggcuacugccugaccagauggaugcugaucgaggccgagcugaagugcuucggcaacaccgccguggccaagugcaacgagaagcacgacgaggaguucugcgacaugcugagacuguucgacuucaacaagcaggccaucagaagacugaagacccccgcccaggccaacauccagcugaucaacaaggccgugaacgcccugaucaacgaccagcugaucaugaagaaccaccugagagacaucaugugcauccccuacugcaacuacagcaaguacugguaccugaaccacaccgugaccggcaagaccagccugcccagaugcuggcuggugagcaacggcagcuaccugaacgagacccacuucagcgacgacaucgagcagcaggccgacaacaugaucaccgagcugcugcagaaggaguacauggacagacagggcaagaccccccugggccugguggaccuguucguguucagcaccagcuucuaccugaucagcaucuuccugcaccuggugaagauccccacccacagacacgugaucggcaagcccugccccaagccccacagacugaaccacaugggcaucugcagcugcggccuguacaagcaccccggcgugcccgugaaguggaagagaugaggacuaguaauaaggaaacuguaugaaugucugugggcaggaagugaagagauccuucuguaaagguuuuuggaauuaugucugcugaauaauaaacuuuuuugaaauaauaaaucugguagaaaaaugagaucucaaaggcucuuuucagagccaccaaaaaaaaaaaaaaaaaaaaaaaaaaaaaaaaaaaaaaaaaaaaaaaaaaaaaaaaaaaaaaaaagaauu

SEQ ID NO: 29050 - RNA, 1778 nt, Artificial Sequence
  mRNA product Design b-4 (hSL-A64-N5) comprising derived and/or modified sequence from LASV(Nig08-A19;Clade III)__ADU56618__GPCmut5 (opt4)
aggagagucccgcagucggcguccagcggcucugcuuguucgugugugugucguugcaggccuuauucaagcuuaccaugggccagaucgugaccuucuuccaggaggugccccacgugaucgaggaggugaugaacaucgugcugaucgcccugagcauccuggccauccugaagggccuguacaacaucgccaccugcggccugaucggccuggugaccuuccugcugcugagcggcagaagcugcagcaugaccuacaagggcguguacgagcugcagacccuggagcugaacaugaacacccugaacaugaccaugccccugagcugcaccaagaacaacagccaccacuacaucauggugggcaacgagaccggccuggagcugacccugaccaacaccagccugcugcaccacaaguucugcaaccugagcgacgcccacaagaagaaccuguacgaccacacccugaugagcaucaucagcaccuuccaccugagcauccccaacuucaaccaguacgaggccaugagcugcgacuucaacggcggcaagaucaccgugcaguacaaccugagccacagcuacgccaucgacgccgccaaccacugcggcaccguggccaacggcgugcugcagaccuucaugagaauggccuggggcggcagcuacaucgcccuggacagcggcugcggcaagugggacugcaucaugaccagcuaccaguaccugaucauccagaacaccaccugggaggaccacugccaguucagcagacccagccccaucggcuaccugggccugcugagccagagaaccagagacaucuacaucagcagaagacugcugggcaccuucaccuggacccugagcgacagcgagggcaacgagacccccggcggcuacugccugaccagauggaugcugaucgaggccgagcugaagugcuucggcaacaccgccguggccaagugcaacgagaagcacgacgaggaguucugcgacaugcugagacuguucgacuucaacaagcaggccaucagaagacugaaggcccccgcccagaugagcauccagcugaucaacaaggccgugaacgcccugaucaacgaccagcugaucaugaagaaccaccugagagacaucaugugcauccccuacugcaacuacagcaaguacugguaccugaaccacaccagcaccggcagaaccagccugcccagaugcuggcuggugagcaacggcagcuaccugaacgagacccacuucagcgacgacaucgagcagcaggccgacaacaugaucaccgagaugcugcagaaggaguaccuggacagacagggcaagaccccccugggccugguggaccuguucguguucagcaccagcuucuaccugaucagcaucuuccugcaccuggugaagauccccacccacagacacaucgugggcaagcccugccccaagccccacagacugaaccacaugggcaucugcagcugcggccuguacaagcagcccggcgugcccgugagauggaagagaugaggacuaguaauaaggaaacuguaugaaugucugugggcaggaagugaagagauccuucuguaaagguuuuuggaauuaugucugcugaauaauaaacuuuuuugaaauaauaaaucugguagaaaaaugagaucucaaaggcucuuuucagagccaccaaaaaaaaaaaaaaaaaaaaaaaaaaaaaaaaaaaaaaaaaaaaaaaaaaaaaaaaaaaaaaaaagaauu

SEQ ID NO: 29051 - RNA, 1781 nt, Artificial Sequence
  mRNA product Design b-4 (hSL-A64-N5) comprising derived and/or modified sequence from LASV(G1180-SLE-2010;Clade IV)__AIT17168__GPCmut5 (opt4)
aggagagucccgcagucggcguccagcggcucugcuuguucgugugugugucguugcaggccuuauucaagcuuaccaugggccagaucgugaccuucuuccaggaggugccccacgugaucgaggaggugaugaacaucgugcugaucgcccugagcauccuggccgugcugaagggccuguacaacuucgccaccugcggccuggugggccugcugaccuuccugcugcugugcggcagaagcugcaccgccagcagauacaagggcguguacgagcugcagacccuggagcugaacauggagacccugaacaugaccaugccccugagcugcaccaagaacaacagccaccacuacaucauggugggcaacgagaccggccuggagcugacccugaccaacaccagcaucaucaaccacaaguucugcaaccugagcgacgcccacaagaagaaccuguacgaccacgcccugaugagcaucaucagcaccuuccaccugagcauccccaacuucaaccaguacgaggccaugagcugcgacuucaacggcggcaagaucagcgugcaguacaaccugagccacagcuacgccggcgacgccgccaaccacugcggcaccguggccaacggcgugcugcagaccuucaugagaauggccuggggcggcagcuacaucgcccuggacagcggcugcggcagcugggacugcaucaugaccagcuaccaguaccugaucauccagaacaccaccugggaggaccacugccaguucagcagacccagccccaucggcuaccugggccugcugagccagagaaccagagacaucuacaucagcagaagacugcugggcaccuucaccuggacccugagcgacagcgagggcaaggacacccccggcggcuacugccugaccagauggaugcugaucgaggccgagcugaagugcuucggcaacaccgccguggccaagugcaacgagaagcacgacgaggaguucugcgacaugcugagacuguucgacuucaacaagcaggccauccagagacugaaggcccccgcccagaugagcauccagcugaucaacaaggccgugaacgcccugaucaacgaccagcugaucaugaagaaccaccugagagacaucaugugcauccccuacugcaacuacagcaaguacugguaccugaaccacaccaccaccggcaagaccagccugcccaagugcuggcuggugagcaacggcagcuaccugaacgagacccacuucagcgacgacaucgagcagcaggccgacaacaugaucaccgagaugcugcagaaggaguacauggagagacagggcaagaccccccugggccugguggaccuguucguguucagcaccagcuucuaccugaucagcaucuuccugcaccuggugaagauccccacccacagacacaucgugggcaagagcugccccaagccccacagacugaaccacaugggcaucugcagcugcggccuguacaagcagcccggcgugcccgugaaguggaagagaugaggacuaguaauaaggaaacuguaugaaugucugugggcaggaagugaagagauccuucuguaaagguuuuuggaauuaugucugcugaauaauaaacuuuuuugaaauaauaaaucugguagaaaaaugagaucucaaaggcucuuuucagagccaccaaaaaaaaaaaaaaaaaaaaaaaaaaaaaaaaaaaaaaaaaaaaaaaaaaaaaaaaaaaaaaaaagaauu

SEQ ID NO: 29052 - RNA, 1781 nt, Artificial Sequence
  mRNA product Design b-4 (hSL-A64-N5) comprising derived and/or modified sequence from LASV(G1442-SLE-2011;Clade IV)__AIT17180__GPCmut5 (opt4)
aggagagucccgcagucggcguccagcggcucugcuuguucgugugugugucguugcaggccuuauucaagcuuaccaugggccagaucgugaccuucuuccaggaggugccccacgugaucgaggaggugaugaacaucgugcugaucgcccugagcauccuggccgugcugaagggccuguacaacguggccaccugcggccugaucggccuggugaccuuccugcugcugugcggcagaagcugcaccaccacccuguacaagggcguguacgagcugcagacccuggagcugaacauggagacccugaacaugaccaugccccugagcugcaccaagaacaacagccaccacuacaucagagugggcaacgagaccggccuggagcugacccugaccaacaccagcaucaucaaccacaaguucugcaaccugagcgacgcccacaagaagaaccuguacgaccacgcccugaugagcaucaucagcaccuuccaccugagcauccccaacuucaaccaguacgaggccaugagcugcgacuucaacggcggcaagaucagcgugcaguacaaccugagccacagcuacgccggcgacgccgccaaccacugcggcaccguggccaacggcgugcugcagaccuucaugagaauggccuggggcggcagcuacaucgcccuggacagcggcugcggcaacugggacugcaucaugaccagcuaccaguaccugaucauccagaacaccaccugggacgaccacugccaguucagcagacccagccccaucggcuaccugggccugcugagccagagaaccagagacguguacaucagcagaagacugcugggcaccuucaccuggacccugagcgacagcgagggcaaggacacccccggcggcuacugccugaccagauggaugcugaucgaggccgagcugaagugcuucggcaacaccgccguggccaagugcaacgagaagcacgacgaggaguucugcgacaugcugagacuguucgacuucaacaagcaggccauccagagacugaaggcccccgcccagaugagcauccagcugaucaacaaggccgugaacgcccugaucaacgaccagcugaucaugaagaaccaccugagagacaucaugugcauccccuacugcaacuacagcaaguacugguaccugaacaacaccgccaccggcaagaccagccugcccaagugcuggcugaucagcaacggcagcuaccugaacgagacccacuucagcgacgacaucgagcaggaggccgacaacaugaucaccgagaugcugcagaaggaguacauggagagacagggcaagaccccccugggccugguggaccuguucguguucagcaccagcuucuaccugaucagcaucuuccugcaccuggugaagauccccacccacagacacaucgugggcaagagcugccccaagccccacagacugaaccacaugggcaucugcagcugcggccuguacaagcagcccggcgugcccgugagauggaagagaugaggacuaguaauaaggaaacuguaugaaugucugugggcaggaagugaagagauccuucuguaaagguuuuuggaauuaugucugcugaauaauaaacuuuuuugaaauaauaaaucugguagaaaaaugagaucucaaaggcucuuuucagagccaccaaaaaaaaaaaaaaaaaaaaaaaaaaaaaaaaaaaaaaaaaaaaaaaaaaaaaaaaaaaaaaaaagaauu

SEQ ID NO: 29053 - RNA, 1781 nt, Artificial Sequence
  mRNA product Design b-4 (hSL-A64-N5) comprising derived and/or modified sequence from LASV(G3010-SLE-2013;Clade IV)__AIT17344__GPCmut5 (opt4)
aggagagucccgcagucggcguccagcggcucugcuuguucgugugugugucguugcaggccuuauucaagcuuaccaugggccagaucgugaccuucuuccaggaggugccccacgugaucgaggaggugaugaacaucgugcugaucgcccugagcauccuggccgugcugaagggccuguacaacuucgccaccugcggccuggugggccuggugaccuuccugcugcugugcggcagaagcugcaccaccagccuguacaagggcguguacgagcugcagacccuggagcugaacauggagacccugaacaugaccaugccccugagcugcaccaagaacaacagccaccacuacaucauggugggcaacgagaccggccuggagcugacccugaccaacaccagcaucaucaaccacaaguucugcaaccugagcgacgcccacaagaagaaccuguacaaccacgcccugaugagcaucaucagcaccuuccaccugagcauccccaacuucaaccaguacgaggccaugagcugcgacuucaacggcggcaagaucagcgugcaguacaaccugagccacagcuacgccggcgacgccgccagccacugcggcaccguggccaacggcgugcugcagaccuucaugagaauggccuggggcggcagcuacaucgcccuggacagcggcugcggcaagugggacugcaucaugaccagcuaccaguaccugaucauccagaacaccaccugggaggaccacugccaguucagcagacccagccccaucggcuaccugggccugcugagccagagaaccagagacaucuacaucagcagaagacugcugggcaccuucaccuggacccugagcgacagcgagggcaaggacacccccggcggcuacugccugaccagauggaugcugaucgaggccgagcugaagugcuucggcaacaccgccguggccaagugcaacgagaagcacgacgaggaguucugcgacaugcugagacuguucgacuucaacaagcaggccauccagagacugaagacccccgcccagaugagcauccagcugaucaacaaggccgugaacgcccugaucaacgaccagcugaucaugaagaaccaccugagagacaucaugugcauccccuacugcaacuacagcaaguacugguaccugaaccacaccaccaccggcaagaccagccugcccaagugcuggcuggugagcaacggcagcuaccugaacgagacccacuucagcgacgacaucgagcagcaggccgacaacaugaucaccgagaugcugcagaaggaguacauggagagacagggcaagaccccccugggccugguggaccuguucguguucagcaccagcuucuaccugaucagcaucuuccugcaccuggugaagauccccacccacagacacaucgugggcaagagcugccccaagccccacagacugaaccacaugggcaucugcagcugcggccuguacaagcagcccggcgugcccgugagauggaagagaugaggacuaguaauaaggaaacuguaugaaugucugugggcaggaagugaagagauccuucuguaaagguuuuuggaauuaugucugcugaauaauaaacuuuuuugaaauaauaaaucugguagaaaaaugagaucucaaaggcucuuuucagagccaccaaaaaaaaaaaaaaaaaaaaaaaaaaaaaaaaaaaaaaaaaaaaaaaaaaaaaaaaaaaaaaaaagaauu

SEQ ID NO: 29054 - RNA, 1781 nt, Artificial Sequence
  mRNA product Design b-4 (hSL-A64-N5) comprising derived and/or modified sequence from LASV(G502-SLE-2009;Clade IV)__AIT17126__GPCmut5 (opt4)
aggagagucccgcagucggcguccagcggcucugcuuguucgugugugugucguugcaggccuuauucaagcuuaccaugggccagaucgugaccuucuuccaggaggugccccacgugaucgaggaggugaugaacaucgugcugaucgcccugagcauccuggccgugcugaagggccuguacaacuucgccaccugcggccuggugggccugcugaccuuccugcugcugugcggcagaagcugcaccaccggccuguacaagggcguguacgagcugcagacccuggagcugaacauggagacccugaacaugaccaugccccugagcugcaccaagaacaacagccaccacuacaucauggugggcaacgagaccggccuggagcugacccugaccaacaccagcaucaucaaccacaaguucugcaaccugagcgacgcccacaagaagaaccuguacgaccacgcccugaugagcaucaucagcaccuuccaccugagcauccccaacuucaaccaguacgaggccaugagcugcgacuucaacggcggcaagaucagcgugcaguacaaccugagccacagcuacgccggcgacgccgccgaccacugcggcaccguggccaacggcgugcugcagaccuucaugagaauggccuggggcggcagcuacaucgcccuggacagcggcugcggcagaugggacugcaucaugaccagcuaccaguaccugaucauccagaacaccaccugggaggaccacugccaguucagcagacccagccccaucggcuaccugggccugcugagccagagaaccagagacaucuacaucagcagaagacugcugggcaccuucaccuggacccugagcgacagcgagggcaaggacacccccggcggcuacugccugaccagauggaugcugaucgaggccgagcugaagugcuucggcaacaccgccguggccaagugcaacgagaagcacgacgaggaguucugcgacaugcugagacuguucgacuucaacaagcaggccauccagagacugaaggcccccgcccagaugagcauccagcugaucaacaaggccgugaacgcccugaucaacgaccagcuggugaugaagaaccaccugagagacaucaugugcauccccuacugcaacuacagcagauacugguaccugaaccacaccaccaccggcagaaccagccugcccaagugcuggcuggugagcaacggcagcuaccugaacgagacccacuucagcgacgacaucgagcagcaggccgacaacaugaucaccgagaugcugcagaaggaguacauggagagacagggcaagaccccccugggccugguggaccuguucguguucagcaccagcuucuaccugaucagcaucuuccugcaccuggugaagauccccacccacagacacaucgugggcaagagcugccccaagccccacagacugaaccacaugggcaucugcagcugcggccuguacaagcagcccggcgugcccgugaaguggaagagaugaggacuaguaauaaggaaacuguaugaaugucugugggcaggaagugaagagauccuucuguaaagguuuuuggaauuaugucugcugaauaauaaacuuuuuugaaauaauaaaucugguagaaaaaugagaucucaaaggcucuuuucagagccaccaaaaaaaaaaaaaaaaaaaaaaaaaaaaaaaaaaaaaaaaaaaaaaaaaaaaaaaaaaaaaaaaagaauu

SEQ ID NO: 29055 - RNA, 1781 nt, Artificial Sequence
  mRNA product Design b-4 (hSL-A64-N5) comprising derived and/or modified sequence from LASV(G733-SLE-2010;Clade IV)__AIT17154__GPCmut5 (opt4)
aggagagucccgcagucggcguccagcggcucugcuuguucgugugugugucguugcaggccuuauucaagcuuaccaugggccagaucgugaccuucuuccaggaggugccccacgugaucgaggaggugaugaacaucgugcugaucgcccugagcauccuggccgugcugaagggccuguacaacuucgccaccugcggcaucgugggccuggugagcuuccugcugcugugcggcagaagcugcaccaccagccuguacaagggcguguacgagcugcagacccuggagcugaacauggagacccugaacaugaccaugccccugagcugcaccaagaacaacagccaccacuacaucauggugggcaacgagaccggccuggagcugacccugaccaacaccagcaucaucaaccacaaguucugcaaccugagcgacgcccacaagaagaaccuguacgaccacgcccugaugagcaucaucagcaccuuccaccugagcauccccaacuucaaccaguacgaggccaugagcugcgacuucaacggcggcaagaucagcgugcaguacaaccugagccacagcuacgccggcgacgccgccaaccacugcggcaccaucgccaacggcgugcugcagaccuucaugagaauggccuggggcggcagcuacaucgcccuggacagcggcugcgacagaugggacugcaucaugaccagcuaccaguaccugaucauccagaacaccaccugggaggaccacugccaguucagcagacccagccccaucggcuaccugggccugcugagccagagaaccagagacaucuacaucagcagaagacugcugggcaccuucaccuggacccugagcgacagcgagggcaaggacacccccggcggcuacugccugaccagauggaugcugaucgaggccgagcugaagugcuucggcaacaccgccguggccaagugcaacgagaagcacgacgaggaguucugcgacaugcugagacuguucgacuucaacaagcaggccauccagagacugaaggcccccgcccagaugagcauccagcugaucaacaaggccgugaacgcccugaucaacgaccagcugaucaugaagaaccaccugagagacaucaugugcauccccuacugcaacuacagcaaguacugguaccugaaccacaccaccaccggcaagaccagccugcccaagugcuggcuggugagcaacggcagcuaccugaacgagacccacuucagcgacgacaucgagcagcaggccgacaacaugaucaccgagaugcugcagaaggaguacauggagagacagggcaagaccccccugggccugguggaccuguucguguucagcaccagcuucuaccugaucagcaucuuccugcaccuggugaagauccccacccacagacacguggugggcaagagcugccccaagccccacagacugaaccacaugggcaucugcagcugcggccuguacggccagcccggcgugcccgugaaguggaagagaugaggacuaguaauaaggaaacuguaugaaugucugugggcaggaagugaagagauccuucuguaaagguuuuuggaauuaugucugcugaauaauaaacuuuuuugaaauaauaaaucugguagaaaaaugagaucucaaaggcucuuuucagagccaccaaaaaaaaaaaaaaaaaaaaaaaaaaaaaaaaaaaaaaaaaaaaaaaaaaaaaaaaaaaaaaaaagaauu

SEQ ID NO: 29056 - RNA, 1781 nt, Artificial Sequence
  mRNA product Design b-4 (hSL-A64-N5) comprising derived and/or modified sequence from MOPV/LASV reassortant(IGS-1;Clade IV)__AFY05576__GPCmut5 (opt4)
aggagagucccgcagucggcguccagcggcucugcuuguucgugugugugucguugcaggccuuauucaagcuuaccaugggccagaucgugaccuucuuccaggaggugccccacgugaucgaggaggugaugaacaucgugcugaucgcccugagcgugcuggccgugcugaagggccuguacaacuucgccaccugcggccuggugggccuggugaccuuccugcugcugugcggcagaagcugcaccaccagccuguacaagggcguguacgagcugcagacccuggagcugaacauggagacccugaacaugaccaugccccugagcugcaccaagaacaacagccaccacuacaucauggugggcaacgagaccggccuggagcugacccugaccaacaccagcaucaucaaccacaaguucugcaaccugagcgacgcccacaagaagaaccuguacgaccacgcccugaugagcaucaucagcaccuuccaccugagcauccccaacuucaaccaguacgaggccaugagcugcgacuucaacggcggcaagaucagcgugcaguacaaccugagccacagcuacgccggcgacgccgccaaccacugcggcaccguggccaacggcgugcugcagaccuucaugagaauggccuggggcggcagcuacaucgcccuggacagcggcugcggcaacugggacugcaucaugaccagcuaccaguaccugaucauccagaacaccaccugggaggaccacugccaguucagcagacccagccccaucggcuaccugggccugcugagccagagaaccagagacaucuacaucagcagaagacugcugggcaccuucaccuggacccugagcgacagcgagggcgaggacacccccggcggcuacugccugaccagauggaugcugaucgaggccgagcugaagugcuucggcaacaccgccguggccaagugcaacgagaagcacgacgaggaguucugcgacaugcugagacuguucgacuucaacaagcaggccauccagagacugaaggcccccgcccagaugagcauccagcugaucaacaaggccgugaacgcccugaucaacgaccagcugaucaugaagaaccaccugagagacaucaugugcauccccuacugcaacuacagcaaguacugguaccugaaccacaccaccaccggcagaaccagccugcccaagugcuggcuggugagcaacggcagcuaccugaacgagacccacuucagcgacgacaucgagcagcaggccgacaacaugaucaccgagaugcugcagaaggaguacauggagagacagggcaagaccccccugggccugguggaccuguucguguucagcaccagcuucuaccugaucagcaucuuccugcaccuggugaagauccccacccacagacacaucgugggcaagagcugccccaagccccacagacugaaccacaugggcaucugcagcugcggccuguacaagcagcccggcgugcccgugaaguggaagagaugaggacuaguaauaaggaaacuguaugaaugucugugggcaggaagugaagagauccuucuguaaagguuuuuggaauuaugucugcugaauaauaaacuuuuuugaaauaauaaaucugguagaaaaaugagaucucaaaggcucuuuucagagccaccaaaaaaaaaaaaaaaaaaaaaaaaaaaaaaaaaaaaaaaaaaaaaaaaaaaaaaaaaaaaaaaaagaauu

SEQ ID NO: 29057 - RNA, 1781 nt, Artificial Sequence
  mRNA product Design b-4 (hSL-A64-N5) comprising derived and/or modified sequence from LASV(LM765-SLE-2012;Clade IV)__AIT17814__GPCmut5 (opt4)
aggagagucccgcagucggcguccagcggcucugcuuguucgugugugugucguugcaggccuuauucaagcuuaccaugggccagaucgugaccuucuuccaggaggugccccacgugaucgaggaggugaugaacaucgugcugaucgcccugagcauccuggccgugcugaagggccuguacaacuucgccaccugcggccuggugggccuggugaccuuccugcugcugugcggcagaagcugcaccaccagccuguacaagggcguguacgagcugcagacccuggagcugaacauggagacccugaacaugaccaugccccugagcugcaccaagaacaacagccaccacuacaucauggugggcaacgagaccggccuggagcugacccugaccaacaccagcaucaucgaccacaaguucugcaaccugagcgacgcccacagaaagaaccuguacgaccacgcccugaugagcaucaucagcaccuuccaccugagcauccccaacuucaaccaguacgaggccaugagcugcgacuucaacggcggcaagaucagcgugcaguacaaccugagccacagcuacgccaaggacgccgccgaccacugcggcaccguggccaacggcgugcugcagaccuucaugagaauggccuggggcggcagcuacaucgcccuggacagcggcugcggcagaugggacugcaucaugaccagcuaccaguaccugaucauccagaacaccaccugggaggaccacugccaguucagcagacccagccccaucggcuaccugggccugcugagccagagaaccagagacaucuacaucagcagaagacugcugggcaccuucaccuggacccugagcgacagcgagggcaaggacacccccggcggcuacugccugaccagauggaugcugaucgaggccgagcugaagugcuucggcaacaccgccguggccaagugcaacgagaagcacgacgaggaguucugcgacaugcugagacuguucgacuucaacaagcaggccauccagagacugaaggcccccgcccagaugagcauccagcugaucaacaaggccgugaacgcccugaucaacgaccagcugaucaugaagaaccaccugagagacaucaugugcauccccuacugcaacuacagcaaguacugguaccugaaccacaccaccaccggcaagaccagccugcccaagugcuggcuggugagcaacggcagcuaccugaacgagacccacuucagcgacgacaucgagcagcaggccgacaacaugaucaccgagaugcugcagaaggaguacauggagagacagggcaagaccccccugggccugguggaccuguucguguucagcaccagcuucuaccugaucagcaucuuccugcaccuggugaagauccccacccacagacacaucgugggcaagcccugccccaagccccacagacugaaccacaugggcaucugcagcugcggccuguacaagcagcccggcgugcccgugaaguggaagagaugaggacuaguaauaaggaaacuguaugaaugucugugggcaggaagugaagagauccuucuguaaagguuuuuggaauuaugucugcugaauaauaaacuuuuuugaaauaauaaaucugguagaaaaaugagaucucaaaggcucuuuucagagccaccaaaaaaaaaaaaaaaaaaaaaaaaaaaaaaaaaaaaaaaaaaaaaaaaaaaaaaaaaaaaaaaaagaauu

SEQ ID NO: 29058 - RNA, 1781 nt, Artificial Sequence
  mRNA product Design b-4 (hSL-A64-N5) comprising derived and/or modified sequence from LASV(LM776-SLE-2012;Clade IV)__AIT17824__GPCmut5 (opt4)
aggagagucccgcagucggcguccagcggcucugcuuguucgugugugugucguugcaggccuuauucaagcuuaccaugggccagaucgugaccuucuuccaggaggugccccacgugaucgaggaggugaugaacaucgugcugaucgcccugagcauccuggccgugcugaagggccuguacaacuucgccaccugcggccuggugggccuggugaccuuccugcugcugugcggcagaagcugcaccaccagcguguacaagggcguguacgagcugcagacccuggagcugaacauggagacccugaacaugaccaugccccugagcugcaccaagaacaacagccaccacuacaucauggugggcaacgagaccggccuggagcugacccugaccaacaccagcaucaucaaccacaaguucugcaaccugagcgacgcccacaagaagaaccuguacgaccacgcccugaugagcaucaucagcaccuuccaccugagcauccccaacuucaaccaguacgaggccaugagcugcgacuucaacggcggcaagaucagcgugcaguacaaccugagccacagcuacgccggcgacgccgccaaccacugcggcaccguggccaacggcgugcugcagaccuucaugagaauggccuggggcggcagcuacaucgcccuggacagcggcugcggcaagugggacugcaucaugaccagcuaccaguaccugaucauccagaacaccaccugggaggaccacugccaguucagcagacccagccccaucggcuaccugggccugcugagccagagaaccagagacaucuacaucagcagaagacugcugggcaccuucaccuggacccugagcgacagcgagggcaaggacacccccggcggcuacugccugaccagauggaugcugaucgaggccgagcugaagugcuucggcaacaccgccguggccaagugcaacgagaagcacgacgaggaguucugcgacaugcugagacuguucgacuucaacaagcaggccauccagagacugaaggcccccgcccagaugagcauccagcugaucaacaaggccgugaacgcccugaucaacgaccagcugaucaugaagaaccaccugagagacaucaugugcauccccuacugcaacuacagcaaguacugguaccugaaccacaccaccaccggcaagaccagccugcccaagugcuggcuggugagcaacggcagcuaccugaacgagacccacuucagcgacgacaucgagcagcaggccgacaacaugaucaccgagaugcugcagaaggaguacauggagagacagggcaagaccccccugggccugguggaccuguucguguucagcaccagcuucuaccugaucagcaucuuccugcaccuggugaagauccccacccacagacacaucgugggcaagagcugccccaagccccacagacugaaccacaugggcaucugcagcugcggccuguacaagcagcccggcgugcccgugagauggaagagaugaggacuaguaauaaggaaacuguaugaaugucugugggcaggaagugaagagauccuucuguaaagguuuuuggaauuaugucugcugaauaauaaacuuuuuugaaauaauaaaucugguagaaaaaugagaucucaaaggcucuuuucagagccaccaaaaaaaaaaaaaaaaaaaaaaaaaaaaaaaaaaaaaaaaaaaaaaaaaaaaaaaaaaaaaaaaagaauu

SEQ ID NO: 29059 - RNA, 1781 nt, Artificial Sequence
  mRNA product Design b-4 (hSL-A64-N5) comprising derived and/or modified sequence from LASV(Mad39;Clade IV)__ANH09722__GPCmut5 (opt4)
aggagagucccgcagucggcguccagcggcucugcuuguucgugugugugucguugcaggccuuauucaagcuuaccaugggccagaucgugaccuucuuccaggaggugccccacgugaucgaggaggugaugaacaucgugcugaucgcccugagcauccuggccgugcugaagggccuguacaacguggccaccugcggccugaucggccuggugaccuuccugcugcugugcggcagaagcugcaccaccacccuguacaagggcguguacgagcugcaggcccuggagcugaacauggagacccugaacaugaccaugccccugagcugcaccaagaacaacagccaccacuacaucagagugggcaacgagaccggccuggagcugacccugaccaacaccagccugaucaaccacaaguucugcaaccugagcgacgcccacaagaagaaccuguacgaccacgcccugaugagcaucaucagcaccuuccaccugagcauccccaacuucaaccaguacgaggccaugagcugcgacuucaacgacggcaagaucagcgugcaguacaaccugagccacaccuacgccggcgacaccgccaaccacugcggcaccguggccaacggcgugcugcagaccuucaugagaauggccuggggcggcagcuacaucgcccuggacagcggcugcggcggcugggacugcaucaugaccagcuaccaguaccugaucauccagaacaccaccugggaggaccacugccaguucagcagacccagccccaucggcuaccugggccugcugagccagagaaccagagacaucuacaucagcagaagacugcugggcaccuucaccuggacccugagcgacagcgagggcaaggacacccccggcggcuacugccugaccagauggaugcugaucgaggccgagcugaagugcuucggcaacaccgccguggccaagugcaacgagaagcacgacgaggaguucugcgacaugcugagacuguucgacuucaacaagcaggccauccagagacugaaggcccccgcccagaugagcauccagcugaucaacaaggccgugaacgcccugaucaacgaccagcugaucaugaagaaccaccugagagacaucaugugcauccccuacugcaacuacagcaaguacugguaccugaaccacaccgugaccggcaagaccagccugcccaagugcuggcuggugagcaacggcagcuaccugaacgagacccacuucagcgacgacaucgagcagcaggccgacaacaugaucaccgagaugcugcagaaggaguacauggagagacagggcaagaccccccugggccugguggaccuguucguguucagcaccagcuucuaccugaucagcaucuuccugcaccuggugaagauccccacccacagacacguggugggcaagcccugccccaagccccacagacugaaccacaugggcaucugcagcugcggcuucuacaagcagcccggcgugcccgugagauggaagagaugaggacuaguaauaaggaaacuguaugaaugucugugggcaggaagugaagagauccuucuguaaagguuuuuggaauuaugucugcugaauaauaaacuuuuuugaaauaauaaaucugguagaaaaaugagaucucaaaggcucuuuucagagccaccaaaaaaaaaaaaaaaaaaaaaaaaaaaaaaaaaaaaaaaaaaaaaaaaaaaaaaaaaaaaaaaaagaauu

SEQ ID NO: 29060 - RNA, 1781 nt, Artificial Sequence
  mRNA product Design b-4 (hSL-A64-N5) comprising derived and/or modified sequence from LASV(Z0947-SLE-2011;Clade IV)__AIT17840__GPCmut5 (opt4)
aggagagucccgcagucggcguccagcggcucugcuuguucgugugugugucguugcaggccuuauucaagcuuaccaugggccagaucgugaccuucuuccaggaggugccccacgugaucgaggaggugaugaacaucgugcugaucgcccugagcauccuggccgugcugaagggccuguacaacuucgccaccugcggccuggugggccuggugaccuuccugcugcugugcggcagaagcugcaccaucagccuguacaagggcguguacgagcugcagacccuggagcugaacauggagacccugaacaugaccaugccccugagcugcaccaagaacaacagccaccacuacaucauggugggcaacgagaccggccuggagcugacccugaccaacaccagcaucaucaaccacaaguucugcaaccugagcgacgcccacaagaagaaccuguacgaccacgcccugaugagcaucaucagcaccuuccaccugagcauccccaacuucaaccaguacgaggccaugagcugcgacuucaacggcggcaagaucagcgugcaguacaaccugagccacagcuacgccggcgacgccgccaaccacugcggcaccguggccaacggcgugcugcagaccuucaugagaauggccuggggcggcagcuacaucgcccuggacagcggcugcgacagaugggacugcaucaugaccagcuaccaguaccugaucauccagaacaccaccugggaggaccacugccaguucagcagacccagccccaucggcuaccugggccugcugagccagagaaccagagacaucuacaucagcagaagacugcugggcaccuucaccuggacccugagcgacagcgagggcaaggacacccccggcggcuacugccugaccagauggaugcugaucgaggccgagcugaagugcuucggcaacaccgccguggccaagugcaacgagaagcacgacgaggaguucugcgacaugcugagacuguucgacuucaacaagcaggccauccagagacugaaggcccccgcccagaugagcauccagcugaucaacaaggccgugaacgcccugaucaacgaccagcugaucaugaagaaccaccugagagacaucaugugcauccccuacugcaacuacagcaaguacugguaccugaaccacaccaccaccggcaagaccagccugcccaagugcuggcuggugagcaacggcagcuaccugaacgagacccacuucagcgacgacaucgagcagcaggccgacaacaugaucaccgagaugcugcagaaggaguacauggagagacagggcaagaccccccugggccugguggaccuguucguguucagcaccagcuucuaccugaucagcaucuuccugcaccuggugaagauccccacccacagacacaucgugggcaagcccugccccaagccccacagacugaaccacaugggcaucugcagcugcggccuguacaagcagcccggcgugcccgugaaguggaagagaugaggacuaguaauaaggaaacuguaugaaugucugugggcaggaagugaagagauccuucuguaaagguuuuuggaauuaugucugcugaauaauaaacuuuuuugaaauaauaaaucugguagaaaaaugagaucucaaaggcucuuuucagagccaccaaaaaaaaaaaaaaaaaaaaaaaaaaaaaaaaaaaaaaaaaaaaaaaaaaaaaaaaaaaaaaaaagaauu

SEQ ID NO: 29061 - RNA, 1781 nt, Artificial Sequence
  mRNA product Design b-4 (hSL-A64-N5) comprising derived and/or modified sequence from LASV(Josiah;Clade IV)__NP_694870__GPCmut5 (opt5)
aggagagucccgcagucggcguccagcggcucugcuuguucgugugugugucguugcaggccuuauucaagcuuaccaugggccagaucgugaccuucuuucaagaggucccccacguuauugaagaggugaugaacaucgugcugauugcccucagcguccuggcugugcuuaaggggcuguacaauuucgccacaugcggacucguuggccuggugacguuucuucugcucugugggagauccugcaccacaucucuguauaaaggagucuacgaacugcagacccucgagcugaacauggaaacacuuaauaugaccaugccucugagcuguacaaagaacaauucccaucacuauaucauggugggcaacgagaccgggcucgagcugacgcuuaccaauacaucuauuaucaaccauaaauucugcaaucugagcgacgcgcacaagaaaaaccucuacgaucaugcucugauguccaucauuucuaccuuucaccugagcaucccgaauuucaaccaguaugaagccauguccugugacuuuaauggaggcaagauuagcguucaguacaaccucucucacuccuaugccggcgaugcugccaaucauugcgggacaguggcuaacggaguccugcaaaccuucaugcggauggccuggggcgggagcuacaucgcgcuugacucuggauguggcaacugggauugcauuaugacguccuaccaguaucugaucauucagaauacaaccugggaggaccacugucaguuuagccgccccucuccuaucggguaccucggacugcuuucccaaagaacacgggauaucuauauuagccgcagacugcucggcaccuucaccuggacacuguccgacucugaaggcaaggauacgcccgggggauacugccugacccgguggaugcucaucgaggccgagcugaaauguuuuggcaacacagcuguggccaagugcaaugaaaaacaugacgaggaguucugcgauaugcuucgccuguuugacuucaacaagcaggcuauucagagacucaaagccccugcgcagaugagcauccaacugauuaauaaggccgugaacgcucuuaucaaugaucagcugaucaugaagaaccaccuccgggacauuauguguauccccuauugcaauuacuccaaauauugguaccugaaccacaccacaaccgggcgcacgagccugccuaaguguuggcucgucucuaauggauccuaccugaacgaaacacauuucagcgacgauauugaacagcaagccgacaauaugaucaccgagaugcuucagaaagaguauauggaaagacagggcaagaccccgcuggggcucguugaucuguuuguguucucuaccagcuuuuaccugauuuccaucuuccuucaccucgugaaaauccccacacaucggcacauugucggaaagucuugcccuaaaccccaucgccugaaccacaugggcaucuguagcugcggccuguauaagcagccuggggugcccguuaaguggaaaagaugaggacuaguaauaaggaaacuguaugaaugucugugggcaggaagugaagagauccuucuguaaagguuuuuggaauuaugucugcugaauaauaaacuuuuuugaaauaauaaaucugguagaaaaaugagaucucaaaggcucuuuucagagccaccaaaaaaaaaaaaaaaaaaaaaaaaaaaaaaaaaaaaaaaaaaaaaaaaaaaaaaaaaaaaaaaaagaauu

SEQ ID NO: 29062 - RNA, 1778 nt, Artificial Sequence
  mRNA product Design b-4 (hSL-A64-N5) comprising derived and/or modified sequence from LASV(LP;Clade I)__AAF86701__GPCmut5 (opt5)
aggagagucccgcagucggcguccagcggcucugcuuguucgugugugugucguugcaggccuuauucaagcuuaccaugggccagaucauuaccuucuuucaagaggugccccacgucaucgaagagguuaugaacauugugcugaucgcccucagccugcuugcuauucugaaggggcucuacaauaucgccacaugcggaaucauuggccugguggcguuccuuuuucugugugggaaauccugcucucucacgcugaagggaggcuaugaacugcagacccucgagcugaacauggaaacacuuaauaugaccaugccucugagcuguaccaaaaacuccucucaucacuacaucagagucgggaaugagacaggacucgagcugacacuuaccaacacgagcauuaucaaucauaaguucugcaaccuguccgacgcucacaaaaagaaucucuaugaucaugcccugaugucuauuaucagcaccuuucaccuguccauuccgaacuucaaucaguacgaagccaugagcugugacuuuaacggcggcaagaucucugugcaguauaaucucucccacagcuacgcuggggaugccgcugagcauugcggaacaguugccaacggcgugcugcaaaccuucaugcggauggcguggggagggcgcuauaucgcccuugacucuggcugugggaauugggauugcauuaugacauccuaccaguaccugaucauucagaacaccacgugggaagaccacugucaguuuagcagacccucuccuaucggauaucucggccugcuuucccaacggacacgcgauauuuacaucagcagacggcugcucggcaccuucacauggacccuguccgacucugaggggaacgagacccccggaggcuauugccugacacgcuggaugcucaucgaagcugagcugaaauguuuugggaauacggccgucgcuaagugcaacgaaaaacaugaugaggaguucugcgacaugcuuagacuguuugauuucaauaagcaggccauucggcgccucaaagcgccugcccagaugagcauccagcugauuaacaaggcugugaaugcccuuaucaacgaccaacugauuaugaagaaucaccucagagauaucauguguauccccuacugcaacuauuccaaauacugguaucugaaucacaccagcucuggacggacaucccugccuaaguguuggcucauuagcaacggcucuuaccugaaugaaacccaguucagcgacgacaucgagcagcaagcugauaacaugauuacagaaaugcuucagaaagaguacaucgaacgccaggggaagaccccgcugggacucguugacauuuuuaucuucuccacgucuuuuuaucugauuagcaucuuccugcaucuuaucaaaauucccacacacagacauaucgugggcaagccuugccccaaaccucaccggcucaaucauaugggcgucuguuccugcgggcuguacaagcaccccggagugccgaccaaguggaaacgcugaggacuaguaauaaggaaacuguaugaaugucugugggcaggaagugaagagauccuucuguaaagguuuuuggaauuaugucugcugaauaauaaacuuuuuugaaauaauaaaucugguagaaaaaugagaucucaaaggcucuuuucagagccaccaaaaaaaaaaaaaaaaaaaaaaaaaaaaaaaaaaaaaaaaaaaaaaaaaaaaaaaaaaaaaaaaagaauu

SEQ ID NO: 29063 - RNA, 1778 nt, Artificial Sequence
  mRNA product Design b-4 (hSL-A64-N5) comprising derived and/or modified sequence from LASV(803213;Clade II)__AAF86703__GPCmut5 (opt5)
aggagagucccgcagucggcguccagcggcucugcuuguucgugugugugucguugcaggccuuauucaagcuuaccaugggccagaucauuaccuucuuucaagaggugccccacgucaucgaagagguuaugaacauugugcugaucgcccucagccugcuugcuauucugaaggggaucuacaauguggccacaugcggacucuucggccugaucuccuuucuucugcucugugggagaucuugcagcgucacguauaaaggaguguacgaacugcagacccuggagcucaacauggcgaaucugaacaugacaaugccucuuuccuguaccaagaauaacucucaucacuauauuaugguuggcaaugaaacagggcuggagcucacccugacaaacaccagcaucauuaaucauaaauucugcaaccuuuccgacgcucacaagaaaaaucuguacgaucaugcccucaugucuaucauuagcacguuucaccuguccaucccgaacuucaaucaguaugaggccaugagcugugacuuuaacggaggcaagauuucugugcaguacaaucugucccacagcuucgcugucgaugccgcuaaccauugcggcaccaucgccaacggggugcuccaaacauuuaugcggauggcguggggaggcucuuauaucgcccuggacuccggguguggaaauugggauugcauuaugaccagcuaccaguaccuuaucauucagaacacaaccugggaagaccacugucaguucucucgccccuccccuaucggcuaucuggggcuccugagccaaagaacgcgggauauuuacaucucccgcagacuucugggaacauuuaccuggacacucucugacagcgagggcaaugaagcucccggcggguauugccugacccgguggaugcugaucgaggccgagcucaaguguuucggaaacaccgcuguugccaaaugcaaugaaaagcaugaugaggaauuuugcgacaugcugcgccuuuucgauuucaacaaacaggcgauuaagagacugaaaacgccugcccagauguccauccagcucauuaauaaggcugugaacgcccugaucaaugaccaacuuauuaugaagaaccaucugcgggauaucauguguauccccuacugcaauuauagccgcuacugguaucucaaccacacagucaccggcaaaacaucucugccuagauguuggcugguguccaaugggagcuaccucaacgagacccacuuuucugacgacauugaacagcaggcugauaauaugaucacagagaugcugcaaaaggaguacauggaccggcagggaaaaaccccgcuuggccugguggaucucuucgucuuuagcacguccuucuaucugauuucuaucuuucugcaccuuguuaagauucccacacaucgccacaucguggggaaaccuugccccaagccucauagacucaaccacaugggaauuuguagcugcggccuguacaaacaccccggcgugccggucaaguggaagcggugaggacuaguaauaaggaaacuguaugaaugucugugggcaggaagugaagagauccuucuguaaagguuuuuggaauuaugucugcugaauaauaaacuuuuuugaaauaauaaaucugguagaaaaaugagaucucaaaggcucuuuucagagccaccaaaaaaaaaaaaaaaaaaaaaaaaaaaaaaaaaaaaaaaaaaaaaaaaaaaaaaaaaaaaaaaaagaauu

SEQ ID NO: 29064 - RNA, 1778 nt, Artificial Sequence
  mRNA product Design b-4 (hSL-A64-N5) comprising derived and/or modified sequence from LASV(GA391;Clade III)__CAA36645__GPCmut5 (opt5)
aggagagucccgcagucggcguccagcggcucugcuuguucgugugugugucguugcaggccuuauucaagcuuaccaugggccagaucgugaccuucuuucaagaggucccccacguuauugaagaggugaugaacaucgugcugauugcccucagcauccuggcuauucuuaaggggcuguacaaugucgccacaugcggacucaucggccuggugacguuccuucugcucuccgggagaucuuguagccugaucuauaaaggaaccuacgaacugcagacacucgagcugaacauggaaacccuuaauaugacaaugccucuguccugcaccaagaacaauucucaucacuauauucggguuggcaacgagacagggcucgagcugacccuuacgaauaccagcauccugaaccauaaauuuuguaaucucuccgacgcgcacaagcgcaaccuguacgaucauucucugaugagcauuaucuccacauuccaccucagcauuccgaauuuuaaccaguaugaagcuaugucuugcgacuucaauggaggcaaaaucaccgugcaguacaaccugucccacagcuuugccgucgaugccgcuggccauugugggacacuugccaauggagugcugcaaaccuucaugagaauggcuuggggcgggucuuauauugcccucgacuccggaugcggcaacugggauuguaucaugacgagcuaccaguaccugaucauucagaacacaaccugggacgaucacugccaguuuucucggcccuccccuaucggguaucuuggacugcucagccaacgcacaagagacauuuacaucucccggcgccugcugggcaccuucaccuggacacucucugauagcgagggcaaugaaacgcccgggggauauugucugaccagauggaugcuuauugaggcggagcugaagugcuuuggcaacacagccguugcuaaguguaaugaaaaacaugacgaggaguucugcgauaugcuccggcuguuugacuucaacaagcaggccauccgcagacuuaaaaccccugcucagauguccauccagcugauuaauaaggccgugaacgcgcucaucaaugaucaacugauuaugaaaaaccaucugcgggacaucaugugcauucccuacuguaauuauagccgcuacugguaucucaaccacacaucuaccgggaagacgucccugccuagaugcuggcuuaucagcaauggaucuuaccugaacgaaacaaaguucagcgacgauaucgaacagcaggccgacaauaugauuaccgagaugcuccaaaaagaguacaucgaucggcagggcaagaccccgcuggggcuggucgaccuuuuuguguucuccacaucuuuuuaucucauuagcaucuuccugcaccuggugaaaauucccacccaccgccauaucgucggaaagccuugucccaaaccucacagacucaaccauaugggcauuugcuccuguggccuguacaagcagcccgggguuccggugcgguggaaaagaugaggacuaguaauaaggaaacuguaugaaugucugugggcaggaagugaagagauccuucuguaaagguuuuuggaauuaugucugcugaauaauaaacuuuuuugaaauaauaaaucugguagaaaaaugagaucucaaaggcucuuuucagagccaccaaaaaaaaaaaaaaaaaaaaaaaaaaaaaaaaaaaaaaaaaaaaaaaaaaaaaaaaaaaaaaaaagaauu

SEQ ID NO: 29065 - RNA, 1781 nt, Artificial Sequence
  mRNA product Design b-4 (hSL-A64-N5) comprising derived and/or modified sequence from LASV(AV;Clade V)__CCA30314__GPCmut5 (opt5)
aggagagucccgcagucggcguccagcggcucugcuuguucgugugugugucguugcaggccuuauucaagcuuaccaugggccagaucgugaccuucuuucaagaggucccccacguuauugaagaggugaugaacaucgugcugauugcccucagcauccuggcuguccuuaaggggcuguacaauauugccacaugcggacucaucggccugaucacguuccuucugcucugugggagauccugcucuagcaaccuguauaaaggaguguacgaacugcagucccucgaccugaauauggagacccuuaacaugacaaugccucugucuuguaccaagaauaacagccaucacuauauucggguuggcaaugauacagggcucgaacugacccuuacaaacaccuccauccugaaucauaaauuuugcaaccucucugacgcgcacaagaaagaucuguacgaccaugcucugaugagcauuaucuccacguuccaccucagcauuccgaauuuuaaccaguaugaggccaugucuugugauuucaauggaggcaagaucuccgugcaguacaaccugagccacucuuaugccauugacgcugccaaucauugcggcaccgucgcuaacgggauccuucaaacauuuaugcgcauggccuggggaggcuccuacaucgcgcuggauagcggguguggaaacugggacugcauuaugaccucuuaccaguaucucaucauucagaauacaaccugggagaaccacugucaguucuccagacccagcccuaucggcuaccuggggcuucugucccaacggacgcgcgauauuuauaucucuagacggcuccugggaacauuuaccuggacacugagcgacuccgaaggcaaugccacccccggcggguacugccucacccgcuggaugcugaucgaggcugaacuuaaguguuucggaaacacagccguggcuaaaugcaaugagaagcaugaugaggaauuuugcgacaugcugagacucuucgauuuuaacaaacaggccauuagccggcugaagucuccugcgcagauguccauccagcuuauuaauaaagccguuaacgcucugaucaaugaccaacucauuaugaagaaccaucugcgcgacaucauguguauccccuauugcaauuacagcaaguauugguaccugaaccacacgauuaccggcaaaacaucucucccuaaguguuggcuggugagcaauggguccuaccuuaacgagacccacuucucugaugacaucgaacagcaggccgauaauaugauuacagagaugcugcaaaaagaauauauggagagacagggaaagaccccgcucggccuggucgaccuguucguguuuagcacguccuucuaccuuaucagcauuuuucuccggcuggugaaaauccccacacaccgccauauugucgggaagccuugccccaaaccucacagacugaaccauaugggaaucuguucuugcggccucuauaagcagcccggcguuccggugcgguggaagcgcugaggacuaguaauaaggaaacuguaugaaugucugugggcaggaagugaagagauccuucuguaaagguuuuuggaauuaugucugcugaauaauaaacuuuuuugaaauaauaaaucugguagaaaaaugagaucucaaaggcucuuuucagagccaccaaaaaaaaaaaaaaaaaaaaaaaaaaaaaaaaaaaaaaaaaaaaaaaaaaaaaaaaaaaaaaaaagaauu

SEQ ID NO: 29066 - RNA, 1778 nt, Artificial Sequence
  mRNA product Design b-4 (hSL-A64-N5) comprising derived and/or modified sequence from LASV(Togo/2016/7082;Clade VI)__AMR44577__GPCmut5 (opt5)
aggagagucccgcagucggcguccagcggcucugcuuguucgugugugugucguugcaggccuuauucaagcuuaccaugggccagaucauuaccuucuuucaagaggugccccacgucaucgaagagguuaugaacauugugcugaucgcccucagccugcuugcuauucugaaggggguguacaaugucgccacaugcggaaucaucggccucgugacguuccuguuucuuugugggagauccugcucucugauuuauaaaggaagcuacgaacuccagacccuggagcugaacauggaaacacucaauaugaccaugccucuguccuguacaaagaacucuagccaucacuauauccggguuggcaaugagaccgggcuugagcugacacucaccaacacguccauuaucaaucauaaauucugcaaccugucugacgcgcacaagcgcaaucuuuacgaucaugcucugaugagcauucucuccaccuuucaccugagcaucccgaacuucaaucaguaugaagccaugucuugugacuuuaacggaggcaaaauuuccgugcaguacaaucugagccacgccuaugcugucgaugccgcugagcauugcggcacaguggccaacgggguucuccaaaccuucaugagaauggcguggggaggcucuuacaucgcccuggacuccggguguggaaauugggauugcaucaugacaagcuaccaguaucuuauuauccagaacaccacgugggaagaccacugucaguuuucucggcccuccccuauuggcuaccuggggcuccugagccaacgcacaagagauaucuauauuucccggcgccuucugggaaccuucacauggacccucucugacagcgagggcaacgagacccccggcggguacugccugacaagauggaugcugaucgaagcugagcucaaguguuuuggaaauacggccguggcuaagugcaacgaaaaacaugaugaggaguucugcgacaugcugcggcuuuuugauuucaauaagcaggccauccagcgccugaaauccccugcgcagaugagcauucaacucaucaacaaggccgucaaugcucugauuaacgaccagcuuaucaugaaaaaucaccugagagauaugauguguauucccuauugcaacuacucuaaguauugguaccucaaucacaccuccagcggccggacaucucugccuaaguguuggcuggugagcaacggguccuaccucaaugaaacccauuucucugacgacaucgagcagcaagccgauaacaugaucacagaaaugcugcagaaagaguauauugaccgccagggaaagaccccgcuuggccugguggaucucuuugucuucagcacguccuuuuaccugaucagcauuuuccugcaccuuaucaaaauucccacacauagacacaucguugggaagccuugccccaaaccucaucggcucaaucacaugggaauuuguucuugcggccuguauaagcagcccggcgugccgacccgcuggaaaagaugaggacuaguaauaaggaaacuguaugaaugucugugggcaggaagugaagagauccuucuguaaagguuuuuggaauuaugucugcugaauaauaaacuuuuuugaaauaauaaaucugguagaaaaaugagaucucaaaggcucuuuucagagccaccaaaaaaaaaaaaaaaaaaaaaaaaaaaaaaaaaaaaaaaaaaaaaaaaaaaaaaaaaaaaaaaaagaauu

SEQ ID NO: 29067 - RNA, 1778 nt, Artificial Sequence
  mRNA product Design b-4 (hSL-A64-N5) comprising derived and/or modified sequence from LASV(KAK-428;Clade n.d. (VII))__ANH09740__GPCmut5 (opt5)
aggagagucccgcagucggcguccagcggcucugcuuguucgugugugugucguugcaggccuuauucaagcuuaccaugggccagaucgugaccuucuuucaagaggucccccacguuauugaagaggugaugaacaucgugcugauugcccucagccugcuugcuauccugaaggggcucuacaauuucgccacaugcggagucauuggccugaucacguuucuucugcucugugggagauccugcucugcgaccuauaaaggacaguacgaacugcagacacuggagcucaacauggaaagccugaauaugaccaugccucuuuccuguacaaagaacaauucucaucacuauauccgggcuggcaacaauaccgggcuggagcucacacugaccaacacgagcauuaucucccauaaauucugcaaucuuucugacgcccacaagaaaaaccuguacgaucauacccucaugagcauuaucacaaccuuucaccuguccauuccgaauuucaaccaguaugaggccaugagcugugacuuuaauggaggcaagaucucuauucaauacaaccugucccacagcuaugcuggcgaugccgcucagcauugcgggacaguggccaauggaguucuccagaccuucaugcgcauggcguggggcgggucuuaccuggcccuugacuccggauguagaggcugggauugcaucaucagcucuuaccaguaucugauuauccaaaacacgacaugggacgaucacugucaguuuucccggcccagcccuauuggguaccucggauucgugucccagaagacccgcgacaucuauauuucuagacggcugcuuggcacauuuaccuggacccugagcgauuccgaaggccaugacaugcccgggggauacugccucacacgcuggaugcugaucgaggcugaucugaaauguuucggcaacacggccgucgcuaagugcaaugaaaaacacgacgaggaguuuugcgauauguggagacucuucgacuucaacaagcaggccauccaacggcugaaagcgccugcccagaugaauauucagcuuaucaacaaggcugugaaugcccugauuaacgaccaacucaugaugaagaaucaucugcgcgauaucauguguauucccuauugcaacuacagcaaauuuugguaucuuaauaacaccacaaccgggagaacaucucugccucgguguuggcucaucuccaauggaagcuaccugaacgaaacccacuucucugacgauaucgagcagcaggcugacaauaugauuacggaaaugcugcagaaggaguacauggaucgccaaggcaaaacaccgcucgggcugguugaccuuuuuguguucagcaccuccuuuuaucugaucaccauuuuccuccaccuggucaagauccccacacauagacacauugugggaaaaccuugccccaagccucaucggcugaaccacaugggcaucuguucuugcggccuuuacaaacagcccggggugccgguccgcuggaagagaugaggacuaguaauaaggaaacuguaugaaugucugugggcaggaagugaagagauccuucuguaaagguuuuuggaauuaugucugcugaauaauaaacuuuuuugaaauaauaaaucugguagaaaaaugagaucucaaaggcucuuuucagagccaccaaaaaaaaaaaaaaaaaaaaaaaaaaaaaaaaaaaaaaaaaaaaaaaaaaaaaaaaaaaaaaaaagaauu

SEQ ID NO: 29068 - RNA, 1778 nt, Artificial Sequence; identical to SEQ ID NO: 29062
  mRNA product Design b-4 (hSL-A64-N5) comprising derived and/or modified sequence from LASV(Pinneo-NIG-1969;Clade I)__AIT17836__GPCmut5 (opt5)

SEQ ID NO: 29069 - RNA, 1778 nt, Artificial Sequence
  mRNA product Design b-4 (hSL-A64-N5) comprising derived and/or modified sequence from LASV(ISTH0009-NIG-2011;Clade II)__AIT17404__GPCmut5 (opt5)
aggagagucccgcagucggcguccagcggcucugcuuguucgugugugugucguugcaggccuuauucaagcuuaccaugggccagaucauuaccuucuuucaagaggugccccacgucaucgaagagguuaugaacauugugcugaucgcccucagccugcuugcuauucugaaggggaucuacaauguggccacaugcggacucuucggccuggucuccuuucuucugcucugugggagaucuugcagcacgaccuauaaaggaguguacgaacugcagacacuggagcucgacauggcgucccugaacaugaccaugccucuuucuuguacaaagaauaacagccaucacuauaucaugguuggcaaugaaaccgggcuggagcucacacugaccaacacguccauuaucaaucauaaauucugcaaccuuucugaugcucacaagaaaaaucuguacgaccaugcccucaugagcauuaucuccaccuuucaccugagcauuccgaacuucaaucaguaugaggccaugucuugugauuuuaacggaggcaagaucuccgugcaguacaaucugagccacgcuuaugccgucgacgcugccaaccauugcggcacaauugcgaauggggugcuccaaaccuucaugcggauggccuggggaggcucuuacaucgcucuggauuccggguguggaagcugggacugcaucaugacaucuuaccaguaucuuauuauccagaacaccacgugggaagaucacugucaguuuucccgccccagcccuauuggcuaccuggggcuccugucccaaagaacacgggacaucuauauuucucgcagacuucugggaaccuucacauggacccucagcgauuccgagggcaacgaaacccccggcggguacugccugacacgguggaugcugaucgaggccgagcucaaguguuuuggaaauacggcuguugccaaaugcaacgaaaagcaugacgaggaguucugcgauaugcugcgccuuuuugacuucaauaaacaggcgaucagacggcugaagaccccugcccagaugagcauucagcucaucaacaaagcugugaaugcccugauuaacgaucaacuuaucaugaagaaucaucugcgcgacauuauguguauccccuauugcaacuacucuaaguauugguaccucaaucacacagucaccggcaaaacaucccugccuagauguuggcuggugagcaacgggucuuaccucaaugaaacccacuucagcgacgauaucgaacagcaggcugacaacaugauuacggagcugcuucaaaaggaguauauggaucggcagggaaaaacaccgcugggccucguggaccuguuugucuucuccaccucuuuuuaccugaucagcauuuuccuucaccucaucaagauucccacccaucgccacaucacagggaaaccuugccccaagccucauagacugaaucacaugggaauuuguuccugcggccuguauaaacaccccggcguuccggugaaguggaagcggugaggacuaguaauaaggaaacuguaugaaugucugugggcaggaagugaagagauccuucuguaaagguuuuuggaauuaugucugcugaauaauaaacuuuuuugaaauaauaaaucugguagaaaaaugagaucucaaaggcucuuuucagagccaccaaaaaaaaaaaaaaaaaaaaaaaaaaaaaaaaaaaaaaaaaaaaaaaaaaaaaaaaaaaaaaaaagaauu

SEQ ID NO: 29070 - RNA, 1778 nt, Artificial Sequence
  mRNA product Design b-4 (hSL-A64-N5) comprising derived and/or modified sequence from LASV(ISTH2010-NIG-2012;Clade II)__AIT17482__GPCmut5 (opt5)
aggagagucccgcagucggcguccagcggcucugcuuguucgugugugugucguugcaggccuuauucaagcuuaccaugggccagaucauuaccuucuuucaagaggugccccacgucaucgaagagguuaugaacauugugcugaucgcccucagccugcuugcuauucugaaggggaucuacaauguggccacaugcggacucuucggccuggucuccuuucuucugcucugugggagaucuugcagcacgaccuauaaaggaguguacgaacugcagacacuggagcucgacauggcgucccugaacaugaccaugccucuuucuuguacaaagaauaacagccaucacuauaucaugguuggcaaugaaaccgggcuggagcucacacugaccaacacguccauuaucaaucauaaauucugcaaccuuucugaugcucacaagaaaaaucuguacgaccaugcccucaugagcauuaucuccaccuuucaccugagcauuccgaacuucaaucaguaugaggccaugucuugugauuuuaacggaggcaagaucuccgugcaguacaaucugagccacgcuuaugccgucgacgcugccaaccauugcggcacaauugcgaauggggugcuccaaaccuucaugcggauggccuggggaggcucuuacaucgcucuggauuccggguguggaagcugggacugcaucaugacaucuuaccaguaucuuauuauccagaacauuaccugggaagaucacugucaguuuucccgccccagcccuaucggcuaccuggggcuccugucccaaagaacgcgggacauuuauaucucucgcagacuucugggaacauucaccuggacacucagcgauuccgagggcaacgaaacccccggcggguacugccugacccgguggaugcugaucgaggccgagcucaaguguuuuggaaauacagcuguugccaaaugcaacgaaaagcaugacgaggaguucugcgauaugcugcgccuuuuugacuucaauaaacaggcgauuagacggcugaagacgccugcccagaugagcauccagcucauuaacaaagcugugaaugcccugaucaacgaucaacuuauuaugaagaaucaucugcgcgacaucauguguauccccuauugcaacuacucuaaguauugguaccucaaucacaccgucacaggcaaaaccucccugccuagauguuggcuggugagcaacgggucuuaccucaaugaaacacacuucagcgacgauauugaacagcaggcugacaacaugaucaccgagcugcuucaaaaggaguauauugaucggcagggaaaaacgccgcugggccucguggaccuguuugucuucuccacaucuuuuuaccugaucagcauuuuccuucaccucguuaagauccccacccaucgccacgugguggggaaaccuugccccaagccucauagacugaaucacaugggaauuuguuccugcggccuguauaaacaccccggcgucccggugaaguggaagcggugaggacuaguaauaaggaaacuguaugaaugucugugggcaggaagugaagagauccuucuguaaagguuuuuggaauuaugucugcugaauaauaaacuuuuuugaaauaauaaaucugguagaaaaaugagaucucaaaggcucuuuucagagccaccaaaaaaaaaaaaaaaaaaaaaaaaaaaaaaaaaaaaaaaaaaaaaaaaaaaaaaaaaaaaaaaaagaauu

SEQ ID NO: 29071 - RNA, 1778 nt, Artificial Sequence
  mRNA product Design b-4 (hSL-A64-N5) comprising derived and/or modified sequence from LASV(Lassa virus/H.sapiens-wt/NGA/2015/ISTH_0543;Clade II)__AVO03639__GPCmut5 (opt5)
aggagagucccgcagucggcguccagcggcucugcuuguucgugugugugucguugcaggccuuauucaagcuuaccaugggccagaucauuaccuucuuucaagaggugccccacgucaucgaagagguuaugaacauugugcugaucgcccucagccugcuugcuauucugaaggggaucuacaauguggccacaugcggacucuucggccuggucuccuuucuucugcucugugggagaucuugcagcacgaccuauaaaggaguguacgaacugcagacacuggagcucgacauggcgaaccugaauaugaccaugccucuuuccuguacaaagaacaauucucaucacuauaucaugguuggcaacgaaaccgggcuggagcucacacugaccaauacgagcauuaucaaccauaaauucugcaaucuuuccgaugcucacaagaaaaaccuguacgaccaugcccucaugucuauuaucagcaccuuucaccuguccauuccgaauuucaaccaguaugaggccaugagcugugauuuuaauggaggcaagaucucugugcaguacaaccugucccacacauaugcugucgacgccgcuaaucauugcggcaccauugccaacggggugcuccaaacauucaugcggauggcguggggaggcagcuacaucgcccuggauucuggguguggauccugggacugcaucaugaccagcuaccaguaucuuguuauucagaacacgacaugggaagaucacugucaguuuucucgccccuccccuaucggcuaccuggggcuccugagccaaagaacccgggacauuuauaucucccgcagacuucugggaacauucaccuggacccucucugauagcgagggcaaugaaacacccggcggguacugccugacgcgguggaugcugauugaggcugagcucaaguguuuuggaaacaccgccguggcuaaaugcaaugaaaagcaugacgaggaguucugcgauaugcugcgccuuuuugacuucaacaaacaggccaucagacggcugaagaccccugcgcagauguccauccagcucauuaauaaagccgucaacgcucugaucaaugaucaacuuauuaugaagaaccaucugcgcgacaucauguguauucccuauugcaauuacagcaaguauugguaccucaaccacacagugacaggcaaaaccucucugccuagauguuggcugguguccaaugggagcuaccucaacgaaacgcacuucucugacgauaucgaacagcaggccgacaauaugaucacagagcugcuucaaaaggaguauauugaucggcagggaaaaaccccgcugggccucgucgaccuguuuguuuucagcaccuccuuuuaccugaucucuauuuuccuucaccucgugaagauccccacacaucgccacauuaccgggaaaccuugccccaagccucauagacugaaccacaugggaaucuguagcugcggccuguauaaacaccccggcgugccggucaaguggaagcggugaggacuaguaauaaggaaacuguaugaaugucugugggcaggaagugaagagauccuucuguaaagguuuuuggaauuaugucugcugaauaauaaacuuuuuugaaauaauaaaucugguagaaaaaugagaucucaaaggcucuuuucagagccaccaaaaaaaaaaaaaaaaaaaaaaaaaaaaaaaaaaaaaaaaaaaaaaaaaaaaaaaaaaaaaaaaagaauu

SEQ ID NO: 29072 - RNA, 1778 nt, Artificial Sequence
  mRNA product Design b-4 (hSL-A64-N5) comprising derived and/or modified sequence from LASV(Lassa virus/H.sapiens-wt/NGA/2016/ISTH_0009;Clade II)__AVO03571__GPCmut5 (opt5)
aggagagucccgcagucggcguccagcggcucugcuuguucgugugugugucguugcaggccuuauucaagcuuaccaugggccagaucauuaccuucuuucaagaggugccccacgucaucgaagagguuaugaacauugugcugaucgcccucagccugcuugcuauucugaaggggaucuacaauguggccacaugcggacuccugggccuugucuccuuccugcuccugugugggagaucuugcagcacgaccuauaaaggaguguacgaacugcagacacucgagcuggacauggcgucccuuaacaugaccaugccucugucuuguacaaagaauaacagccaucacuauaucaugguuggcaaugaaaccgggcucgagcugacacuuaccaacacguccauuaucaaucauaaauuuugcaaccugucugaugcucacaagaaaaaucucuacgaccaugcccugaugagcauuaucuccaccuuccaccugagcauuccgaacuuuaaucaguaugaggccaugucuugugauuucaacggaggccggaucuccgugcaguacaaucucagccacucuuaugcugucgacgccgcuaaccauugcggcacaauugccaauggggugcugcaaaccuuuaugcgcauggcguggggaggcuccuacaucgcccuugauagcggguguggaucuugggacugcaucaugacauccuaccaguaucugauuauccagaacaccacgugggaagaucacugucaguucagcagacccuccccuauuggcuaccucgggcugcuuucucaacggacacgcgacaucuauauuagcagacggcugcucggaaccuuuacauggacccuguccgauagcgagggcaacgaaacccccggcggguacugccugacacgcuggaugcucaucgaggcugagcugaaguguuucggaaauacggccguugcuaagugcaacgaaaaacaugacgaggaauuuugcgauaugcuuagacuguucgacuuuaauaagcaggccauccggcgccucaaaaccccugcgcagaugucuauucagcugaucaacaaggccgugaaugcucuuauuaacgaucaacugaucaugaaaaaucaccucagagacauuauguguauccccuauugcaacuacuccaaguauugguaccugaaucacacagucaccggcaagacaagccugccucgguguuggcucgugucuaacgggagcuaccugaaugagacccauuucuccgacgauaucgaacagcaggccgacaacaugauuacggagcuucugcaaaaagaguauaucgaucgccagggaaagacaccgcucggccugguggaccuguucgucuuuucuaccagcuucuaccuuauuuccaucuuucuccaccugguuaaaauucccacccauagacacaucacagggaagccuugccccaaaccucaucggcugaaucacaugggaauuuguagcugcggccucuauaaccaccccggcgugccggugaaguggaaacgcugaggacuaguaauaaggaaacuguaugaaugucugugggcaggaagugaagagauccuucuguaaagguuuuuggaauuaugucugcugaauaauaaacuuuuuugaaauaauaaaucugguagaaaaaugagaucucaaaggcucuuuucagagccaccaaaaaaaaaaaaaaaaaaaaaaaaaaaaaaaaaaaaaaaaaaaaaaaaaaaaaaaaaaaaaaaaagaauu

SEQ ID NO: 29073 - RNA, 1778 nt, Artificial Sequence
  mRNA product Design b-4 (hSL-A64-N5) comprising derived and/or modified sequence from LASV(Lassa virus/H.sapiens-wt/NGA/2016/ISTH_0017;Clade II)__AVO03567__GPCmut5 (opt5)
aggagagucccgcagucggcguccagcggcucugcuuguucgugugugugucguugcaggccuuauucaagcuuaccaugggccagaucauuaccuucuuucaagaggugccccacgucaucgaagagguuaugaacauugugcugaucgcccucagccugcuugcuauucugaaggggaucuacaauguggccacaugcggacucuucggccuggucuccuuucuucugcucugugggagaucuugcagcacgaccuauaaaggaguguacgaacugcagacacuggagcucgacauggcgucccugaacaugaccaugccucuuucuuguacaaagaauaacagccaucacuauaucaugguuggcaaugaaaccgggcuggagcucacacugaccaacacguccauuaucaaucauaaauucugcaaccuuucugaugcucacaagaaaaaucuguacgaccaugcccucaugagcauuaucuccaccuuucaccugagcauuccgaacuucaaucaguaugaggccaugucuugugauuuuaacggaggcaagaucuccgugcaguacaaucugagccacacauaugcuauugacgccgcuaaccauugcggcaccaucgccaaugggguccuccaaacauucaugcggauggcguggggaggcucuuacaucgcccuggauuccggguguggaagcugggacugcauuaugaccucuuaccaguaucuuaucauucagaacacgacaugggaagaucacugucaguuuucccgccccagcccuaucggcuaccuggggcuccugucccaaagaacccgggacauuuauaucucucgcagacuucugggaacauucaccuggacccucagcgauuccgagggcaacgaaacacccggcggguacugccugacgcgguggaugcugaucgaggcugagcucaaguguuuuggaaauaccgccguggcuaaaugcaacgaaaagcaugacgaggaguucugcgauaugcugcgccuuuuugacuucaauaaacaggccauuagacggcugaagaccccugcgcagaugagcauccagcucauuaacaaagccguuaaugcucugaucaacgaucaacuuauuaugaagaaucaucugcgcgacaucauguguauccccuauugcaacuacucuaaguauugguaccucaaucacacagugacaggcaaaaccucccugccuagauguuggcuggucagcaacgggucuuaccucaaugaaacgcacuucagcgacgauauugaacagcaggccgacaacaugaucacagagcugcuucaaaaggaguauauggaucggcagggaaaaaccccgcugggccucguggaccuguuuguguucuccaccucuuuuuaccugauuagcaucuuccuucaccucguccgcauucccacacauagacacguuaucgggaagccuugccccaaaccucaucggcugaaucacaugggaauuuguuccugcggccuguauaagcaccccggcgugccggugaaauggaagcgcugaggacuaguaauaaggaaacuguaugaaugucugugggcaggaagugaagagauccuucuguaaagguuuuuggaauuaugucugcugaauaauaaacuuuuuugaaauaauaaaucugguagaaaaaugagaucucaaaggcucuuuucagagccaccaaaaaaaaaaaaaaaaaaaaaaaaaaaaaaaaaaaaaaaaaaaaaaaaaaaaaaaaaaaaaaaaagaauu

SEQ ID NO: 29074 - RNA, 1778 nt, Artificial Sequence
  mRNA product Design b-4 (hSL-A64-N5) comprising derived and/or modified sequence from LASV(Lassa virus/H.sapiens-wt/NGA/2018/ISTH_0959;Clade II)__AVV65099__GPCmut5 (opt5)
aggagagucccgcagucggcguccagcggcucugcuuguucgugugugugucguugcaggccuuauucaagcuuaccaugggccagaucauuaccuucuuucaagaggugccccacgucaucgaagagguuaugaacauugugcugaucgcccucagccugcuugcuauucugaaggggaucuacaauguggucacaugcggacucuucggccugguguccuuucuucugcucugugggagaucuugcagcacgaccuauaaaggaguuuacgaacugcagacacuggagcucgacauggccucccugaacaugaccaugccucuuucuuguacaaagaauaacagccaucacuauaucauggugggcaaugaaaccgggcuggagcucacacugaccaacacguccauuaucaaucauaaauucugcaaccuuucugaugcgcacaagaaaaaucuguacgaccaugcucucaugagcauuaucuccaccuuucaccugagcauuccgaacuucaaucaguaugaggccaugucuugugauuuuaacggaggcaagaucuccguccaguacaaucugagccacgccuaugcuauugacgccgcuaaccauugcggcacaaucgccaauggggugcuccaaaccuucaugcggauggcguggggaggcucuuacaucgcccuggauuccggguguggaagcugggacugcauuaugacaucuuaccaguaucuuaucauucagaacaccacgugggaagaucacugucaguuuucccgccccagcccuaucggcuaccuggggcuccugucccaaagaacacgggacauuuauaucucucgcagacuucugggaaccuucacauggacccucagcgauuccgagggcaacgaaacccccggcggguacugccugacacgguggaugcugaucgaggcugagcucaaguguuuuggaaauacggccguugcuaaaugcaacgaaaagcaugacgaggaguucugcgauaugcugcgccuuuuugacuucaauaaacaggccauuagacggcugaagaccccugcgcagaugagcauccagcucauuaacaaagccgugaaugcucugaucaacgaucaacuuauuaugaagaaucaucugcgcgacaucauguguauccccuauugcaacuacucuaaguauugguaccucaaucacacagucaccggcaaaacaucccugccuagauguuggcuggugagcaacgggucuuaccucaaugaaacccacuucagcgacgauauugaacagcaggccgacaacaugaucacggagcugcuucaaaaggaguauauugaucggcagggaaaaacaccgcugggccucguggaccuguuugucuucuccaccucuuuuuaccugaucagcauuuuccuucaccucguuaagauccccacccaucgccacgugauugggaaaccuugccccaagccucauagacugaaucacaugggaaucuguuccugcggccuguauaaacaccccggcgugccggucaaguggaagcggugaggacuaguaauaaggaaacuguaugaaugucugugggcaggaagugaagagauccuucuguaaagguuuuuggaauuaugucugcugaauaauaaacuuuuuugaaauaauaaaucugguagaaaaaugagaucucaaaggcucuuuucagagccaccaaaaaaaaaaaaaaaaaaaaaaaaaaaaaaaaaaaaaaaaaaaaaaaaaaaaaaaaaaaaaaaaagaauu

SEQ ID NO: 29075 - RNA, 1778 nt, Artificial Sequence
  mRNA product Design b-4 (hSL-A64-N5) comprising derived and/or modified sequence from LASV(LASV003-NIG-2008;Clade II)__AIT17580__GPCmut5 (opt5)
aggagagucccgcagucggcguccagcggcucugcuuguucgugugugugucguugcaggccuuauucaagcuuaccaugggccagaucauuaccuucuuucaagaggugccccacgucaucgaagagguuaugaacauugugcugaucgcccucagccugcuugcuauucugaaggggaucuacaauguggccacaugcggacucuucggccuggucuccuuucuucugcucugugggagaucuugcagcacgaccuauaaaggaguguacgaacugcagacacuggagcucgacauggcgucccugaacaugaccaugccucuuucuuguacaaagaauaacagccaucacuauaucaugguuggcaaugaaaccgggcuggagcucacacugaccaacacguccauuaucaaucauaaauucugcaaccuuucugaugcucacaagaaaaaucuguacgaccaugcccucaugagcauuaucuccaccuuucaccugagcauuccgaacuucaaucaguaugaggccaugucuugugauuuuaacggaggcaagaucuccgugcaguacaaucugagccacacauaugcugucgacgccgcuaaccauugcggcaccauugccaauggggugcuccaaacauucaugcggauggcguggggaggcucuuacaucgcccuggauuccggguguggaagcugggacugcaucaugaccucuuaccaguaucuuauuauccagaacacgacaugggaagaucacugucaguuuucccgccccagcccuauuggcuaccuggggcuccugucccaaagaacccgggacaucuauauuucucgcagacuucugggaacauucaccuggacccucagcgauuccgagagcaacgaaacacccggcggcuacugccugacgcgguggaugcugaucgaggcugagcucaaguguuuugggaauaccgccguugcuaaaugcaacgaaaagcaugacgaggaguucugcgauaugcugcgccuuuuugacuucaauaaacaggccaucagacggcugaaggcgccugcccagaugucuauucagcucaucaacaaagcugugaaugcccugauuaacgaucaacuuaucaugaagaaucaucugcgcgacauuauguguauccccuauugcaacuacuccaaguauugguaccucaaucacacagucaccggaagaacaagccugccucgguguuggcuggugucuaacggcagcuaccucaaugaaacccacuucuccgacgauaucgaacagcaggcugacaacaugauuacggagcugcuucaaaaagaguauauggaucgccaggggaagacaccgcugggacucguggaccuguuugucuucucuaccagcuuuuaccugaucuccauuuuccuucaccucguuaaaauccccacccauagacacgugauuggcaagccuugccccaaaccucaucggcugaaucacauggggaucuguagcugcggacuguauaagcaccccggcgugccggucaaauggaagcgcugaggacuaguaauaaggaaacuguaugaaugucugugggcaggaagugaagagauccuucuguaaagguuuuuggaauuaugucugcugaauaauaaacuuuuuugaaauaauaaaucugguagaaaaaugagaucucaaaggcucuuuucagagccaccaaaaaaaaaaaaaaaaaaaaaaaaaaaaaaaaaaaaaaaaaaaaaaaaaaaaaaaaaaaaaaaaagaauu

SEQ ID NO: 29076 - RNA, 1778 nt, Artificial Sequence
  mRNA product Design b-4 (hSL-A64-N5) comprising derived and/or modified sequence from LASV(LASV035-NIG-2009;Clade II)__AIT17588__GPCmut5 (opt5)
aggagagucccgcagucggcguccagcggcucugcuuguucgugugugugucguugcaggccuuauucaagcuuaccaugggccagaucauuaccuucuuucaagaggugccccacgucaucgaagagguuaugaacauugugcugaucgcccucagccugcuugcuauucugaaggggaucuacaauguggccacaugcggacucuucggccuggucuccuuucuucugcucugugggagaucuugcagcacgaccuauaaaggaguguacgaacugcagacacuggagcucgacauggcgucccugaacaugaccaugccucuuucuuguacaaagaauaacagccaucacuauaucaugguuggcaaugaaaccgggcuggagcucacacugaccaacacguccauuaucaaucauaaauucugcaaccuuucugaugcucacaagaaaaaucuguacgaccaugcccucaugagcauuaucuccaccuuucaccugagcauuccgaacuucaaucaguaugaggccaugucuugugauuuuaacggaggcaagaucuccgugcaguacaaucugagccacgcuuaugccgucgacgcugccaaccauugcggcacaauugcgaauggggugcuccaaaccuucaugcggauggccuggggaggcucuuacaucgcucuggauuccggguguggaagcugggacugcaucaugacaucuuaccaguaucuuauuauccagaacaccacgugggaagaucacugucaguuuucccgccccagcccuauuggcuaccuggggcuccugucccaaagaacacgggacaucuauauuucucgcagacuucugggaaccuucacauggacccucagcgauuccgagggcaacgaaacccccggcggguacugccugacacgguggaugcugaucgaggccgagcucaaguguuuuggaaauacggcuguugccaaaugcaacgaaaagcaugacgaggaguucugcgauaugcugcgccuuuuugacuucaauaaacaggcgaucagacggcugaaggccccugcucagaugagcauucagcucaucaacaaagccgugaaugcucugauuaacgaucaacuuaucaugaagaaucaucugcgcgacauuauguguauccccuauugcaacuacucuaaguauugguaccucaaucacaccgucacaggcaaaaccucccugccuagauguuggcuggugagcaacgggucuuaccucaaugaaacacacuucagcgacgauaucgaacagcaggccgacaacaugauuaccgagcugcuucaaaaggaguauaucgaucggcagggaaaaacgccgcugggccucguggaccuguuugucuucuccacaucuuuuuaccugauuagcaucuuccuucaccucguuaagauucccacccaucgccacgugaucgggaaaccuugccccaagccucauagacugaaucacaugggaauuuguuccugcggccuguauaaacaccccggcgugccggucaaguggaagcggugaggacuaguaauaaggaaacuguaugaaugucugugggcaggaagugaagagauccuucuguaaagguuuuuggaauuaugucugcugaauaauaaacuuuuuugaaauaauaaaucugguagaaaaaugagaucucaaaggcucuuuucagagccaccaaaaaaaaaaaaaaaaaaaaaaaaaaaaaaaaaaaaaaaaaaaaaaaaaaaaaaaaaaaaaaaaagaauu

SEQ ID NO: 29077 - RNA, 1778 nt, Artificial Sequence
  mRNA product Design b-4 (hSL-A64-N5) comprising derived and/or modified sequence from LASV(LASV1000-NIG-2009;Clade II)__AIT17782__GPCmut5 (opt5)
aggagagucccgcagucggcguccagcggcucugcuuguucgugugugugucguugcaggccuuauucaagcuuaccaugggccagaucauuaccuucuuucaagaggugccccacgucaucgaagagguuaugaacauugugcugaucgcccucagccugcuugcuauucugaaggggaucuacaauguggccacaugcggacucuucggccuggucuccuuucuucugcucugugggagaucuugcagcacgaccuauaaaggaguguacgaacugcagacacuggagcucgacauggcgucccugaacaugaccaugccucuuucuuguacaaagaauaacagccaucacuauaucaugguuggcaaugaaaccgggcuggagcucacacugaccaacacguccauuaucaaucauaaauucugcaaccuuucugaugcucacaagaaaaaucuguacgaccaugcccucaugagcauuaucuccaccuuucaccugagcauuccgaacuucaaucaguaugaggccaugucuugugauuuuaacggaggcaagaucuccgugcaguacaaucugagccacacauaugcugucgacgccgcuaaccauugcggcaccauugccaauggggugcuccaaacauucaugcggauggcguggggaggcucuuacaucgcccuggauuccggguguggaagcugggacugcaucaugaccucuuaccaguaucuuauuauccagaacacgacaugggaagaucacugucaguuuucccgccccagcccuauuggcuaccuggggcuccugucccaaagaacccgggacaucuauauuucucgcagacuucugggaacauucaccuggacccucagcgauuccgagggcaacgaaacacccggcggguacugccugacgcgguggaugcugaucgaggcugagcucaaguguuuuggaaauaccgccguugcuaaaugcaacgaaaagcaugacgaggaguucugcgauaugcugcgccuuuuugacuucaauaaacaggccaucaagagacugaaaaccccugcgcagaugagcauucagcucaucaacaaggccgugaaugcucugauuaacgaucaacuuaucaugaagaaucaucugcgggacauuauguguauccccuauugcaacuacucuaaauauugguaccucaaucacacagucacaggcaagaccucccugccucgcuguuggcuggugagcaacgggucuuaccucaaugaaacgcacuucagcgacgauaucgaacagcaggccgacaacaugauuacagagcugcuucaaaaagaguauaucgauagacagggaaagaccccgcugggccucguggaccuguuugucuucuccaccucuuuuuaccugauuagcaucuuccuucaccucguuaaaauucccacacaucggcacgugguggggaagccuugccccaaaccucaucgccugaaucacaugggaaucuguuccugcggccuguauaagcaccccggcgucccggugaaguggaaaagaugaggacuaguaauaaggaaacuguaugaaugucugugggcaggaagugaagagauccuucuguaaagguuuuuggaauuaugucugcugaauaauaaacuuuuuugaaauaauaaaucugguagaaaaaugagaucucaaaggcucuuuucagagccaccaaaaaaaaaaaaaaaaaaaaaaaaaaaaaaaaaaaaaaaaaaaaaaaaaaaaaaaaaaaaaaaaagaauu

SEQ ID NO: 29078 - RNA, 1778 nt, Artificial Sequence
  mRNA product Design b-4 (hSL-A64-N5) comprising derived and/or modified sequence from LASV(LASV221-NIG-2010;Clade II)__AIT17624__GPCmut5 (opt5)
aggagagucccgcagucggcguccagcggcucugcuuguucgugugugugucguugcaggccuuauucaagcuuaccaugggccagaucauuaccuucuuucaagaggugccccacgucaucgaagagguuaugaacauugugcugaucgcccucagccugcuugcuauucugaaggggaucuacaauguggccacaugcggacucuucggccuggucuccuuucuucugcucugugggagaucuugcagcacgaccuauaaaggaguguacgaacugcagacacuggagcucgacauggcgucccugaacaugaccaugccucuuucuuguacaaagaauaacagccaucacuauaucaugguuggcaaugaaaccgggcuggagcucacacugaccaacacguccauuaucaaucauaaauucugcaaccuuucugaugcucacaagaaaaaucuguacgaccaugcccucaugagcauuaucuccaccuuucaccugagcauuccgaacuucaaucaguaugaggccaugucuugugauuuuaacggaggcaagaucuccgugcaguacaaucugagccacacauaugcuauugacgccgcuaaccauugcggcaccaucgccaaugggguccuccaaacauucaugcggauggcguggggaggcucuuacaucgcccuggauuccggguguggaagcugggacugcauuaugaccucuuaccaguaucuuaucauucagaacacgacaugggaagaucacugucaguuuucccgccccagcccuaucggcuaccuggggcuccugucccaaagaacccgggacauuuauaucucucgcagacuucugggaacauucaccuggacccucagcgauuccgagggcaacgaaacacccggcggguacugccugacgcgguggaugcugaucgaggcugagcucaaguguuuuggaaauaccgccguggcuaaaugcaacgaaaagcaugacgaggaguucugcgauaugcugcgccuuuuugacuucaauaaacaggccauuagacggcugaagaccccugcgcagaugagcauccagcucauuaacaaagccguuaaugcucugaucaacgaucaacuuauuaugaagaaucaucugcgcgacaucauguguauccccuauugcaacuacucuaaguauugguaccucaaucacacagugacaggcaaaaccucccugccuagauguuggcuggucagcaacgggucuuaccucaaugaaacgcacuucagcgacgauauugaacagcaggccgacaacaugaucacagagaugcugcaaaaggaguauauggaucggcagggaaaaaccccgcuuggccugguggaccucuuuguguucuccaccucuuuuuaccugauuagcaucuuccugcaccuugucaagauucccacacaucgccacguuaucgggaaaccuugccccaagccucauagacucaaucacaugggaauuuguuccugcggccuguauaaacaccccggcgugccggugaaguggaagcggugaggacuaguaauaaggaaacuguaugaaugucugugggcaggaagugaagagauccuucuguaaagguuuuuggaauuaugucugcugaauaauaaacuuuuuugaaauaauaaaucugguagaaaaaugagaucucaaaggcucuuuucagagccaccaaaaaaaaaaaaaaaaaaaaaaaaaaaaaaaaaaaaaaaaaaaaaaaaaaaaaaaaaaaaaaaaagaauu

SEQ ID NO: 29079 - RNA, 1778 nt, Artificial Sequence
  mRNA product Design b-4 (hSL-A64-N5) comprising derived and/or modified sequence from LASV(LASV237-NIG-2010;Clade II)__AIT17638__GPCmut5 (opt5)
aggagagucccgcagucggcguccagcggcucugcuuguucgugugugugucguugcaggccuuauucaagcuuaccaugggccagaucauuaccuucuuucaagaggugccccacgucaucgaagagguuaugaacauugugcugaucgcccucagccugcuugcuauucugaaggggaucuacaauguggccacaugcggacucuucggccuggucuccuuucuucugcucugugggagaucuugcagcacgaccuauaaaggaguguacgaacugcagacacuggagcucgacauggcgucccugaacaugaccaugccucuuucuuguacaaagaauaacagccaucacuauaucaugguuggcaaugaaaccgggcuggagcucacacugaccaacacguccauuaucaaucauaaauucugcaaccuuucugaugcucacaagaaagaccuguacgaucaugcccucaugagcauuaucuccaccuuucaccugagcauuccgaauuucaaccaguaugaggccaugucuugugacuuuaauggaggcaagaucuccgugcaguacaaccugagccacacauaugcugucgaugccgcuaaucauugcggcaccauugccaacggggugcuccaaacauucaugcggauggcguggggaggcucuuacaucgcccuggacuccggguguggaagcugggauugcaucaugaccucuuaccaguaucuuauuauccagaauacgacaugggaagaccacugucaguuuucccgccccagcccuauuggcuaccuggggcuccugucccaaagaacccgggauaucuauauuucucgcagacuucugggaacauucaccuggacccucagcgacuccgagggcaacgaaacacccggcggguacugccugacgcgguggaugcugaucgaggcugagcucaaguguuuuggaaacaccgccguugcuaaaugcaaugaaaagcaugaugaggaguucugcgacaugcugcgccuuuuugauuucaacaaacaggccaucagacggcugaagaccccugcgcagaugagcauucagcucaucaauaaagccgugaacgcucugauuaaugaccaacuuaucaugaagaaccaucugcgcgacauuauguguauccccuauugcaauuacucuaaguauugguaccucaaccacacagucacaggcaaaaccucccugccuagauguuggcuggugagcaaugggucuuaccucaacgaaacgcacuucagcgaugacaucgaacagcaggccgauaauaugauuacagagcugcuucaaaaggaguauauggaccggcagggaaaaaccccgcugggccucguggaucuguuugucuucuccaccucuuuuuaccugaucagcauuuuccuucaccucaucaagauucccacacaucgccacaucaccgggaaaccuugccccaagccucauagacugaaccacaugggaauuuguuccugcggccuguauaaacaccccggcguuccggugaaguggaagcggugaggacuaguaauaaggaaacuguaugaaugucugugggcaggaagugaagagauccuucuguaaagguuuuuggaauuaugucugcugaauaauaaacuuuuuugaaauaauaaaucugguagaaaaaugagaucucaaaggcucuuuucagagccaccaaaaaaaaaaaaaaaaaaaaaaaaaaaaaaaaaaaaaaaaaaaaaaaaaaaaaaaaaaaaaaaaagaauu

SEQ ID NO: 29080 - RNA, 1778 nt, Artificial Sequence
  mRNA product Design b-4 (hSL-A64-N5) comprising derived and/or modified sequence from LASV(LASV253-NIG-2011;Clade II)__AIT17670__GPCmut5 (opt5)
aggagagucccgcagucggcguccagcggcucugcuuguucgugugugugucguugcaggccuuauucaagcuuaccaugggccagaucauuaccuucuuucaagaggugccccacgucaucgaagagguuaugaacauugugcugaucgcccucagccugcuugcuauucugaaggggaucuacaauguggccacaugcggacucuucggccuggucuccuuucuucugcucugugggagaucuugcagcacgaccuauaaaggaguguacgaacugcagacacuggagcucgacauggcgucccugaacaugaccaugccucuuucuuguacaaagaauaacagccaucacuauaucaugguuggcaaugaaaccgggcuggagcucacacugaccaacacguccauuaucaaucauaaauucugcaaccuuucugaugcucacaagaaaaaucuguacgaccaugcccucaugagcauuaucuccaccuuucaccugagcauuccgaacuucaaucaguaugaggccaugucuugugauuuuaacggaggcaagaucuccgugcaguacaaucugagccacacauaugcugucgacgccgcuaaccauugcggcaccauugccaauggggugcuccaaacauucaugcggauggcguggggaggcucuuacaucgcccuggauuccggguguggaagcugggacugcaucaugaccucuuaccaguaucuuauuauccagaacacgacaugggaagaucacugucaguuuucccgccccagcccuauuggcuaccuggggcuccugucccaaagaacccgggacaucuauauuucucgcagacuucugggaacauucaccuggacccucagcgauuccgagggcaacgaaacacccggcggguacugccugacgcgguggaugcugaucgaggcugagcucaaguguuuuggaaauaccgccguugcuaaaugcaacgaaaagcaugacgaggaguucugcgauaugcugcgccuuuuugacuucaauaaacaggccaucagacggcugaaggcgccugcccagaugagcauucagcucaucaacaaagcugugaaugcccugauuaacgaucaacuuaucaugaagaaucaucugcgcgacauuauguguauccccuauugcaacuacucuaaguauugguaccucaaucacacagucaccggcagaacaucccugccucgguguuggcuggugagcaacgggucuuaccucaaugaaacccacuucagcgacgauaucgaacagcaggcugacaacaugauuacggagcugcuucaaaaagaguauaucgaucgccagggaaagacaccgcugggccucguggaccuguuugucuucuccaccucuuuuuaccugauuagcaucuuccuucaccucguuaaaauucccacccauagacacaucauugggaagccuugccccaaaccucaucggcugaaucacaugggaaucuguuccugcggccuguauaagcaccccggcgugccggugaaauggaagcgcugaggacuaguaauaaggaaacuguaugaaugucugugggcaggaagugaagagauccuucuguaaagguuuuuggaauuaugucugcugaauaauaaacuuuuuugaaauaauaaaucugguagaaaaaugagaucucaaaggcucuuuucagagccaccaaaaaaaaaaaaaaaaaaaaaaaaaaaaaaaaaaaaaaaaaaaaaaaaaaaaaaaaaaaaaaaaagaauu

SEQ ID NO: 29081 - RNA, 1778 nt, Artificial Sequence
  mRNA product Design b-4 (hSL-A64-N5) comprising derived and/or modified sequence from LASV(LASV254-NIG-2011;Clade II)__AIT17674__GPCmut5 (opt5)
aggagagucccgcagucggcguccagcggcucugcuuguucgugugugugucguugcaggccuuauucaagcuuaccaugggccagaucauuaccuucuuucaagaggugccccacgucaucgaagagguuaugaacauugugcugaucgcccucagccugcuugcuauucugaaggggaucuacaauguggccacaugcggacucuucggccuggucuccuuucuucugcucugugggagaucuugcagcacgaccuauaaaggaguguacgaacugcagacacuggagcucgacaugaccaaccugaauaugacaaugccucuuuccuguaccaagaacaauucucaucacuauaucaugguuggcaacgaaacagggcuggagcucacccugacgaauaccagcauuaucaaccauaaauucugcaaucuuuccgaugcgcacaagaaaaaccuguacaaucaugcucucaugucuauuaucagcacauuucaccuguccauuccgaacuucaaucaguaugaggccaugagcugugacuuuaacggaggcaagaucucugugcaguacaaucugucccacagcuaugccgucgaugcugccaaccauugcggcaccauugcuaacggggugcuccaaacauucaugcggauggccuggggaggcucuuacaucgcgcuggacuccggguguggaaauugggauugcaucaugaccagcuaccaguaucuuauuauccagaacacgacaugggaagaccacugucaguuuucucgccccuccccuauuggcuaccuggggcuccugagccaaagaacccgggauaucuauauuucccgcagacuucugggaacauucaccuggacccucucugacagcgagggcaaugaaacacccggcggguacugccugacgcgguggaugcugaucgaggccgagcucaaguguuuuggaaacaccgcuguugccaaaugcaaugaaaagcaugaugaggaguucugcgacaugcugcgccuuuuugauuucaacaaacaggcuaucagacggcugaagaccccugcccaggcgaauauucagcucaucaacaaagccgugaaugcucugauuaacgaccaacuuaucaugaagaaucaucugcgcgauauuauguguauccccuauugcaacuacuccaaguauugguaccucaaucacacagucacaggcaaaaccagccugccuagauguuggcuggugucuaacggguccuaccucaaugaaacgcacuucagcgacgacaucgaacagcaggccgauaacaugauuacagagcugcuucaaaaggaguauauggaccggcagggaaaaaccccgcugggccucguggaucuguuugucuucucuaccagcuuuuaccugaucuccauuuuccuucaccucguuaagauccccacacaucgccacgugauugggaaaccuugccccaagccucauagacugaaccacaugggaaucuguucuugcggccuguauaaacaccccggcgugccggucaaguggaagcggugaggacuaguaauaaggaaacuguaugaaugucugugggcaggaagugaagagauccuucuguaaagguuuuuggaauuaugucugcugaauaauaaacuuuuuugaaauaauaaaucugguagaaaaaugagaucucaaaggcucuuuucagagccaccaaaaaaaaaaaaaaaaaaaaaaaaaaaaaaaaaaaaaaaaaaaaaaaaaaaaaaaaaaaaaaaaagaauu

SEQ ID NO: 29082 - RNA, 1778 nt, Artificial Sequence
  mRNA product Design b-4 (hSL-A64-N5) comprising derived and/or modified sequence from LASV(Nig08-A19;Clade III)__ADU56618__GPCmut5 (opt5)
aggagagucccgcagucggcguccagcggcucugcuuguucgugugugugucguugcaggccuuauucaagcuuaccaugggccagaucgugaccuucuuucaagaggucccccacguuauugaagaggugaugaacaucgugcugauugcccucagcauccuggcuauucuuaaggggcuguacaauaucgccacaugcggacucaucggccuggucacguuccuucugcucuccgggagaucuuguagcaugaccuauaaaggaguguacgaacugcagacacuggagcucaacaugaauacccugaacaugacaaugccucuuuccugcaccaagaauaacucucaucacuauauuaugguuggcaaugaaacagggcuggagcucacccugacgaacaccagccuucugcaucacaaauuuuguaaucucuccgacgcgcauaagaaaaaccuguacgaucacacacugaugucuaucauuagcaccuuccaccucuccaucccgaauuuuaaccaguaugaggcuaugagcugcgacuucaauggaggcaagauuacagugcaguacaaccugucucauuccuaugccaucgaugccgcuaaucacuguggcaccgucgccaacggggugcuucaaacguuuaugcggauggcuuggggaggcagcuacauugcccuggacucugggugcggaaagugggauuguaucaugacauccuaccaguaucucaucauucagaacaccacaugggaagaccauugccaguucagccgccccucuccuaucggcuaccuggggcuucugucccaaagaacccgggauauuuauaucagccgcagacuccugggaaccuuuacauggacgcuguccgacucugagggcaaugaaacccccggcggguacugucucacacgguggaugcugauugaggcggagcuuaaaugcuucggaaacaccgccguugcuaaguguaaugaaaaacacgaugaggaauuuugcgacaugcugcgccucuucgauuuuaacaagcaggccaucagacggcugaaagcuccugcccagaugagcauccagcuuauuaauaaggcggugaacgcccugaucaaugaccaacucauuaugaagaaccaucugcgcgauaucaugugcauucccuauuguaauuacuccaaauauugguaccugaaccacacaagcaccggcagaacgucucucccucggugcuggcuggucuccaaugggagcuaccuuaacgagacacacuucucugacgacaucgaacagcaggcugauaauaugaucaccgagaugcugcaaaaggaguaucucgaccgccagggaaaaaccccgcugggccugguggaucuuuucguguuuagcacauccuucuaccucauuucuaucuuucugcaucuggucaagauucccacccacagacauaucguugggaaaccuugucccaagccucaccggcucaaccacaugggaauuugcagcuguggccuguauaaacagcccggcgugccggugcgcuggaagagaugaggacuaguaauaaggaaacuguaugaaugucugugggcaggaagugaagagauccuucuguaaagguuuuuggaauuaugucugcugaauaauaaacuuuuuugaaauaauaaaucugguagaaaaaugagaucucaaaggcucuuuucagagccaccaaaaaaaaaaaaaaaaaaaaaaaaaaaaaaaaaaaaaaaaaaaaaaaaaaaaaaaaaaaaaaaaagaauu

SEQ ID NO: 29083 - RNA, 1781 nt, Artificial Sequence
  mRNA product Design b-4 (hSL-A64-N5) comprising derived and/or modified sequence from LASV(G1180-SLE-2010;Clade IV)__AIT17168__GPCmut5 (opt5)
aggagagucccgcagucggcguccagcggcucugcuuguucgugugugugucguugcaggccuuauucaagcuuaccaugggccagaucgugaccuucuuucaagaggucccccacguuauugaagaggugaugaacaucgugcugauugcccucagcauccuggcuguccuuaaggggcuguacaauuucgccacaugcggacucgugggccugcuuacguuucugcuccugugugggagauccugcaccgcgucucgguauaaaggaguuuacgaacugcagacacucgagcugaacauggaaacccuuaauaugacaaugccucugagcuguaccaagaacaauucccaucacuauauuauggugggcaacgagacagggcucgagcugacccuuacgaauaccucuaucaucaaccauaaauucugcaaucugagcgacgcucacaagaaaaaccucuacgaucaugcccugauguccauuaucucuacauuucaccugagcauuccgaauuucaaccaguaugaagccauguccugugacuuuaauggaggcaagaucagcguccaguacaaccucucucacuccuaugcuggcgaugccgcuaaucauugcgggaccguggccaacggaguucugcaaacauucaugcgcauggcguggggcgggagcuacauugcccuugacucuggauguggcuccugggauugcaucaugaccagcuaccaguaucugauuauccagaacacgacaugggaggaccacugucaguuuucuagacccuccccuaucggguaccucggacugcuuagccaacggacccgcgauauuuauaucuccagacggcugcucggcacauucaccuggacccugucugacagcgaaggcaaggauacacccgggggauacugccugacgcgcuggaugcucauugaggcugagcugaaauguuuuggcaauaccgccguggcuaagugcaacgaaaaacaugacgaggaguucugcgauaugcuuagacuguuugacuucaauaagcaggccauccagcggcucaaagcgccugcccagauguccauucaacugaucaacaaggcugucaaugcccuuaucaacgaucagcugauuaugaagaaucaccuccgcgacaucauguguauucccuauugcaacuacagcaaauauugguaccugaaucacacaaccacagggaagaccucucugccuaaauguuggcucguguccaacggaagcuaccugaaugaaacgcauuucucugacgauaucgaacagcaagcugacaacaugauuacagagaugcuucagaaggaguauauggaaagacagggcaaaaccccgcuggggcucguggaucuguuugucuucagcaccuccuuuuaccugaucucuaucuuccuucaccucguuaagauucccacacaucggcacaucgugggaaaaagcugcccuaagccccaucgccugaaucacaugggcauuuguuccugcggccuguauaagcagccuggggugcccgucaaauggaagagaugaggacuaguaauaaggaaacuguaugaaugucugugggcaggaagugaagagauccuucuguaaagguuuuuggaauuaugucugcugaauaauaaacuuuuuugaaauaauaaaucugguagaaaaaugagaucucaaaggcucuuuucagagccaccaaaaaaaaaaaaaaaaaaaaaaaaaaaaaaaaaaaaaaaaaaaaaaaaaaaaaaaaaaaaaaaaagaauu

SEQ ID NO: 29084 - RNA, 1781 nt, Artificial Sequence
  mRNA product Design b-4 (hSL-A64-N5) comprising derived and/or modified sequence from LASV(G1442-SLE-2011;Clade IV)__AIT17180__GPCmut5 (opt5)
aggagagucccgcagucggcguccagcggcucugcuuguucgugugugugucguugcaggccuuauucaagcuuaccaugggccagaucgugaccuucuuucaagaggucccccacguuauugaagaggugaugaacaucgugcugauugcccucagcauccuggcuguccuuaaggggcuguacaauguggccacaugcggacucauuggccugguuacguuccuucugcucugugggagauccugcaccacaacccuguauaaaggaguguacgaacugcagacacucgagcugaacauggaaacccuuaauaugacaaugccucugucuuguaccaagaacaauagccaucacuauauccgggucggcaacgagacggggcucgagcugacccuuacaaauaccuccaucauuaaccauaaauuuugcaaucugucugacgcgcacaagaaaaaccucuacgaucaugcucugaugagcaucauuuccacauuccaccugucuaucccgaauuuuaaccaguaugaagccaugagcugugacuucaauggaggcaagauuuccgugcaguacaaccucagccacucuuaugccggcgaugcugccaaucauugcgggaccguugcuaacggagugcugcaaacguuuaugcgcauggccuggggcggguccuacaucgcgcuugacagcggauguggcaacugggauugcauuaugacaucuuaccaguaucugaucauccagaauaccacaugggacgaucacugucaguucuccagacccagcccuauuggguaccucggacugcuuucucaacggacccgcgacgucuauaucuccagacggcugcucggcaccuuuacauggacgcugagcgauuccgagggcaaggacacccccgggggauacugccugacacgcuggaugcucauugaagccgagcugaaauguuucggcaacaccgcuguggccaagugcaaugagaaacaugaugaagaguuuugcgacaugcuuagacuguucgauuuuaacaagcaggcuauccagcggcucaaagccccugcgcagaugucuauucaacugaucaauaaggccgugaacgcucuuaucaaugaccagcugauuaugaagaaccaccuccgcgacaucauguguauucccuauugcaauuacagcaaauauugguaccugaacaauacagccaccgggaagacgucccugccuaaauguuggcucaucagcaacggaucuuaccugaaugaaacacacuucuccgaugacauugagcaggaagcugauaacaugaucaccgagaugcuucaaaaggaguauauggaaagacagggcaaaaccccgcuggggcucgucgaccuguucguuuuuagcacaucuuucuaccugaucagcauuuuucuucaucucgugaagauccccacccaccggcauauugugggaaaauccugcccuaagccccaccgccugaaucauaugggcaucuguucuugcggccuguauaagcagccugggguccccgugagauggaaacggugaggacuaguaauaaggaaacuguaugaaugucugugggcaggaagugaagagauccuucuguaaagguuuuuggaauuaugucugcugaauaauaaacuuuuuugaaauaauaaaucugguagaaaaaugagaucucaaaggcucuuuucagagccaccaaaaaaaaaaaaaaaaaaaaaaaaaaaaaaaaaaaaaaaaaaaaaaaaaaaaaaaaaaaaaaaaagaauu

SEQ ID NO: 29085 - RNA, 1781 nt, Artificial Sequence
  mRNA product Design b-4 (hSL-A64-N5) comprising derived and/or modified sequence from LASV(G3010-SLE-2013;Clade IV)__AIT17344__GPCmut5 (opt5)
aggagagucccgcagucggcguccagcggcucugcuuguucgugugugugucguugcaggccuuauucaagcuuaccaugggccagaucgugaccuucuuucaagaggucccccacguuauugaagaggugaugaacaucgugcugauugcccucagcauccuggcuguccuuaaggggcuguacaauuucgccacaugcggacucgugggccugguuacguuucuucugcucugugggagauccugcaccacaucucuguauaaaggaguguacgaacugcagacccucgagcugaacauggaaacacuuaauaugaccaugccucugagcuguacaaagaacaauucccaucacuauauuauggucggcaacgagaccgggcucgagcugacgcuuaccaauacaucuaucaucaaccauaaauucugcaaucugagcgacgcgcacaagaaaaaccucuacaaucaugcucugauguccauuaucucuaccuuucaccugagcauuccgaacuucaaucaguaugaagccauguccugugauuuuaacggaggcaagaucagcgugcaguacaaucucucucacuccuaugccggcgacgcugccagccauugcgggacaguugcuaacggagugcugcaaaccuucaugcggauggccuggggcgggucuuacauugcgcuugauuccggauguggcaagugggacugcaucaugacgagcuaccaguaucugauuauccagaacacaaccugggaggaucacugucaguuuucucgccccuccccuaucggguaccucggacugcuuagccaaagaacacgggacauuuauaucucccgcagacugcucggcaccuucaccuggacacugucugauagcgaaggcaaagacacgcccgggggauacugccugacccgguggaugcucauugaggccgagcugaaguguuuuggcaauacagcugucgccaaaugcaacgaaaagcaugaugaggaguucugcgacaugcuucgccuguuugauuucaauaaacaggcuauccagagacucaagaccccugcccagauguccauucaacugaucaacaaggcggugaaugcccuuaucaacgaccagcugauuaugaaaaaucaccuccgggauaucauguguauucccuauugcaacuacagcaaguauugguaccugaaucacacaaccacggggaaaacaucucugccuaaguguuggcucguguccaacggaagcuaccugaaugaaacccauuucucugacgacaucgaacagcaagcugauaacaugauuaccgagaugcuucagaaagaguauauggaacgccagggcaagacaccgcuggggcucgucgaccuguuuguuuucagcaccuccuuuuaccugaucucuaucuuccuucaccucgugaaaauucccacacauagacacaucgugggaaagagcugcccuaagccccaucggcugaaucacaugggcauuuguuccugcggccuguauaaacagccugggguccccgugcgcuggaagagaugaggacuaguaauaaggaaacuguaugaaugucugugggcaggaagugaagagauccuucuguaaagguuuuuggaauuaugucugcugaauaauaaacuuuuuugaaauaauaaaucugguagaaaaaugagaucucaaaggcucuuuucagagccaccaaaaaaaaaaaaaaaaaaaaaaaaaaaaaaaaaaaaaaaaaaaaaaaaaaaaaaaaaaaaaaaaagaauu

SEQ ID NO: 29086 - RNA, 1781 nt, Artificial Sequence
  mRNA product Design b-4 (hSL-A64-N5) comprising derived and/or modified sequence from LASV(G502-SLE-2009;Clade IV)__AIT17126__GPCmut5 (opt5)
aggagagucccgcagucggcguccagcggcucugcuuguucgugugugugucguugcaggccuuauucaagcuuaccaugggccagaucgugaccuucuuucaagaggucccccacguuauugaagaggugaugaacaucgugcugauugcccucagcauccuggcuguccuuaaggggcuguacaauuucgccacaugcggacucgugggccugcuuacguuucugcuccugugugggagauccugcaccacaggacuguauaaaggcguuuacgaacuccagacccuggagcuuaacauggaaacacugaauaugaccaugccucucucuuguacaaagaacaauagccaucacuauauuaugguggggaacgagaccggacuggagcuuacgcugaccaauacauccaucaucaaccauaaauucugcaaucucucugacgcgcacaagaaaaaccuguacgaucaugcucugaugagcauuaucuccaccuuucaccucucuauuccgaauuucaaccaguaugaagccaugagcugugacuuuaauggcggcaagaucuccguccaguacaaccugagccacucuuaugccggggaugcugccgaccauugcggaacaguggcuaauggcguucuucaaaccuucaugcggauggccuggggaggguccuacauugcgcuggauagcggcugugggcgcugggacugcaucaugacgucuuaccaguaucucauuauccagaacacaaccugggaggaucacugucaguuuuccagacccagcccuaucggauaccugggccuucugucucaacggacacgcgacauuuauaucuccagacggcuccugggcaccuucaccuggacacugagcgauuccgaagggaaggacacgcccggaggcuacugccucacccgcuggaugcugauugaggccgagcuuaaauguuuugggaacacagcuguggccaagugcaaugaaaaacaugaugaggaguucugcgacaugcugagacucuuugauuucaacaagcaggcuauccagcggcugaaagccccugcgcagaugucuauucaacuuaucaauaaggccgucaacgcucugaucaaugaccagcucgugaugaagaaccaucugcgcgacauuauguguauccccuauugcaauuacagcagauauugguaccugaaccacaccacaaccggacggacgucccucccuaaauguuggcuggugagcaauggcucuuaccuuaacgaaacacacuucuccgaugacauugaacagcaagccgauaauaugaucaccgagaugcugcagaaggaguauauggaacgccaggggaaaaccccgcucggacuggucgaccuguuuguuuucagcacaucuuuuuaccuuauuagcaucuuccuccaccuggugaagauccccacccauagacacauugugggcaaauccugcccuaagccccaucggcugaaccacaugggcaucuguucuugcgggcucuauaaacagccuggaguccccgugaaguggaagcgcugaggacuaguaauaaggaaacuguaugaaugucugugggcaggaagugaagagauccuucuguaaagguuuuuggaauuaugucugcugaauaauaaacuuuuuugaaauaauaaaucugguagaaaaaugagaucucaaaggcucuuuucagagccaccaaaaaaaaaaaaaaaaaaaaaaaaaaaaaaaaaaaaaaaaaaaaaaaaaaaaaaaaaaaaaaaaagaauu

SEQ ID NO: 29087 - RNA, 1781 nt, Artificial Sequence
  mRNA product Design b-4 (hSL-A64-N5) comprising derived and/or modified sequence from LASV(G733-SLE-2010;Clade IV)__AIT17154__GPCmut5 (opt5)
aggagagucccgcagucggcguccagcggcucugcuuguucgugugugugucguugcaggccuuauucaagcuuaccaugggccagaucgugaccuucuuucaagaggucccccacguuauugaagaggugaugaacaucgugcugauugcccucagcauccuggcuguccuuaaggggcuguacaauuucgccacaugcggaauugugggccucguuuccuuucugcuucugugugggagaucuugcacgaccagccucuauaaaggaguguacgaacugcagacacuggagcucaacauggaaacccugaauaugacaaugccucuuuccuguaccaagaacaauucucaucacuauaucauggucggcaacgagacagggcuggagcucacccugacgaauaccagcaucauuaaccauaaauucugcaaucuuuccgacgcgcacaagaaaaaccuguacgaucaugcucucaugucuaucauuagcacauuucaccuguccaucccgaauuucaaccaguaugaagccaugagcugugacuuuaauggaggcaagauuucugugcaguacaaccugucccacagcuaugccggcgaugcugccaaucauugcgggaccaucgcuaacggaguucuccaaacauucaugcggauggccuggggcgggucuuacauugcgcuggacuccggaugugaucgcugggacugcaucaugaccagcuaccaguaucuuaucauucagaacacgacaugggaggaucacugucaguuuucuagacccuccccuaucggcuaccuggggcuccugagccaacggacccgcgacauuuauaucuccagacggcuucugggaacauucaccuggacccucucugauagcgaaggcaaggacacacccggcggguacugccugacgcgcuggaugcugauugaggccgagcucaaauguuuuggaaauaccgcuguggccaagugcaacgaaaaacaugaugaggaguucugcgacaugcugagacuuuuugauuucaauaagcaggcuauccagcggcugaaagccccugcgcagauguccauccaacucauuaacaaggccgucaaugcucugaucaacgaccagcuuauuaugaagaaucaucugcgcgacaucauguguauucccuauugcaacuacagcaaauauugguaccucaaucacacaaccacaggcaagaccucucugccuaaauguuggcugguguccaacgggagcuaccucaaugaaacgcacuucucugaugacaucgaacagcaagccgauaacaugaucacagagaugcugcagaaggaguauauggaaagacagggaaaaaccccgcuuggccugguggaccucuuugucuucagcaccuccuuuuaccugauuucuaucuuccugcaccuuguuaagauucccacacaucggcacgugguggggaaaagcugcccuaagccccaucgccucaaucacaugggaaucuguuccugcggccuguauggccagccugggguccccgugaaguggaaaagaugaggacuaguaauaaggaaacuguaugaaugucugugggcaggaagugaagagauccuucuguaaagguuuuuggaauuaugucugcugaauaauaaacuuuuuugaaauaauaaaucugguagaaaaaugagaucucaaaggcucuuuucagagccaccaaaaaaaaaaaaaaaaaaaaaaaaaaaaaaaaaaaaaaaaaaaaaaaaaaaaaaaaaaaaaaaaagaauu

SEQ ID NO: 29088 - RNA, 1781 nt, Artificial Sequence
  mRNA product Design b-4 (hSL-A64-N5) comprising derived and/or modified sequence from MOPV/LASV reassortant(IGS-1;Clade IV)__AFY05576__GPCmut5 (opt5)
aggagagucccgcagucggcguccagcggcucugcuuguucgugugugugucguugcaggccuuauucaagcuuaccaugggccagaucgugaccuucuuucaagaggucccccacguuauugaagaggugaugaacaucgugcugauugcccucagcguccuggcugugcuuaaggggcuguacaauuucgccacaugcggacucguuggccuggugacguuucuucugcucugugggagauccugcaccacaucucuguauaaaggagucuacgaacugcagacccucgagcugaacauggaaacacuuaauaugaccaugccucugagcuguacaaagaacaauucccaucacuauaucauggugggcaacgagaccgggcucgagcugacgcuuaccaauacaucuauuaucaaccauaaauucugcaaucugagcgacgcgcacaagaaaaaccucuacgaucaugcucugauguccaucauuucuaccuuucaccugagcaucccgaauuucaaccaguaugaagccauguccugugacuuuaauggaggcaagauuagcguucaguacaaccucucucacuccuaugccggcgaugcugccaaucauugcgggacaguggcuaacggaguccugcaaaccuucaugcggauggccuggggcgggagcuacaucgcgcuugacucuggauguggcaacugggauugcauuaugacguccuaccaguaucugaucauucagaauacaaccugggaggaccacugucaguuuagccgccccucuccuaucggguaccucggacugcuuucccaaagaacacgggauaucuauauuagccgcagacugcucggcaccuucaccuggacacuguccgacucugaaggcgaggauacgcccgggggauacugccugacccgguggaugcucaucgaggccgaacugaaguguuuuggcaacacagcuguggccaaaugcaaugagaagcaugacgaagaguucugcgauaugcuucgccuguuugacuucaacaaacaggcuauucagagacucaaggccccugcgcagaugagcauccaacugauuaauaaagccgugaacgcucuuaucaaugaucagcugaucaugaagaaccaccuccgggacauuauguguauccccuauugcaauuacuccaaguauugguaccugaaccacaccacaaccgggcgcacgagccugccuaaauguuggcucgucucuaauggauccuaccugaacgaaacacauuucagcgacgauauugagcagcaagccgacaauaugaucaccgagaugcuucagaaggaauauauggagagacagggcaaaaccccgcuggggcucguugaucuguuuguguucucuaccagcuuuuaccugauuuccaucuuccuucaccucgugaagauccccacacaucggcacauugucggaaaaucuugcccuaagccccaucgccugaaccacaugggcaucuguagcugcggccuguauaaacagccuggggugcccguuaaguggaagagaugaggacuaguaauaaggaaacuguaugaaugucugugggcaggaagugaagagauccuucuguaaagguuuuuggaauuaugucugcugaauaauaaacuuuuuugaaauaauaaaucugguagaaaaaugagaucucaaaggcucuuuucagagccaccaaaaaaaaaaaaaaaaaaaaaaaaaaaaaaaaaaaaaaaaaaaaaaaaaaaaaaaaaaaaaaaaagaauu

SEQ ID NO: 29089 - RNA, 1781 nt, Artificial Sequence
  mRNA product Design b-4 (hSL-A64-N5) comprising derived and/or modified sequence from LASV(LM765-SLE-2012;Clade IV)__AIT17814__GPCmut5 (opt5)
aggagagucccgcagucggcguccagcggcucugcuuguucgugugugugucguugcaggccuuauucaagcuuaccaugggccagaucgugaccuucuuucaagaggucccccacguuauugaagaggugaugaacaucgugcugauugcccucagcauccuggcuguccuuaaggggcuguacaauuucgccacaugcggacucgugggccugguuacguuucuucugcucugugggagauccugcaccacaucucuguauaaaggaguguacgaacugcagacccucgagcugaacauggaaacacuuaauaugaccaugccucugagcuguacaaagaacaauucccaucacuauauuauggucggcaacgagaccgggcucgagcugacgcuuaccaauacaucuaucaucgaccauaaauucugcaaccugagcgaugcgcaccggaagaaucucuacgaccaugcucugauguccauuaucucuaccuuucaccugagcauuccgaacuucaaucaguaugaagccauguccugugauuuuaacggaggcaaaaucagcgugcaguacaaucucucucacuccuaugccaaggacgcugccgaucauugcggcacaguugcuaacggggugcugcaaaccuucaugcgcauggccuggggaggcagcuacauugcgcuugacucuggguguggaagaugggauugcaucaugacguccuaccaguaucugauuauccagaauacaaccugggaggaccacugucaguuuagccggcccucuccuaucggcuaccucgggcugcuuucccaacgcacaagagauauuuauaucagccggcgccugcucggaaccuucaccuggacacuguccgacucugaaggcaaggauacgcccggcggguacugccugaccagauggaugcucauugaggccgagcugaaauguuuuggaaacacagcugucgccaagugcaacgaaaaacaugacgaggaguucugcgauaugcuucggcuguuugacuucaauaagcaggcuauccagcgccucaaagccccugcgcagaugagcauucaacugaucaacaaggccgugaaugcucuuaucaacgaccagcugauuaugaagaaucaccucagagauaucauguguauucccuauugcaacuacuccaaauauugguaccugaaucacaccacaaccggcaagacgagccugccuaaauguuggcucgugucuaacggguccuaccugaaugaaacacauuucagcgacgauaucgaacagcaagccgacaacaugauuaccgagaugcuucagaaggaguauauggaacggcagggaaaaaccccgcugggccucgucgaucuguuuguuuucucuaccagcuuuuaccugaucuccaucuuccuucaccucgugaagauucccacacaucgccacaucguggggaaaccuugccccaagccucauagacugaaucacaugggaauuuguucuugcggccuguauaagcagcccggcgucccggugaaauggaagcggugaggacuaguaauaaggaaacuguaugaaugucugugggcaggaagugaagagauccuucuguaaagguuuuuggaauuaugucugcugaauaauaaacuuuuuugaaauaauaaaucugguagaaaaaugagaucucaaaggcucuuuucagagccaccaaaaaaaaaaaaaaaaaaaaaaaaaaaaaaaaaaaaaaaaaaaaaaaaaaaaaaaaaaaaaaaaagaauu

SEQ ID NO: 29090 - RNA, 1781 nt, Artificial Sequence
  mRNA product Design b-4 (hSL-A64-N5) comprising derived and/or modified sequence from LASV(LM776-SLE-2012;Clade IV)__AIT17824__GPCmut5 (opt5)
aggagagucccgcagucggcguccagcggcucugcuuguucgugugugugucguugcaggccuuauucaagcuuaccaugggccagaucgugaccuucuuucaagaggucccccacguuauugaagaggugaugaacaucgugcugauugcccucagcauccuggcuguccuuaaggggcuguacaauuucgccacaugcggacucgugggccugguuacguuucuucugcucugugggagauccugcaccacaucuguguauaaaggagucuacgaacugcagacccuggagcucaacauggaaacacugaauaugaccaugccucuuagcuguacaaagaacaauucccaucacuauauuauggugggcaacgagaccgggcuggagcucacgcugaccaauacaucuaucaucaaccauaaauucugcaaucuuagcgacgcgcacaagaaaaaccuguacgaucaugcucucauguccauuaucucuaccuuucaccugagcauuccgaauuucaaccaguaugaagccauguccugugacuuuaauggaggcaagaucagcguucaguacaaccugucucacuccuaugccggcgaugcugccaaucauugcgggacaguggcuaacggaguccuccaaaccuucaugcggauggccuggggcgggagcuacauugcgcuggacucuggauguggcaagugggauugcaucaugacguccuaccaguaucuuauuauccagaacacaaccugggaggaccacugucaguuuagccgccccucuccuaucggguaccugggacuccugucccaaagaacacgggauauuuauaucagccgcagacuucugggcaccuucaccuggacacucuccgacucugaaggcaaagauacgcccgggggauacugccugacccgguggaugcugauugaggccgagcucaaguguuuuggcaauacagcuguggccaaaugcaacgaaaagcaugacgaggaguucugcgauaugcugcgccuuuuugacuucaauaaacaggcuauccagagacugaaggccccugcgcagaugagcauucaacucaucaacaaggccgugaaugcucugaucaacgaucagcuuauuaugaaaaaucaucugcgggacaucauguguauucccuauugcaacuacuccaaguauugguaccucaaucacaccacaaccgggaaaacgagccugccuaaguguuggcuggucucuaacggauccuaccucaaugaaacacacuucagcgacgauaucgaacagcaagccgacaacaugauuaccgagaugcugcagaaagaguauauggaacgccagggcaagaccccgcuugggcugguugaucucuuuguguucucuaccagcuuuuaccugaucuccaucuuccugcaccuugugaaaauucccacacauagacacaucgucggaaagucuugcccuaagccccaucggcucaaucacaugggcauuuguagcugcggccuguauaaacagccuggggugcccguucgcuggaagagaugaggacuaguaauaaggaaacuguaugaaugucugugggcaggaagugaagagauccuucuguaaagguuuuuggaauuaugucugcugaauaauaaacuuuuuugaaauaauaaaucugguagaaaaaugagaucucaaaggcucuuuucagagccaccaaaaaaaaaaaaaaaaaaaaaaaaaaaaaaaaaaaaaaaaaaaaaaaaaaaaaaaaaaaaaaaaagaauu

SEQ ID NO: 29091 - RNA, 1781 nt, Artificial Sequence
  mRNA product Design b-4 (hSL-A64-N5) comprising derived and/or modified sequence from LASV(Mad39;Clade IV)__ANH09722__GPCmut5 (opt5)
aggagagucccgcagucggcguccagcggcucugcuuguucgugugugugucguugcaggccuuauucaagcuuaccaugggccagaucgugaccuucuuucaagaggucccccacguuauugaagaggugaugaacaucgugcugauugcccucagcauccuggcuguccuuaaggggcuguacaauguggccacaugcggacucauuggccugguuacguuccuucugcucugugggagauccugcaccacaacccuguauaaaggaguguacgaacugcaggcgcucgagcugaacauggaaacacuuaauaugaccaugccucugucuuguacaaagaacaauagccaucacuauauccgggucggcaacgagaccgggcucgagcugacgcuuaccaauacaucccugaucaaccauaaauuuugcaaucucucugacgcucacaagaaaaaccuguacgaucaugcccugaugagcauuaucuccaccuuccaccucucuauuccgaauuuuaaccaguaugaagccaugagcugugacuucaaugauggaaagaucuccgugcaguacaaccugagccacacauaugcuggcgacaccgccaaucauugcggcacgguugcuaacggggugcuucaaacauuuaugcgcauggccuggggaggcucuuacauugcgcuggauuccggguguggaggcugggacugcaucaugaccagcuaccaguaucucauuauccagaacacaaccugggaggaucacugucaguucucuagacccuccccuaucggguaccugggacuucugagccaacggacccgcgacauuuauaucucuagacggcuccugggcacauuuacguggacccuguccgauagcgaaggcaaggacacacccgggggauacugccucacccgcuggaugcugauugaggccgagcuuaaauguuucggcaauacagcugucgccaagugcaacgaaaaacaugaugaggaauuuugcgacaugcugagacucuucgauuuuaauaagcaggcuauccagcggcugaaagccccugcgcagauguccauucaacuuaucaacaaggccgugaaugcucugaucaacgaccagcucauuaugaagaaucaucugcgcgacaucauguguauucccuauugcaacuacucuaaauauugguaccugaaucacaccgugacggggaagacaagccucccuaaauguuggcuggucuccaacggaagcuaccuuaaugagacccacuucucugaugacaucgaacagcaagccgauaacaugauuaccgagaugcugcagaaggaguauauggaaagacagggcaaaacaccgcucgggcugguugaccuguucguguuuuccaccagcuucuaccuuaucucuaucuuucuccaccuggugaagauucccacacaucggcacgucgugggaaaaccuugccccaagccucaucgccugaaucacaugggcaucuguagcugcggcuucuauaagcagcccgggguuccggugagauggaaacggugaggacuaguaauaaggaaacuguaugaaugucugugggcaggaagugaagagauccuucuguaaagguuuuuggaauuaugucugcugaauaauaaacuuuuuugaaauaauaaaucugguagaaaaaugagaucucaaaggcucuuuucagagccaccaaaaaaaaaaaaaaaaaaaaaaaaaaaaaaaaaaaaaaaaaaaaaaaaaaaaaaaaaaaaaaaaagaauu

SEQ ID NO: 29092 - RNA, 1781 nt, Artificial Sequence
  mRNA product Design b-4 (hSL-A64-N5) comprising derived and/or modified sequence from LASV(Z0947-SLE-2011;Clade IV)__AIT17840__GPCmut5 (opt5)
aggagagucccgcagucggcguccagcggcucugcuuguucgugugugugucguugcaggccuuauucaagcuuaccaugggccagaucgugaccuucuuucaagaggucccccacguuauugaagaggugaugaacaucgugcugauugcccucagcauccuggcuguccuuaaggggcuguacaauuucgccacaugcggacucgugggccugguuacguuucuucugcucugugggagauccugcaccauuucucuguauaaaggaguguacgaacugcagacacucgagcugaacauggaaacccuuaauaugacaaugccucugagcuguaccaagaacaauucccaucacuauaucauggucggcaacgagacagggcucgagcugacccuuacgaauaccucuaucauuaaccauaaauucugcaaucugagcgacgcgcacaagaaaaaccucuacgaucaugcucugauguccaucauuucuacauuucaccugagcaucccgaauuucaaccaguaugaagccauguccugugacuuuaauggaggcaagauuagcgugcaguacaaccucucucacuccuaugccggcgaugcugccaaucauugcgggaccguugcuaacggagugcugcaaacauucaugcggauggccuggggcgggagcuacaucgcgcuugacucuggaugugaucgcugggacugcauuaugaccuccuaccaguaucugaucauccagaacacgacaugggaggaucacugucaguuuagcagacccucuccuauuggcuaccucgggcugcuuucccaacggacccgcgacaucuauauuagcagacggcugcucggaacauucaccuggacccuguccgauucugaaggcaaggacacacccggcggguacugccugacgcgcuggaugcucaucgaggccgagcugaaauguuuuggaaauaccgcugucgccaagugcaacgaaaaacaugaugaggaguucugcgacaugcuuagacuguuugauuucaauaagcaggcuauucagcggcucaaagccccugcgcagaugagcauccaacugaucaacaaggccgugaaugcucuuauuaacgaccagcugaucaugaagaaucaccuccgcgacauuauguguauccccuauugcaacuacuccaaauauugguaccugaaucacacaaccacaggcaagaccagccugccuaaauguuggcucgugucuaacggguccuaccugaaugaaacgcauuucagcgaugacauugaacagcaagccgauaacaugaucacagagaugcuucagaaggaguauauggaaagacagggaaaaaccccgcugggccucgucgaccuguuuguuuucucuaccagcuuuuaccugaucuccauuuuccuucaccucgugaagauccccacacaucggcacauuguggggaaaccuugccccaagccucaucgccugaaucacaugggaaucuguucuugcggccuguauaagcagcccggcgucccggugaaauggaagagaugaggacuaguaauaaggaaacuguaugaaugucugugggcaggaagugaagagauccuucuguaaagguuuuuggaauuaugucugcugaauaauaaacuuuuuugaaauaauaaaucugguagaaaaaugagaucucaaaggcucuuuucagagccaccaaaaaaaaaaaaaaaaaaaaaaaaaaaaaaaaaaaaaaaaaaaaaaaaaaaaaaaaaaaaaaaaagaauu

SEQ ID NO: 29093 - RNA, 1812 nt, Artificial Sequence
  mRNA product Design b-4 (hSL-A100) comprising derived and/or modified sequence from LASV(Josiah;Clade IV)__NP_694870__GPCmut5 (opt1)
aggagagucccgcagucggcguccagcggcucugcuuguucgugugugugucguugcaggccuuauucaagcuuaccaugggccagaucgugaccuucuuccaggaggucccccacgugaucgaggaggugaugaacaucguccugaucgcccucagcgugcuggccgugcugaaggggcucuacaacuucgcgaccugcggccuggucgggcuggugacguuccuccugcugugcggccgcuccugcaccaccagccucuacaaggggguguacgagcugcagacccuggagcucaacauggagacgcugaacaugaccaugccgcuguccugcaccaagaacaacagccaccacuacaucauggucggcaacgagaccggccucgagcugacgcugaccaacaccuccaucaucaaccacaaguucugcaaccucagcgacgcccacaagaagaaccuguacgaccacgcccugauguccaucaucagcaccuuccaccucuccauccccaacuucaaccaguacgaggccaugagcugcgacuucaacgggggcaagaucuccgugcaguacaaccugagccacuccuacgccggggacgcggccaaccacugcggcacgguggccaacgggguccugcagaccuucaugcggauggccuggggcggcagcuacaucgcgcucgacuccgggugcggcaacugggacugcaucaugaccagcuaccaguaccugaucauccagaacaccacgugggaggaccacugccaguucucccggcccagccccaucggguaccugggccuccugucccagcgcacccgggacaucuacaucagccgccggcugcucggcaccuucaccuggacgcugagcgacuccgaggggaaggacaccccgggcggguacugccugacccgcuggaugcucaucgaggccgagcugaagugcuucggcaacaccgccguggccaagugcaacgagaagcacgacgaggaguucugcgacaugcugcggcuguucgacuucaacaagcaggccauccagcgccugaaggcgcccgcccagaugagcauccagcugaucaacaaggccgugaacgcccucaucaacgaccagcugaucaugaagaaccaccuccgggacaucaugugcauccccuacugcaacuacuccaaguacugguaccucaaccacacgaccaccggccgcaccagccugcccaagugcuggcuggucuccaacggcagcuaccucaacgagacgcacuucuccgacgacaucgagcagcaggccgacaacaugaucaccgagaugcugcagaaggaguacauggagcggcaggggaagacgccccugggccucguggaccuguucguguucagcaccuccuucuaccugaucagcaucuuccugcaccucgucaagaucccgacccaccgccacaucguggggaaguccugccccaagccccaccggcugaaccacaugggcaucugcagcugcgggcuguacaagcagcccggcgugccggucaaguggaagcgcugaggacuaguaauaaggaaacuguaugaaugucugugggcaggaagugaagagauccuucuguaaagguuuuuggaauuaugucugcugaauaauaaacuuuuuugaaauaauaaaucugguagaaaaaugagaucucaaaggcucuuuucagagccaccaaaaaaaaaaaaaaaaaaaaaaaaaaaaaaaaaaaaaaaaaaaaaaaaaaaaaaaaaaaaaaaaaaaaaaaaaaaaaaaaaaaaaaaaaaaaaaaaaaaaa

SEQ ID NO: 29094 - RNA, 1809 nt, Artificial Sequence
  mRNA product Design b-4 (hSL-A100) comprising derived and/or modified sequence from LASV(LP;Clade I)__AAF86701__GPCmut5 (opt1)
aggagagucccgcagucggcguccagcggcucugcuuguucgugugugugucguugcaggccuuauucaagcuuaccaugggccagaucaucaccuucuuccaggaggugccccacgucaucgaggaggugaugaacaucgugcugaucgcccucagccugcuggccauccucaaggggcuguacaacaucgcgaccugcggcaucaucgggcuggucgccuuccucuuccugugcggcaaguccugcagccugacgcucaagggcggguacgagcugcagacccuggagcucaacauggagacccugaacaugaccaugccgcuguccugcacgaagaacagcucccaccacuacauccgcgugggcaacgagaccgggcucgagcugacccugaccaacacgagcaucaucaaccacaaguucugcaaccucuccgacgcccacaagaagaaccuguacgaccacgcccugaugagcaucaucuccaccuuccaccucagcauccccaacuucaaccaguacgaggccauguccugcgacuucaacggcgggaagaucagcgugcaguacaaccugucccacagcuacgcgggcgacgccgccgagcacugcgggaccgucgccaacggcgugcugcagaccuucaugcggauggcguggggcgggcgcuacaucgcccucgacuccggcugcgggaacugggacugcaucaugacgagcuaccaguaccugaucauccagaacaccaccugggaggaccacugccaguucucccggcccagccccaucggcuaccugggccuccugucccagcgcacccgggacaucuacaucagccgccggcugcucgggacguucaccuggacccugagcgacuccgagggcaacgagacccccgggggcuacugccugacgcgcuggaugcucaucgaggccgagcugaagugcuucgggaacaccgccguggccaagugcaacgagaagcacgacgaggaguucugcgacaugcugcggcuguucgacuucaacaagcaggcgauccgccggcugaaggcccccgcccagaugagcauccagcugaucaacaaggccgucaacgcccucaucaacgaccagcugaucaugaagaaccaccuccgcgacaucaugugcauccccuacugcaacuacuccaaguacugguaccucaaccacaccagcuccggccggaccagccugcccaagugcuggcugaucuccaacgggagcuaccucaacgagacgcaguucuccgacgacaucgagcagcaggcggacaacaugaucaccgagaugcugcagaaggaguacaucgagcgccagggcaagaccccgcuggggcucguggacaucuucaucuucagcaccuccuucuaccugaucagcaucuuccugcaccugaucaagaucccgacgcaccggcacaucgugggcaagcccugccccaagccccaccgccucaaccacaugggggucugcuccugcggccuguacaagcacccgggcgugcccaccaaguggaagcggugaggacuaguaauaaggaaacuguaugaaugucugugggcaggaagugaagagauccuucuguaaagguuuuuggaauuaugucugcugaauaauaaacuuuuuugaaauaauaaaucugguagaaaaaugagaucucaaaggcucuuuucagagccaccaaaaaaaaaaaaaaaaaaaaaaaaaaaaaaaaaaaaaaaaaaaaaaaaaaaaaaaaaaaaaaaaaaaaaaaaaaaaaaaaaaaaaaaaaaaaaaaaaaaaa

SEQ ID NO: 29095 - RNA, 1809 nt, Artificial Sequence
  mRNA product Design b-4 (hSL-A100) comprising derived and/or modified sequence from LASV(803213;Clade II)__AAF86703__GPCmut5 (opt1)
aggagagucccgcagucggcguccagcggcucugcuuguucgugugugugucguugcaggccuuauucaagcuuaccaugggccagaucaucaccuucuuccaggaggugccccacgucaucgaggaggugaugaacaucgugcugaucgcccucagccugcuggccauccucaaggggaucuacaacgucgcgaccugcggccuguucgggcugaucuccuuccuccugcugugcggccgcagcugcuccgugacguacaaggggguguacgagcuccagacccuggagcugaacauggccaaccucaacaugaccaugccgcugagcugcaccaagaacaacucccaccacuacaucauggucggcaacgagacgggccuggagcucacccugaccaacaccagcaucaucaaccacaaguucugcaaccuguccgacgcccacaagaagaaccucuacgaccacgcccugaugagcaucaucuccacguuccaccugagcauccccaacuucaaccaguacgaggccauguccugcgacuucaacgggggcaagaucagcgugcaguacaaccucucccacagcuucgcgguggacgccgccaaccacugcgggaccaucgccaacggcguccugcagaccuucaugcggauggcguggggcggguccuacaucgcccuggacagcggcugcgggaacugggacugcaucaugaccuccuaccaguaccucaucauccagaacacgaccugggaggaccacugccaguucagccgccccucccccaucggcuaccuggggcugcucagccagcggacccgcgacaucuacaucagccggcgccugcugggcaccuucacguggacccucuccgacagcgagggcaacgaggcccccgggggcuacugccugacccgguggaugcugaucgaggccgagcucaagugcuucgggaacaccgccguggcgaagugcaacgagaagcacgacgaggaguucugcgacaugcugcgccuguucgacuucaacaagcaggccaucaagcggcucaagacgcccgcccagauguccauccagcugaucaacaaggccgugaacgcccugaucaacgaccagcucaucaugaagaaccaccuccgcgacaucaugugcauccccuacugcaacuacagccgguacugguaccugaaccacaccgucaccgggaagaccucccugccccgcugcuggcuggugagcaacggcuccuaccugaacgagacgcacuucagcgacgacaucgagcagcaggcggacaacaugaucaccgagaugcuccagaaggaguacauggaccggcagggcaagaccccgcuggggcugguggaccucuucgucuucuccaccagcuucuaccugaucuccaucuuccugcaccuggugaagaucccgacgcaccgccacaucgugggcaagcccugccccaagccccaccggcucaaccacauggggaucugcagcugcggccuguacaagcacccggggguccccgugaaguggaagcgcugaggacuaguaauaaggaaacuguaugaaugucugugggcaggaagugaagagauccuucuguaaagguuuuuggaauuaugucugcugaauaauaaacuuuuuugaaauaauaaaucugguagaaaaaugagaucucaaaggcucuuuucagagccaccaaaaaaaaaaaaaaaaaaaaaaaaaaaaaaaaaaaaaaaaaaaaaaaaaaaaaaaaaaaaaaaaaaaaaaaaaaaaaaaaaaaaaaaaaaaaaaaaaaaaa

SEQ ID NO: 29096 - RNA, 1809 nt, Artificial Sequence
  mRNA product Design b-4 (hSL-A100) comprising derived and/or modified sequence from LASV(GA391;Clade III)__CAA36645__GPCmut5 (opt1)
aggagagucccgcagucggcguccagcggcucugcuuguucgugugugugucguugcaggccuuauucaagcuuaccaugggccagaucgugaccuucuuccaggaggucccccacgugaucgaggaggugaugaacaucguccugaucgcccucagcauccuggccauccugaaggggcucuacaacguggcgaccugcggccugaucgggcuggugacguuccuccugcuguccggccgcagcugcucccucaucuacaaggggaccuacgagcugcagacccuggagcucaacauggagacccugaacaugacgaugccgcugagcugcaccaagaacaacucccaccacuacauccgggucggcaacgagaccggccucgagcugacccugacgaacaccagcauccucaaccacaaguucugcaaccuguccgacgcccacaagcgcaaccuguacgaccacagccucauguccaucaucagcaccuuccaccuguccauccccaacuucaaccaguacgaggccaugagcugcgacuucaacgggggcaagaucaccgugcaguacaaccugucccacagcuucgccguggacgccgcggggcacugcggcacgcucgccaacgggguccugcagaccuucaugcggauggccuggggcggcuccuacaucgcccuggacagcgggugcggcaacugggacugcaucaugaccuccuaccaguaccucaucauccagaacaccacgugggacgaccacugccaguucagccggcccucccccaucggguaccugggccugcucagccagcgcacccgggacaucuacaucagccgccggcugcugggcaccuucaccuggacgcucuccgacagcgaggggaacgagaccccgggcggguacugccugacccgcuggaugcugaucgaggcggagcucaagugcuucggcaacaccgccguggccaagugcaacgagaagcacgacgaggaguucugcgacaugcugcggcuguucgacuucaacaagcaggccauccgccggcucaagacgcccgcccagauguccauccagcugaucaacaaggcggugaacgcccugaucaacgaccagcucaucaugaagaaccaccuccgcgacaucaugugcauccccuacugcaacuacagccgguacugguaccugaaccacaccuccaccggcaagaccagccugccccgcugcuggcugaucuccaacggcagcuaccugaacgagacgaaguucuccgacgacaucgagcagcaggccgacaacaugaucaccgagaugcuccagaaggaguacaucgaccggcaggggaagacgccccugggccuggucgaccuguucguguucagcaccuccuucuaccucaucagcaucuuccugcaccuggugaagaucccgacccaccgccacaucgucgggaagcccugccccaagccccaccggcucaaccacaugggcaucugcuccugcgggcuguacaagcagccgggcgugcccgugcgcuggaagcggugaggacuaguaauaaggaaacuguaugaaugucugugggcaggaagugaagagauccuucuguaaagguuuuuggaauuaugucugcugaauaauaaacuuuuuugaaauaauaaaucugguagaaaaaugagaucucaaaggcucuuuucagagccaccaaaaaaaaaaaaaaaaaaaaaaaaaaaaaaaaaaaaaaaaaaaaaaaaaaaaaaaaaaaaaaaaaaaaaaaaaaaaaaaaaaaaaaaaaaaaaaaaaaaaa

SEQ ID NO: 29097 - RNA, 1812 nt, Artificial Sequence
  mRNA product Design b-4 (hSL-A100) comprising derived and/or modified sequence from LASV(AV;Clade V)__CCA30314__GPCmut5 (opt1)
aggagagucccgcagucggcguccagcggcucugcuuguucgugugugugucguugcaggccuuauucaagcuuaccaugggccagaucgugaccuucuuccaggaggucccccacgugaucgaggaggugaugaacaucguccugaucgcccucagcauccuggccgugcugaaggggcucuacaacaucgcgaccugcggccugaucgggcugaucacguuccuccugcugugcggccgcuccugcagcuccaaccucuacaaggggguguacgagcugcagagccuggaccucaacauggagacccugaacaugaccaugccgcuguccugcaccaagaacaacagccaccacuacauccgggucggcaacgacacgggccucgagcugacccugaccaacaccuccauccucaaccacaaguucugcaaccugagcgacgcccacaagaaggaccuguacgaccacgcccucauguccaucaucagcacguuccaccuguccauccccaacuucaaccaguacgaggccaugagcugcgacuucaacgggggcaagaucuccgugcaguacaaccugagccacuccuacgccaucgacgcggccaaccacugcgggaccguggccaacggcauccuccagaccuucaugcgcauggccuggggcgggagcuacaucgcgcuggacuccggcugcgggaacugggacugcaucaugaccagcuaccaguaccugaucauccagaacacgaccugggagaaccacugccaguucucccgccccagccccaucggcuaccucgggcugcugagccagcggacccgcgacaucuacaucucccggcgccuccugggcaccuucacguggacccugagcgacuccgagggcaacgccacccccgggggcuacugccucacccgguggaugcugaucgaggccgagcugaagugcuucgggaacacggccgucgccaagugcaacgagaagcacgacgaggaguucugcgacaugcuccgccuguucgacuucaacaagcaggcgaucagccggcugaagucccccgcccagaugagcauccagcucaucaacaaggccgugaacgcccugaucaacgaccagcugaucaugaagaaccaccuccgcgacaucaugugcauccccuacugcaacuacuccaaguacugguaccugaaccacaccaucaccgggaagaccagccugcccaagugcuggcucguguccaacggcagcuaccugaacgagacgcacuucuccgacgacaucgagcagcaggccgacaacaugaucaccgagaugcugcagaaggaguacauggagcggcagggcaagaccccgcucgggcuggucgaccuguucguguucagcaccuccuucuaccugaucagcaucuuccuccgccuggugaagaucccgacgcaccggcacaucgucggcaagcccugccccaagccccaccgccugaaccacauggggaucugcuccugcggccucuacaagcagccgggggugcccgugcgguggaagcgcugaggacuaguaauaaggaaacuguaugaaugucugugggcaggaagugaagagauccuucuguaaagguuuuuggaauuaugucugcugaauaauaaacuuuuuugaaauaauaaaucugguagaaaaaugagaucucaaaggcucuuuucagagccaccaaaaaaaaaaaaaaaaaaaaaaaaaaaaaaaaaaaaaaaaaaaaaaaaaaaaaaaaaaaaaaaaaaaaaaaaaaaaaaaaaaaaaaaaaaaaaaaaaaaaa

SEQ ID NO: 29098 - RNA, 1809 nt, Artificial Sequence
  mRNA product Design b-4 (hSL-A100) comprising derived and/or modified sequence from LASV(Togo/2016/7082;Clade VI)__AMR44577__GPCmut5 (opt1)
aggagagucccgcagucggcguccagcggcucugcuuguucgugugugugucguugcaggccuuauucaagcuuaccaugggccagaucaucaccuucuuccaggaggugccccacgucaucgaggaggugaugaacaucgugcugaucgcccucagccugcuggccauccucaagggggucuacaacguggcgaccugcggcaucaucgggcuggugacguuccuguuccucugcggccgcuccugcagccugaucuacaagggguccuacgagcugcagacccucgagcugaacauggagacccugaacaugaccaugccgcucagcugcacgaagaacuccagccaccacuacauccgggucggcaacgagaccggccuggagcugacccucaccaacacguccaucaucaaccacaaguucugcaaccugagcgacgcccacaagcgcaaccuguacgaccacgcccucauguccauccugagcaccuuccaccuguccauccccaacuucaaccaguacgaggccaugagcugcgacuucaacgggggcaagaucuccgugcaguacaaccucagccacgccuacgcgguggacgccgccgagcacugcgggaccgucgccaacggcgugcugcagaccuucaugcggauggcguggggcggguccuacaucgcccuggacagcggcugcgggaacugggacugcaucaugacguccuaccaguaccucaucauccagaacaccaccugggaggaccacugccaguucagccggcccucccccaucggcuaccuggggcugcucagccagcgcacccgggacaucuacaucagccgccggcugcugggcacguucaccuggacccucuccgacagcgagggcaacgagacccccgggggcuacugccugacgcgcuggaugcugaucgaggccgagcucaagugcuucgggaacaccgccguggccaagugcaacgagaagcacgacgaggaguucugcgacaugcugcggcuguucgacuucaacaagcaggcgauccagcgccucaagucccccgcccagaugagcauccagcugaucaacaaggccgucaacgcccugaucaacgaccagcucaucaugaagaaccaccuccgggacaugaugugcauccccuacugcaacuacuccaaguacugguaccugaaccacaccagcuccgggcgcaccagccugcccaagugcuggcugguguccaacggcagcuaccugaacgagacgcacuucuccgacgacaucgagcagcaggccgacaacaugaucaccgagaugcuccagaaggaguacaucgaccggcagggcaagaccccgcuggggcugguggaccucuucgucuucagcaccuccuucuaccugaucagcaucuuccugcaccugaucaagaucccgacgcaccgccacaucgugggcaagcccugccccaagccccaccggcucaaccacauggggaucugcuccugcggccuguacaagcagccgggggugcccacccgcuggaagcggugaggacuaguaauaaggaaacuguaugaaugucugugggcaggaagugaagagauccuucuguaaagguuuuuggaauuaugucugcugaauaauaaacuuuuuugaaauaauaaaucugguagaaaaaugagaucucaaaggcucuuuucagagccaccaaaaaaaaaaaaaaaaaaaaaaaaaaaaaaaaaaaaaaaaaaaaaaaaaaaaaaaaaaaaaaaaaaaaaaaaaaaaaaaaaaaaaaaaaaaaaaaaaaaaa

SEQ ID NO: 29099 - RNA, 1809 nt, Artificial Sequence
  mRNA product Design b-4 (hSL-A100) comprising derived and/or modified sequence from LASV(KAK-428;Clade n.d. (VII))__ANH09740__GPCmut5 (opt1)
aggagagucccgcagucggcguccagcggcucugcuuguucgugugugugucguugcaggccuuauucaagcuuaccaugggccagaucgugaccuucuuccaggaggucccccacgugaucgaggaggugaugaacaucguccugaucgcccucagccugcuggccauccucaaggggcuguacaacuucgcgaccugcggcgugaucgggcugaucacguuccuccugcugugcggccgcuccugcagcgccaccuacaaggggcaguacgagcuccagacccuggagcugaacauggagucccucaacaugaccaugccgcugagcugcacgaagaacaacucccaccacuacauccgggccggcaacaacaccggccuggagcucacccugaccaacacgagcaucaucucccacaaguucugcaaccugagcgacgcccacaagaagaaccucuacgaccacacccugauguccaucaucaccaccuuccaccugagcauccccaacuucaaccaguacgaggccauguccugcgacuucaacgggggcaagaucagcauccaguacaaccucucccacagcuacgcgggggacgccgcccagcacugcggcacgguggccaacgggguccugcagaccuucaugcgcauggcguggggcggcuccuaccuggcccucgacagcgggugccgcggcugggacugcaucaucuccagcuaccaguaccugaucauccagaacaccaccugggacgaccacugccaguucucccggcccagccccaucggguaccugggcuucgugagccagaagacgcgcgacaucuacaucucccggcgccuccugggcaccuucaccuggacccugagcgacuccgaggggcacgacaugccgggcggguacugccucacgcgguggaugcugaucgaggccgaccugaagugcuucggcaacaccgccguggccaagugcaacgagaagcacgacgaggaguucugcgacauguggcgccucuucgacuucaacaagcaggcgauccagcggcugaaggcccccgcccagaugaacauccagcugaucaacaaggccgucaacgcccucaucaacgaccagcugaugaugaagaaccaccuccgcgacaucaugugcauccccuacugcaacuacagcaaguucugguaccugaacaacaccaccacgggccggaccucccugccccgcugcuggcugaucagcaacggcuccuaccucaacgagacccacuucagcgacgacaucgagcagcaggcggacaacaugaucaccgagaugcugcagaaggaguacauggaccggcaggggaagacgccccugggccucguggaccuguucguguucuccaccagcuucuaccugaucaccaucuuccuccaccuggucaagaucccgacccaccgccacaucguggggaagcccugccccaagccccaccggcugaaccacaugggcaucugcuccugcgggcuguacaagcagccgggcgugcccguccgcuggaagcggugaggacuaguaauaaggaaacuguaugaaugucugugggcaggaagugaagagauccuucuguaaagguuuuuggaauuaugucugcugaauaauaaacuuuuuugaaauaauaaaucugguagaaaaaugagaucucaaaggcucuuuucagagccaccaaaaaaaaaaaaaaaaaaaaaaaaaaaaaaaaaaaaaaaaaaaaaaaaaaaaaaaaaaaaaaaaaaaaaaaaaaaaaaaaaaaaaaaaaaaaaaaaaaaaa

SEQ ID NO: 29100 - RNA, 1809 nt, Artificial Sequence; identical to SEQ ID NO: 29094
  mRNA product Design b-4 (hSL-A100) comprising derived and/or modified sequence from LASV(Pinneo-NIG-1969;Clade I)__AIT17836__GPCmut5 (opt1)

SEQ ID NO: 29101 - RNA, 1809 nt, Artificial Sequence
  mRNA product Design b-4 (hSL-A100) comprising derived and/or modified sequence from LASV(ISTH0009-NIG-2011;Clade II)__AIT17404__GPCmut5 (opt1)
aggagagucccgcagucggcguccagcggcucugcuuguucgugugugugucguugcaggccuuauucaagcuuaccaugggccagaucaucaccuucuuccaggaggugccccacgucaucgaggaggugaugaacaucgugcugaucgcccucagccugcuggccauccucaaggggaucuacaacgucgcgaccugcggccuguucgggcugguguccuuccuccugcugugcggccgcagcugcuccacgaccuacaaggggguguacgagcuccagacccuggagcuggacauggccagccucaacaugaccaugccgcuguccugcacgaagaacaacagccaccacuacaucauggucggcaacgagaccggccuggagcucacccugaccaacacguccaucaucaaccacaaguucugcaaccugagcgacgcccacaagaagaaccucuacgaccacgcccugauguccaucaucagcaccuuccaccuguccauccccaacuucaaccaguacgaggccaugagcugcgacuucaacgggggcaagaucuccgugcaguacaaccucagccacgcguacgccguggacgccgccaaccacugcgggaccaucgcgaacggcguccugcagaccuucaugcggauggccuggggcggguccuacaucgcccuggacagcggcugcggguccugggacugcaucaugacgagcuaccaguaccucaucauccagaacaccaccugggaggaccacugccaguucucccgccccagccccaucggcuaccuggggcugcucagccagcggacccgcgacaucuacaucucccggcgccugcugggcacguucaccuggacccucagcgacuccgagggcaacgagacccccgggggcuacugccugacgcgguggaugcugaucgaggccgagcucaagugcuucgggaacaccgccguggcgaagugcaacgagaagcacgacgaggaguucugcgacaugcugcgccuguucgacuucaacaagcaggccauccggcgccucaagacccccgcccagaugagcauccagcugaucaacaaggccgugaacgcccugaucaacgaccagcucaucaugaagaaccaccuccgggacaucaugugcaucccguacugcaacuacuccaaguacugguaccugaaccacaccgucacggggaagaccagccugccccgcugcuggcugguguccaacggcagcuaccugaacgagacccacuucuccgacgacaucgagcagcaggcggacaacaugaucaccgagcuccugcagaaggaguacauggaccggcagggcaagacgccccuggggcucguggaccuguucgucuucagcaccuccuucuaccugaucagcaucuuccugcaccucaucaagaucccgacccaccgccacaucaccggcaagcccugccccaagccccaccggcugaaccacauggggaucugcuccugcggccuguacaagcacccgggggugcccgugaaguggaagcgcugaggacuaguaauaaggaaacuguaugaaugucugugggcaggaagugaagagauccuucuguaaagguuuuuggaauuaugucugcugaauaauaaacuuuuuugaaauaauaaaucugguagaaaaaugagaucucaaaggcucuuuucagagccaccaaaaaaaaaaaaaaaaaaaaaaaaaaaaaaaaaaaaaaaaaaaaaaaaaaaaaaaaaaaaaaaaaaaaaaaaaaaaaaaaaaaaaaaaaaaaaaaaaaaaa

SEQ ID NO: 29102 - RNA, 1809 nt, Artificial Sequence
  mRNA product Design b-4 (hSL-A100) comprising derived and/or modified sequence from LASV(ISTH2010-NIG-2012;Clade II)__AIT17482__GPCmut5 (opt1)
aggagagucccgcagucggcguccagcggcucugcuuguucgugugugugucguugcaggccuuauucaagcuuaccaugggccagaucaucaccuucuuccaggaggugccccacgucaucgaggaggugaugaacaucgugcugaucgcccucagccugcuggccauccucaaggggaucuacaacgucgcgaccugcggccuguucgggcugguguccuuccuccugcugugcggccgcagcugcuccacgaccuacaaggggguguacgagcuccagacccuggagcuggacauggccagccucaacaugaccaugccgcuguccugcacgaagaacaacagccaccacuacaucauggucggcaacgagaccggccuggagcucacccugaccaacacguccaucaucaaccacaaguucugcaaccugagcgacgcccacaagaagaaccucuacgaccacgcccugauguccaucaucagcaccuuccaccuguccauccccaacuucaaccaguacgaggccaugagcugcgacuucaacgggggcaagaucuccgugcaguacaaccucagccacgcguacgccguggacgccgccaaccacugcgggaccaucgcgaacggcguccugcagaccuucaugcggauggccuggggcggguccuacaucgcccuggacagcggcugcggguccugggacugcaucaugacgagcuaccaguaccucaucauccagaacaucaccugggaggaccacugccaguucucccgccccagccccaucggcuaccuggggcugcucagccagcggacccgcgacaucuacaucucccggcgccugcugggcaccuucacguggacccucagcgacuccgagggcaacgagacccccgggggcuacugccugacccgguggaugcugaucgaggccgagcucaagugcuucgggaacacggccguggcgaagugcaacgagaagcacgacgaggaguucugcgacaugcugcgccuguucgacuucaacaagcaggccauccggcgccucaagacccccgcccagaugagcauccagcugaucaacaaggccgugaacgcccugaucaacgaccagcucaucaugaagaaccaccuccgggacaucaugugcauccccuacugcaacuacuccaaguacugguaccugaaccacaccgucaccgggaagacgagccugccccgcugcuggcugguguccaacggcagcuaccugaacgagacccacuucuccgacgacaucgagcagcaggcggacaacaugaucaccgagcuccugcagaaggaguacaucgaccggcagggcaagaccccgcuggggcucguggaccuguucgucuucagcacguccuucuaccugaucagcaucuuccugcaccucgugaagaucccgacccaccgccacguggucggcaagcccugccccaagccccaccggcugaaccacauggggaucugcuccugcggccuguacaagcacccgggggugcccgugaaguggaagcgcugaggacuaguaauaaggaaacuguaugaaugucugugggcaggaagugaagagauccuucuguaaagguuuuuggaauuaugucugcugaauaauaaacuuuuuugaaauaauaaaucugguagaaaaaugagaucucaaaggcucuuuucagagccaccaaaaaaaaaaaaaaaaaaaaaaaaaaaaaaaaaaaaaaaaaaaaaaaaaaaaaaaaaaaaaaaaaaaaaaaaaaaaaaaaaaaaaaaaaaaaaaaaaaaaa

SEQ ID NO: 29103 - RNA, 1809 nt, Artificial Sequence
  mRNA product Design b-4 (hSL-A100) comprising derived and/or modified sequence from LASV(Lassa virus/H.sapiens-wt/NGA/2015/ISTH_0543;Clade II)__AVO03639__GPCmut5 (opt1)
aggagagucccgcagucggcguccagcggcucugcuuguucgugugugugucguugcaggccuuauucaagcuuaccaugggccagaucaucaccuucuuccaggaggugccccacgucaucgaggaggugaugaacaucgugcugaucgcccucagccugcuggccauccucaaggggaucuacaacgucgcgaccugcggccuguucgggcugguguccuuccuccugcugugcggccgcagcugcuccacgaccuacaaggggguguacgagcuccagacccuggagcuggacauggccaaccucaacaugaccaugccgcugagcugcacgaagaacaacucccaccacuacaucauggucggcaacgagaccggccuggagcucacccugaccaacacgagcaucaucaaccacaaguucugcaaccuguccgacgcccacaagaagaaccucuacgaccacgcccugaugagcaucaucuccaccuuccaccugagcauccccaacuucaaccaguacgaggccauguccugcgacuucaacgggggcaagaucagcgugcaguacaaccucucccacaccuacgcgguggacgccgccaaccacugcgggaccaucgccaacggcguccugcagacguucaugcggauggcguggggcgggagcuacaucgcccuggacuccggcugcgggagcugggacugcaucaugaccuccuaccaguaccucgugauccagaacaccaccugggaggaccacugccaguucagccgccccucccccaucggcuaccuggggcugcucagccagcggacgcgcgacaucuacaucagccggcgccugcugggcaccuucaccuggacccucuccgacagcgagggcaacgagacgcccgggggcuacugccugacccgguggaugcugaucgaggccgagcucaagugcuucgggaacaccgccguggccaagugcaacgagaagcacgacgaggaguucugcgacaugcugcgccuguucgacuucaacaagcaggcgauccggcgccucaagacccccgcccagauguccauccagcugaucaacaaggccgucaacgcccugaucaacgaccagcucaucaugaagaaccaccuccgggacaucaugugcauccccuacugcaacuacagcaaguacugguaccugaaccacacggugaccgggaagaccucccugccccgcugcuggcuggugagcaacggcuccuaccugaacgagacccacuucagcgacgacaucgagcagcaggccgacaacaugaucacggagcuccugcagaaggaguacaucgaccggcagggcaagaccccgcuggggcucgucgaccuguucguguucuccaccagcuucuaccugaucuccaucuuccugcaccucgugaagaucccgacccaccgccacaucacgggcaagcccugccccaagccccaccggcugaaccacauggggaucugcagcugcggccuguacaagcacccggggguccccgugaaguggaagcgcugaggacuaguaauaaggaaacuguaugaaugucugugggcaggaagugaagagauccuucuguaaagguuuuuggaauuaugucugcugaauaauaaacuuuuuugaaauaauaaaucugguagaaaaaugagaucucaaaggcucuuuucagagccaccaaaaaaaaaaaaaaaaaaaaaaaaaaaaaaaaaaaaaaaaaaaaaaaaaaaaaaaaaaaaaaaaaaaaaaaaaaaaaaaaaaaaaaaaaaaaaaaaaaaaa

SEQ ID NO: 29104 - RNA, 1809 nt, Artificial Sequence
  mRNA product Design b-4 (hSL-A100) comprising derived and/or modified sequence from LASV(Lassa virus/H.sapiens-wt/NGA/2016/ISTH_0009;Clade II)__AVO03571__GPCmut5 (opt1)
aggagagucccgcagucggcguccagcggcucugcuuguucgugugugugucguugcaggccuuauucaagcuuaccaugggccagaucaucaccuucuuccaggaggugccccacgucaucgaggaggugaugaacaucgugcugaucgcccucagccugcuggccauccucaaggggaucuacaacgucgcgaccugcggccugcuggggcucguguccuuccugcugcucugcggccgcagcugcuccacgaccuacaaggggguguacgagcugcagacccuggagcucgacauggccagccugaacaugaccaugccgcuguccugcacgaagaacaacagccaccacuacaucauggucggcaacgagaccggccucgagcugacccugaccaacacguccaucaucaaccacaaguucugcaaccucagcgacgcccacaagaagaaccuguacgaccacgcccugauguccaucaucagcaccuuccaccucuccauccccaacuucaaccaguacgaggccaugagcugcgacuucaacgggggccggaucuccgugcaguacaaccugagccacuccuacgcgguggacgccgccaaccacugcgggaccaucgccaacggcguccugcagaccuucaugcgcauggcguggggcgggagcuacaucgcccucgacuccggcugcgggagcugggacugcaucaugacguccuaccaguaccugaucauccagaacaccaccugggaggaccacugccaguucagccggcccagccccaucggcuaccuggggcuccugucccagcgcacccgggacaucuacaucagccgccggcugcucggcacguucaccuggacccuguccgacagcgagggcaacgagacccccgggggcuacugccugacgcgcuggaugcucaucgaggccgagcugaagugcuucgggaacaccgccguggccaagugcaacgagaagcacgacgaggaguucugcgacaugcugcggcuguucgacuucaacaagcaggcgauccgccggcugaagacccccgcccagauguccauccagcugaucaacaaggccgugaacgcccucaucaacgaccagcugaucaugaagaaccaccuccgcgacaucaugugcaucccguacugcaacuacagcaaguacugguaccucaaccacaccgucacggggaagaccucccugccccggugcuggcuggugagcaacggcuccuaccucaacgagacccacuucagcgacgacaucgagcagcaggccgacaacaugaucaccgagcugcugcagaaggaguacaucgaccgccagggcaagacgccccucgggcugguggaccuguucgucuucuccaccagcuucuaccugaucuccaucuuccuccaccuggugaagaucccgacccaccggcacaucaccggcaagcccugccccaagccccaccgccugaaccacauggggaucugcagcugcggccucuacaaccacccgggggugcccgucaaguggaagcggugaggacuaguaauaaggaaacuguaugaaugucugugggcaggaagugaagagauccuucuguaaagguuuuuggaauuaugucugcugaauaauaaacuuuuuugaaauaauaaaucugguagaaaaaugagaucucaaaggcucuuuucagagccaccaaaaaaaaaaaaaaaaaaaaaaaaaaaaaaaaaaaaaaaaaaaaaaaaaaaaaaaaaaaaaaaaaaaaaaaaaaaaaaaaaaaaaaaaaaaaaaaaaaaaa

SEQ ID NO: 29105 - RNA, 1809 nt, Artificial Sequence
  mRNA product Design b-4 (hSL-A100) comprising derived and/or modified sequence from LASV(Lassa virus/H.sapiens-wt/NGA/2016/ISTH_0017;Clade II)__AVO03567__GPCmut5 (opt1)
aggagagucccgcagucggcguccagcggcucugcuuguucgugugugugucguugcaggccuuauucaagcuuaccaugggccagaucaucaccuucuuccaggaggugccccacgucaucgaggaggugaugaacaucgugcugaucgcccucagccugcuggccauccucaaggggaucuacaacgucgcgaccugcggccuguucgggcugguguccuuccuccugcugugcggccgcagcugcuccacgaccuacaaggggguguacgagcuccagacccuggagcuggacauggccagccucaacaugaccaugccgcuguccugcacgaagaacaacagccaccacuacaucauggucggcaacgagaccggccuggagcucacccugaccaacacguccaucaucaaccacaaguucugcaaccugagcgacgcccacaagaagaaccucuacgaccacgcccugauguccaucaucagcaccuuccaccuguccauccccaacuucaaccaguacgaggccaugagcugcgacuucaacgggggcaagaucuccgugcaguacaaccucagccacaccuacgcgaucgacgccgccaaccacugcgggaccaucgccaacggcgugcugcagacguucaugcggauggcguggggcggguccuacaucgcccuggacagcggcugcggguccugggacugcaucaugaccagcuaccaguaccucaucauccagaacaccaccugggaggaccacugccaguucucccgccccagccccaucggcuaccuggggcugcucagccagcggacgcgcgacaucuacaucucccggcgccugcugggcaccuucaccuggacccucagcgacuccgagggcaacgagacgcccgggggcuacugccugacccgguggaugcugaucgaggccgagcucaagugcuucgggaacaccgccgucgccaagugcaacgagaagcacgacgaggaguucugcgacaugcugcgccuguucgacuucaacaagcaggcgauccggcgccucaagacccccgcccagaugagcauccagcugaucaacaaggccgugaacgcccugaucaacgaccagcucaucaugaagaaccaccuccgggacaucaugugcauccccuacugcaacuacuccaaguacugguaccugaaccacacggugaccgggaagaccagccugccccgcugcuggcuggucuccaacggcagcuaccugaacgagacccacuucuccgacgacaucgagcagcaggccgacaacaugaucacggagcuccugcagaaggaguacauggaccggcagggcaagaccccgcuggggcucguggaccuguucguguucagcaccuccuucuaccugaucagcaucuuccugcaccucguccgcaucccgacccaccggcacgugaucggcaagcccugccccaagccccaccgccugaaccacauggggaucugcuccugcggccuguacaagcacccgggggugcccgucaaguggaagcggugaggacuaguaauaaggaaacuguaugaaugucugugggcaggaagugaagagauccuucuguaaagguuuuuggaauuaugucugcugaauaauaaacuuuuuugaaauaauaaaucugguagaaaaaugagaucucaaaggcucuuuucagagccaccaaaaaaaaaaaaaaaaaaaaaaaaaaaaaaaaaaaaaaaaaaaaaaaaaaaaaaaaaaaaaaaaaaaaaaaaaaaaaaaaaaaaaaaaaaaaaaaaaaaaa

SEQ ID NO: 29106 - RNA, 1809 nt, Artificial Sequence
  mRNA product Design b-4 (hSL-A100) comprising derived and/or modified sequence from LASV(Lassa virus/H.sapiens-wt/NGA/2018/ISTH_0959;Clade II)__AVV65099__GPCmut5 (opt1)
aggagagucccgcagucggcguccagcggcucugcuuguucgugugugugucguugcaggccuuauucaagcuuaccaugggccagaucaucaccuucuuccaggaggugccccacgucaucgaggaggugaugaacaucgugcugaucgcccucagccugcuggccauccucaaggggaucuacaacgucgugaccugcggccuguucgggcugguguccuuccuccugcugugcggccgcagcugcuccacgaccuacaagggggucuacgagcuccagacccuggagcuggacauggcgagccucaacaugaccaugccgcuguccugcacgaagaacaacagccaccacuacaucauggugggcaacgagaccggccuggagcucacccugaccaacacguccaucaucaaccacaaguucugcaaccugagcgacgcccacaagaagaaccucuacgaccacgcccugauguccaucaucagcaccuuccaccuguccauccccaacuucaaccaguacgaggccaugagcugcgacuucaacgggggcaagaucuccgugcaguacaaccucagccacgccuacgcgaucgacgccgccaaccacugcgggaccaucgccaacggcguccugcagaccuucaugcggauggcguggggcggguccuacaucgcccuggacagcggcugcggguccugggacugcaucaugacgagcuaccaguaccucaucauccagaacaccaccugggaggaccacugccaguucucccgccccagccccaucggcuaccuggggcugcucagccagcggacccgcgacaucuacaucucccggcgccugcugggcacguucaccuggacccucagcgacuccgagggcaacgagacccccgggggcuacugccugacgcgguggaugcugaucgaggccgagcucaagugcuucgggaacaccgccguggccaagugcaacgagaagcacgacgaggaguucugcgacaugcugcgccuguucgacuucaacaagcaggcgauccggcgccucaagacccccgcccagaugagcauccagcugaucaacaaggccgugaacgcccugaucaacgaccagcucaucaugaagaaccaccuccgggacaucaugugcaucccguacugcaacuacuccaaguacugguaccugaaccacaccgucacggggaagaccagccugccccgcugcuggcugguguccaacggcagcuaccugaacgagacccacuucuccgacgacaucgagcagcaggccgacaacaugaucaccgagcuccugcagaaggaguacaucgaccggcagggcaagacgccccuggggcucguggaccuguucgucuucagcaccuccuucuaccugaucagcaucuuccugcaccucgugaagaucccgacccaccgccacgugaucggcaagcccugccccaagccccaccggcugaaccacauggggaucugcuccugcggccuguacaagcacccggggguccccgugaaguggaagcgcugaggacuaguaauaaggaaacuguaugaaugucugugggcaggaagugaagagauccuucuguaaagguuuuuggaauuaugucugcugaauaauaaacuuuuuugaaauaauaaaucugguagaaaaaugagaucucaaaggcucuuuucagagccaccaaaaaaaaaaaaaaaaaaaaaaaaaaaaaaaaaaaaaaaaaaaaaaaaaaaaaaaaaaaaaaaaaaaaaaaaaaaaaaaaaaaaaaaaaaaaaaaaaaaaa

SEQ ID NO: 29107 - RNA, 1809 nt, Artificial Sequence
  mRNA product Design b-4 (hSL-A100) comprising derived and/or modified sequence from LASV(LASV003-NIG-2008;Clade II)__AIT17580__GPCmut5 (opt1)
aggagagucccgcagucggcguccagcggcucugcuuguucgugugugugucguugcaggccuuauucaagcuuaccaugggccagaucaucaccuucuuccaggaggugccccacgucaucgaggaggugaugaacaucgugcugaucgcccucagccugcuggccauccucaaggggaucuacaacgucgcgaccugcggccuguucgggcugguguccuuccuccugcugugcggccgcagcugcuccacgaccuacaaggggguguacgagcuccagacccuggagcuggacauggccagccucaacaugaccaugccgcuguccugcacgaagaacaacagccaccacuacaucauggucggcaacgagaccggccuggagcucacccugaccaacacguccaucaucaaccacaaguucugcaaccugagcgacgcccacaagaagaaccucuacgaccacgcccugauguccaucaucagcaccuuccaccuguccauccccaacuucaaccaguacgaggccaugagcugcgacuucaacgggggcaagaucuccgugcaguacaaccucagccacaccuacgcgguggacgccgccaaccacugcgggaccaucgccaacggcguccugcagacguucaugcggauggcguggggcggguccuacaucgcccuggacagcggcugcggguccugggacugcaucaugaccagcuaccaguaccucaucauccagaacaccaccugggaggaccacugccaguucucccgccccagccccaucggcuaccuggggcugcucagccagcggacgcgcgacaucuacaucucccggcgccugcugggcaccuucaccuggacccucagcgacuccgagagcaacgagacgccgggcggguacugccugacccgguggaugcugaucgaggccgagcucaagugcuucggcaacaccgccguggccaagugcaacgagaagcacgacgaggaguucugcgacaugcugcgccuguucgacuucaacaagcaggcgauccggcgccucaaggcccccgcccagauguccauccagcugaucaacaaggccgugaacgcccugaucaacgaccagcucaucaugaagaaccaccuccgggacaucaugugcauccccuacugcaacuacagcaaguacugguaccugaaccacaccgucacgggccgcaccucccugccccggugcuggcuggugagcaacggguccuaccugaacgagacccacuucagcgacgacaucgagcagcaggcggacaacaugaucaccgagcuccugcagaaggaguacauggaccgccagggcaagacgccccugggccucguggaccuguucgucuucuccaccagcuucuaccugaucuccaucuuccugcaccucgugaagaucccgacccaccggcacgugaucgggaagcccugccccaagccccaccgccugaaccacaugggcaucugcagcugcgggcuguacaagcacccgggcguccccgugaaguggaagcggugaggacuaguaauaaggaaacuguaugaaugucugugggcaggaagugaagagauccuucuguaaagguuuuuggaauuaugucugcugaauaauaaacuuuuuugaaauaauaaaucugguagaaaaaugagaucucaaaggcucuuuucagagccaccaaaaaaaaaaaaaaaaaaaaaaaaaaaaaaaaaaaaaaaaaaaaaaaaaaaaaaaaaaaaaaaaaaaaaaaaaaaaaaaaaaaaaaaaaaaaaaaaaaaaa

SEQ ID NO: 29108 - RNA, 1809 nt, Artificial Sequence
  mRNA product Design b-4 (hSL-A100) comprising derived and/or modified sequence from LASV(LASV035-NIG-2009;Clade II)__AIT17588__GPCmut5 (opt1)
aggagagucccgcagucggcguccagcggcucugcuuguucgugugugugucguugcaggccuuauucaagcuuaccaugggccagaucaucaccuucuuccaggaggugccccacgucaucgaggaggugaugaacaucgugcugaucgcccucagccugcuggccauccucaaggggaucuacaacgucgcgaccugcggccuguucgggcugguguccuuccuccugcugugcggccgcagcugcuccacgaccuacaaggggguguacgagcuccagacccuggagcuggacauggccagccucaacaugaccaugccgcuguccugcacgaagaacaacagccaccacuacaucauggucggcaacgagaccggccuggagcucacccugaccaacacguccaucaucaaccacaaguucugcaaccugagcgacgcccacaagaagaaccucuacgaccacgcccugauguccaucaucagcaccuuccaccuguccauccccaacuucaaccaguacgaggccaugagcugcgacuucaacgggggcaagaucuccgugcaguacaaccucagccacgcguacgccguggacgccgccaaccacugcgggaccaucgcgaacggcguccugcagaccuucaugcggauggccuggggcggguccuacaucgcccuggacagcggcugcggguccugggacugcaucaugacgagcuaccaguaccucaucauccagaacaccaccugggaggaccacugccaguucucccgccccagccccaucggcuaccuggggcugcucagccagcggacccgcgacaucuacaucucccggcgccugcugggcacguucaccuggacccucagcgacuccgagggcaacgagacccccgggggcuacugccugacgcgguggaugcugaucgaggccgagcucaagugcuucgggaacaccgccguggcgaagugcaacgagaagcacgacgaggaguucugcgacaugcugcgccuguucgacuucaacaagcaggccauccggcgccucaaggcccccgcccagaugagcauccagcugaucaacaaggccgugaacgcgcugaucaacgaccagcucaucaugaagaaccaccuccgggacaucaugugcauccccuacugcaacuacuccaaguacugguaccugaaccacaccgucaccgggaagacgagccugccccgcugcuggcugguguccaacggcagcuaccugaacgagacccacuucuccgacgacaucgagcagcaggccgacaacaugaucaccgagcuccugcagaaggaguacaucgaccggcagggcaagaccccgcuggggcucguggaccuguucgucuucagcacguccuucuaccugaucagcaucuuccugcaccucgugaagaucccgacccaccgccacgugaucggcaagcccugccccaagccccaccggcugaaccacauggggaucugcuccugcggccuguacaagcacccggggguccccgugaaguggaagcgcugaggacuaguaauaaggaaacuguaugaaugucugugggcaggaagugaagagauccuucuguaaagguuuuuggaauuaugucugcugaauaauaaacuuuuuugaaauaauaaaucugguagaaaaaugagaucucaaaggcucuuuucagagccaccaaaaaaaaaaaaaaaaaaaaaaaaaaaaaaaaaaaaaaaaaaaaaaaaaaaaaaaaaaaaaaaaaaaaaaaaaaaaaaaaaaaaaaaaaaaaaaaaaaaaa

SEQ ID NO: 29109 - RNA, 1809 nt, Artificial Sequence
  mRNA product Design b-4 (hSL-A100) comprising derived and/or modified sequence from LASV(LASV1000-NIG-2009;Clade II)__AIT17782__GPCmut5 (opt1)
aggagagucccgcagucggcguccagcggcucugcuuguucgugugugugucguugcaggccuuauucaagcuuaccaugggccagaucaucaccuucuuccaggaggugccccacgucaucgaggaggugaugaacaucgugcugaucgcccucagccugcuggccauccucaaggggaucuacaacgucgcgaccugcggccuguucgggcugguguccuuccuccugcugugcggccgcagcugcuccacgaccuacaaggggguguacgagcuccagacccuggagcuggacauggccagccucaacaugaccaugccgcuguccugcacgaagaacaacagccaccacuacaucauggucggcaacgagaccggccuggagcucacccugaccaacacguccaucaucaaccacaaguucugcaaccugagcgacgcccacaagaagaaccucuacgaccacgcccugauguccaucaucagcaccuuccaccuguccauccccaacuucaaccaguacgaggccaugagcugcgacuucaacgggggcaagaucuccgugcaguacaaccucagccacaccuacgcgguggacgccgccaaccacugcgggaccaucgccaacggcguccugcagacguucaugcggauggcguggggcggguccuacaucgcccuggacagcggcugcggguccugggacugcaucaugaccagcuaccaguaccucaucauccagaacaccaccugggaggaccacugccaguucucccgccccagccccaucggcuaccuggggcugcucagccagcggacgcgcgacaucuacaucucccggcgccugcugggcaccuucaccuggacccucagcgacuccgagggcaacgagacgcccgggggcuacugccugacccgguggaugcugaucgaggccgagcucaagugcuucgggaacaccgccguggccaagugcaacgagaagcacgacgaggaguucugcgacaugcugcgccuguucgacuucaacaagcaggcgaucaagcggcucaagacccccgcccagaugagcauccagcugaucaacaaggccgugaacgcccugaucaacgaccagcucaucaugaagaaccaccuccgcgacaucaugugcauccccuacugcaacuacuccaaguacugguaccugaaccacacggucaccgggaagaccagccugccccggugcuggcugguguccaacggcagcuaccugaacgagacccacuucuccgacgacaucgagcagcaggccgacaacaugaucacggagcuccugcagaaggaguacaucgaccgccagggcaagaccccgcuggggcucguggaccuguucgucuucagcaccuccuucuaccugaucagcaucuuccugcaccucgugaagaucccgacccaccggcacguggucggcaagcccugccccaagccccaccgccugaaccacauggggaucugcuccugcggccuguacaagcacccgggggugcccgugaaguggaagcggugaggacuaguaauaaggaaacuguaugaaugucugugggcaggaagugaagagauccuucuguaaagguuuuuggaauuaugucugcugaauaauaaacuuuuuugaaauaauaaaucugguagaaaaaugagaucucaaaggcucuuuucagagccaccaaaaaaaaaaaaaaaaaaaaaaaaaaaaaaaaaaaaaaaaaaaaaaaaaaaaaaaaaaaaaaaaaaaaaaaaaaaaaaaaaaaaaaaaaaaaaaaaaaaaa

SEQ ID NO: 29110 - RNA, 1809 nt, Artificial Sequence
  mRNA product Design b-4 (hSL-A100) comprising derived and/or modified sequence from LASV(LASV221-NIG-2010;Clade II)__AIT17624__GPCmut5 (opt1)
aggagagucccgcagucggcguccagcggcucugcuuguucgugugugugucguugcaggccuuauucaagcuuaccaugggccagaucaucaccuucuuccaggaggugccccacgucaucgaggaggugaugaacaucgugcugaucgcccucagccugcuggccauccucaaggggaucuacaacgucgcgaccugcggccuguucgggcugguguccuuccuccugcugugcggccgcagcugcuccacgaccuacaaggggguguacgagcuccagacccuggagcuggacauggccagccucaacaugaccaugccgcuguccugcacgaagaacaacagccaccacuacaucauggucggcaacgagaccggccuggagcucacccugaccaacacguccaucaucaaccacaaguucugcaaccugagcgacgcccacaagaagaaccucuacgaccacgcccugauguccaucaucagcaccuuccaccuguccauccccaacuucaaccaguacgaggccaugagcugcgacuucaacgggggcaagaucuccgugcaguacaaccucagccacaccuacgcgaucgacgccgccaaccacugcgggaccaucgccaacggcgugcugcagacguucaugcggauggcguggggcggguccuacaucgcccuggacagcggcugcggguccugggacugcaucaugaccagcuaccaguaccucaucauccagaacaccaccugggaggaccacugccaguucucccgccccagccccaucggcuaccuggggcugcucagccagcggacgcgcgacaucuacaucucccggcgccugcugggcaccuucaccuggacccucagcgacuccgagggcaacgagacgcccgggggcuacugccugacccgguggaugcugaucgaggccgagcucaagugcuucgggaacaccgccgucgccaagugcaacgagaagcacgacgaggaguucugcgacaugcugcgccuguucgacuucaacaagcaggcgauccggcgccucaagacccccgcccagaugagcauccagcugaucaacaaggccgugaacgcccugaucaacgaccagcucaucaugaagaaccaccuccgggacaucaugugcauccccuacugcaacuacuccaaguacugguaccugaaccacacggugaccgggaagaccagccugccccgcugcuggcuggucuccaacggcagcuaccugaacgagacccacuucuccgacgacaucgagcagcaggccgacaacaugaucacggagaugcuccagaaggaguacauggaccggcagggcaagaccccgcuggggcugguggaccucuucguguucagcaccuccuucuaccugaucagcaucuuccugcaccuggucaagaucccgacccaccgccacgugaucggcaagcccugccccaagccccaccggcucaaccacauggggaucugcuccugcggccuguacaagcacccgggggugcccgucaaguggaagcgcugaggacuaguaauaaggaaacuguaugaaugucugugggcaggaagugaagagauccuucuguaaagguuuuuggaauuaugucugcugaauaauaaacuuuuuugaaauaauaaaucugguagaaaaaugagaucucaaaggcucuuuucagagccaccaaaaaaaaaaaaaaaaaaaaaaaaaaaaaaaaaaaaaaaaaaaaaaaaaaaaaaaaaaaaaaaaaaaaaaaaaaaaaaaaaaaaaaaaaaaaaaaaaaaaa

SEQ ID NO: 29111 - RNA, 1809 nt, Artificial Sequence
  mRNA product Design b-4 (hSL-A100) comprising derived and/or modified sequence from LASV(LASV237-NIG-2010;Clade II)__AIT17638__GPCmut5 (opt1)
aggagagucccgcagucggcguccagcggcucugcuuguucgugugugugucguugcaggccuuauucaagcuuaccaugggccagaucaucaccuucuuccaggaggugccccacgucaucgaggaggugaugaacaucgugcugaucgcccucagccugcuggccauccucaaggggaucuacaacgucgcgaccugcggccuguucgggcugguguccuuccuccugcugugcggccgcagcugcuccacgaccuacaaggggguguacgagcuccagacccuggagcuggacauggccagccucaacaugaccaugccgcuguccugcacgaagaacaacagccaccacuacaucauggucggcaacgagaccggccuggagcucacccugaccaacacguccaucaucaaccacaaguucugcaaccugagcgacgcccacaagaaggaccucuacgaccacgcccugauguccaucaucagcaccuuccaccuguccauccccaacuucaaccaguacgaggccaugagcugcgacuucaacgggggcaagaucuccgugcaguacaaccucagccacaccuacgcgguggacgccgccaaccacugcgggaccaucgccaacggcguccugcagacguucaugcggauggcguggggcggguccuacaucgcccuggacagcggcugcggguccugggacugcaucaugaccagcuaccaguaccucaucauccagaacaccaccugggaggaccacugccaguucucccgccccagccccaucggcuaccuggggcugcucagccagcggacgcgcgacaucuacaucucccggcgccugcugggcaccuucaccuggacccucagcgacuccgagggcaacgagacgcccgggggcuacugccugacccgguggaugcugaucgaggccgagcucaagugcuucgggaacaccgccguggccaagugcaacgagaagcacgacgaggaguucugcgacaugcugcgccuguucgacuucaacaagcaggcgauccggcgccucaagacccccgcccagaugagcauccagcugaucaacaaggccgugaacgcccugaucaacgaccagcucaucaugaagaaccaccuccgggacaucaugugcauccccuacugcaacuacuccaaguacugguaccugaaccacacggucaccgggaagaccagccugccccgcugcuggcugguguccaacggcagcuaccugaacgagacccacuucuccgacgacaucgagcagcaggccgacaacaugaucacggagcuccugcagaaggaguacauggaccggcagggcaagaccccgcuggggcucguggaccuguucgucuucagcaccuccuucuaccugaucagcaucuuccugcaccucaucaagaucccgacccaccgccacaucacgggcaagcccugccccaagccccaccggcugaaccacauggggaucugcuccugcggccuguacaagcacccgggggugcccgugaaguggaagcgcugaggacuaguaauaaggaaacuguaugaaugucugugggcaggaagugaagagauccuucuguaaagguuuuuggaauuaugucugcugaauaauaaacuuuuuugaaauaauaaaucugguagaaaaaugagaucucaaaggcucuuuucagagccaccaaaaaaaaaaaaaaaaaaaaaaaaaaaaaaaaaaaaaaaaaaaaaaaaaaaaaaaaaaaaaaaaaaaaaaaaaaaaaaaaaaaaaaaaaaaaaaaaaaaaa

SEQ ID NO: 29112 - RNA, 1809 nt, Artificial Sequence
  mRNA product Design b-4 (hSL-A100) comprising derived and/or modified sequence from LASV(LASV253-NIG-2011;Clade II)__AIT17670__GPCmut5 (opt1)
aggagagucccgcagucggcguccagcggcucugcuuguucgugugugugucguugcaggccuuauucaagcuuaccaugggccagaucaucaccuucuuccaggaggugccccacgucaucgaggaggugaugaacaucgugcugaucgcccucagccugcuggccauccucaaggggaucuacaacgucgcgaccugcggccuguucgggcugguguccuuccuccugcugugcggccgcagcugcuccacgaccuacaaggggguguacgagcuccagacccuggagcuggacauggccagccucaacaugaccaugccgcuguccugcacgaagaacaacagccaccacuacaucauggucggcaacgagaccggccuggagcucacccugaccaacacguccaucaucaaccacaaguucugcaaccugagcgacgcccacaagaagaaccucuacgaccacgcccugauguccaucaucagcaccuuccaccuguccauccccaacuucaaccaguacgaggccaugagcugcgacuucaacgggggcaagaucuccgugcaguacaaccucagccacaccuacgcgguggacgccgccaaccacugcgggaccaucgccaacggcguccugcagacguucaugcggauggcguggggcggguccuacaucgcccuggacagcggcugcggguccugggacugcaucaugaccagcuaccaguaccucaucauccagaacaccaccugggaggaccacugccaguucucccgccccagccccaucggcuaccuggggcugcucagccagcggacgcgcgacaucuacaucucccggcgccugcugggcaccuucaccuggacccucagcgacuccgagggcaacgagacgcccgggggcuacugccugacccgguggaugcugaucgaggccgagcucaagugcuucgggaacaccgccguggccaagugcaacgagaagcacgacgaggaguucugcgacaugcugcgccuguucgacuucaacaagcaggcgauccggcgccucaaggcccccgcccagaugagcauccagcugaucaacaaggccgugaacgcccugaucaacgaccagcucaucaugaagaaccaccuccgggacaucaugugcaucccguacugcaacuacuccaaguacugguaccugaaccacaccgucacggggcgcaccagccugccccggugcuggcugguguccaacggcagcuaccugaacgagacccacuucuccgacgacaucgagcagcaggcggacaacaugaucaccgagcuccugcagaaggaguacaucgaccgccagggcaagacgccccuggggcucguggaccuguucgucuucagcaccuccuucuaccugaucagcaucuuccugcaccucgugaagaucccgacccaccggcacaucaucggcaagcccugccccaagccccaccgccugaaccacauggggaucugcuccugcggccuguacaagcacccgggggugcccgucaaguggaagcggugaggacuaguaauaaggaaacuguaugaaugucugugggcaggaagugaagagauccuucuguaaagguuuuuggaauuaugucugcugaauaauaaacuuuuuugaaauaauaaaucugguagaaaaaugagaucucaaaggcucuuuucagagccaccaaaaaaaaaaaaaaaaaaaaaaaaaaaaaaaaaaaaaaaaaaaaaaaaaaaaaaaaaaaaaaaaaaaaaaaaaaaaaaaaaaaaaaaaaaaaaaaaaaaaa

SEQ ID NO: 29113 - RNA, 1809 nt, Artificial Sequence
  mRNA product Design b-4 (hSL-A100) comprising derived and/or modified sequence from LASV(LASV254-NIG-2011;Clade II)__AIT17674__GPCmut5 (opt1)
aggagagucccgcagucggcguccagcggcucugcuuguucgugugugugucguugcaggccuuauucaagcuuaccaugggccagaucaucaccuucuuccaggaggugccccacgucaucgaggaggugaugaacaucgugcugaucgcccucagccugcuggccauccucaaggggaucuacaacgucgcgaccugcggccuguucgggcugguguccuuccuccugcugugcggccgcagcugcuccacgaccuacaaggggguguacgagcuccagacccuggagcuggacaugaccaaccucaacaugacgaugccgcugagcugcaccaagaacaacucccaccacuacaucauggucggcaacgagaccggccuggagcucacccugacgaacaccagcaucaucaaccacaaguucugcaaccuguccgacgcccacaagaagaaccucuacaaccacgcccugaugagcaucaucuccaccuuccaccugagcauccccaacuucaaccaguacgaggccauguccugcgacuucaacgggggcaagaucagcgugcaguacaaccucucccacagcuacgccguggacgcggccaaccacugcgggaccaucgccaacggcguccugcagacguucaugcggauggccuggggcggguccuacaucgcgcuggacagcggcugcgggaacugggacugcaucaugaccuccuaccaguaccucaucauccagaacaccaccugggaggaccacugccaguucagccgccccucccccaucggcuaccuggggcugcucagccagcggacgcgcgacaucuacaucagccggcgccugcugggcaccuucaccuggacccucuccgacagcgagggcaacgagacgcccgggggcuacugccugacccgguggaugcugaucgaggccgagcucaagugcuucgggaacaccgccguggccaagugcaacgagaagcacgacgaggaguucugcgacaugcugcgccuguucgacuucaacaagcaggccauccggcgccucaagacccccgcgcaggccaacauccagcugaucaacaaggccgugaacgcccugaucaacgaccagcucaucaugaagaaccaccuccgggacaucaugugcauccccuacugcaacuacuccaaguacugguaccugaaccacacggucaccgggaagaccagccugccccgcugcuggcugguguccaacggcagcuaccugaacgagacccacuucuccgacgacaucgagcagcaggccgacaacaugaucacggagcuccugcagaaggaguacauggaccggcagggcaagaccccgcuggggcucguggaccuguucgucuucagcaccuccuucuaccugaucagcaucuuccugcaccucgugaagaucccgacccaccgccacgugaucggcaagcccugccccaagccccaccggcugaaccacauggggaucugcuccugcggccuguacaagcacccggggguccccgugaaguggaagcgcugaggacuaguaauaaggaaacuguaugaaugucugugggcaggaagugaagagauccuucuguaaagguuuuuggaauuaugucugcugaauaauaaacuuuuuugaaauaauaaaucugguagaaaaaugagaucucaaaggcucuuuucagagccaccaaaaaaaaaaaaaaaaaaaaaaaaaaaaaaaaaaaaaaaaaaaaaaaaaaaaaaaaaaaaaaaaaaaaaaaaaaaaaaaaaaaaaaaaaaaaaaaaaaaaa

SEQ ID NO: 29114 - RNA, 1809 nt, Artificial Sequence
  mRNA product Design b-4 (hSL-A100) comprising derived and/or modified sequence from LASV(Nig08-A19;Clade III)__ADU56618__GPCmut5 (opt1)
aggagagucccgcagucggcguccagcggcucugcuuguucgugugugugucguugcaggccuuauucaagcuuaccaugggccagaucgugaccuucuuccaggaggucccccacgugaucgaggaggugaugaacaucguccugaucgcccucagcauccuggccauccugaaggggcucuacaacaucgcgaccugcggccugaucgggcuggugacguuccuccugcuguccggccgcagcugcuccaugaccuacaaggggguguacgagcuccagacccuggagcugaacaugaacacccucaacaugacgaugccgcugagcugcaccaagaacaacucccaccacuacaucauggucggcaacgagaccggccuggagcucacccugacgaacaccagccugcuccaccacaaguucugcaaccuguccgacgcccacaagaagaaccuguacgaccacacccucaugagcaucaucuccaccuuccaccugagcauccccaacuucaaccaguacgaggccauguccugcgacuucaacgggggcaagaucacggugcaguacaaccugagccacuccuacgccaucgacgccgcgaaccacugcgggaccguggccaacggcguccuccagaccuucaugcggauggccuggggcgggagcuacaucgcccuggacuccggcugcgggaagugggacugcaucaugaccagcuaccaguaccugaucauccagaacacgaccugggaggaccacugccaguucucccggcccagccccaucggcuaccucgggcugcugucccagcgcacccgggacaucuacaucagccgccggcuccugggcaccuucacguggacccugagcgacuccgagggcaacgagacccccgggggcuacugccucacccgcuggaugcugaucgaggcggagcugaagugcuucgggaacacggccguggccaagugcaacgagaagcacgacgaggaguucugcgacaugcuccggcuguucgacuucaacaagcaggccauccgccggcugaaggcccccgcgcagaugagcauccagcucaucaacaaggccgugaacgcccugaucaacgaccagcugaucaugaagaaccaccuccgcgacaucaugugcauccccuacugcaacuacuccaaguacugguaccugaaccacaccagcaccgggcggaccucccugccccgcugcuggcucgucagcaacggcuccuaccugaacgagacgcacuucagcgacgacaucgagcagcaggccgacaacaugaucaccgagaugcugcagaaggaguaccucgaccggcagggcaagaccccgcuggggcugguggaccuguucguguucuccaccagcuucuaccucaucuccaucuuccugcaccuggucaagaucccgacgcaccgccacaucgugggcaagcccugccccaagccccaccggcucaaccacauggggaucugcagcugcggccuguacaagcagccgggggugcccguccgcuggaagcggugaggacuaguaauaaggaaacuguaugaaugucugugggcaggaagugaagagauccuucuguaaagguuuuuggaauuaugucugcugaauaauaaacuuuuuugaaauaauaaaucugguagaaaaaugagaucucaaaggcucuuuucagagccaccaaaaaaaaaaaaaaaaaaaaaaaaaaaaaaaaaaaaaaaaaaaaaaaaaaaaaaaaaaaaaaaaaaaaaaaaaaaaaaaaaaaaaaaaaaaaaaaaaaaaa

SEQ ID NO: 29115 - RNA, 1812 nt, Artificial Sequence
  mRNA product Design b-4 (hSL-A100) comprising derived and/or modified sequence from LASV(G1180-SLE-2010;Clade IV)__AIT17168__GPCmut5 (opt1)
aggagagucccgcagucggcguccagcggcucugcuuguucgugugugugucguugcaggccuuauucaagcuuaccaugggccagaucgugaccuucuuccaggaggucccccacgugaucgaggaggugaugaacaucguccugaucgcccucagcauccuggccgugcugaaggggcucuacaacuucgcgaccugcggccugguggggcugcucaccuuccugcugcucugcggccgcuccugcaccgccagccgguacaagggggucuacgagcugcagacccuggagcucaacauggagacccugaacaugacgaugccgcuguccugcaccaagaacaacagccaccacuacaucauggugggcaacgagaccggccucgagcugacccugacgaacaccuccaucaucaaccacaaguucugcaaccucagcgacgcccacaagaagaaccuguacgaccacgcccugauguccaucaucagcaccuuccaccucuccauccccaacuucaaccaguacgaggccaugagcugcgacuucaacgggggcaagaucuccgugcaguacaaccugagccacuccuacgcgggggacgccgccaaccacugcggcaccgucgccaacggggugcugcagacguucaugcgcauggcguggggcggcagcuacaucgcccucgacuccgggugcggcagcugggacugcaucaugaccuccuaccaguaccugaucauccagaacaccaccugggaggaccacugccaguucagccggcccucccccaucggguaccugggccuccugagccagcgcacgcgggacaucuacaucagccgccggcugcucggcaccuucaccuggacccuguccgacagcgaggggaaggacacgccgggcggguacugccugacccgcuggaugcucaucgaggccgagcugaagugcuucggcaacaccgccguggccaagugcaacgagaagcacgacgaggaguucugcgacaugcugcggcuguucgacuucaacaagcaggcgauccagcgccugaaggcccccgcccagauguccauccagcugaucaacaaggccgucaacgcccucaucaacgaccagcugaucaugaagaaccaccuccgggacaucaugugcauccccuacugcaacuacagcaaguacugguaccucaaccacaccacgaccggcaagaccucccugcccaagugcuggcuggugagcaacggcuccuaccucaacgagacccacuucagcgacgacaucgagcagcaggcggacaacaugaucacggagaugcugcagaaggaguacauggagcgccaggggaagacgccccugggccucguggaccuguucgucuucuccaccagcuucuaccugaucuccaucuuccugcaccucgugaagaucccgacccaccggcacaucgugggcaagagcugccccaagccccaccgccugaaccacauggggaucugcuccugcgggcuguacaagcagcccggcgucccggugaaguggaagcggugaggacuaguaauaaggaaacuguaugaaugucugugggcaggaagugaagagauccuucuguaaagguuuuuggaauuaugucugcugaauaauaaacuuuuuugaaauaauaaaucugguagaaaaaugagaucucaaaggcucuuuucagagccaccaaaaaaaaaaaaaaaaaaaaaaaaaaaaaaaaaaaaaaaaaaaaaaaaaaaaaaaaaaaaaaaaaaaaaaaaaaaaaaaaaaaaaaaaaaaaaaaaaaaaa

SEQ ID NO: 29116 - RNA, 1812 nt, Artificial Sequence
  mRNA product Design b-4 (hSL-A100) comprising derived and/or modified sequence from LASV(G1442-SLE-2011;Clade IV)__AIT17180__GPCmut5 (opt1)
aggagagucccgcagucggcguccagcggcucugcuuguucgugugugugucguugcaggccuuauucaagcuuaccaugggccagaucgugaccuucuuccaggaggucccccacgugaucgaggaggugaugaacaucguccugaucgcccucagcauccuggccgugcugaaggggcucuacaacguggcgaccugcggccugaucgggcuggucacguuccuccugcugugcggccgcuccugcaccaccacccucuacaaggggguguacgagcugcagacgcuggagcucaacauggagacccugaacaugaccaugccgcugagcugcaccaagaacaacucccaccacuacauccgggugggcaacgagacgggccucgagcugacccugaccaacaccagcaucaucaaccacaaguucugcaaccucuccgacgcccacaagaagaaccuguacgaccacgcccugaugagcaucaucuccacguuccaccucagcauccccaacuucaaccaguacgaggccauguccugcgacuucaacgggggcaagaucagcguccaguacaaccugucccacagcuacgccggggacgcggccaaccacugcggcaccguggccaacggggugcugcagaccuucaugcgcauggccuggggcggcuccuacaucgcgcucgacagcgggugcggcaacugggacugcaucaugaccuccuaccaguaccugaucauccagaacacgaccugggacgaccacugccaguucagccgccccucccccaucggguaccugggccuccugagccagcggacccgcgacgucuacaucucccggcgccugcucggcaccuucacguggacccugagcgacagcgaggggaaggacaccccgggcggguacugccugacccgguggaugcucaucgaggccgagcugaagugcuucggcaacacggccguggccaagugcaacgagaagcacgacgaggaguucugcgacaugcugcgccucuucgacuucaacaagcaggccauccagcggcugaaggcgcccgcccagauguccauccagcugaucaacaaggccgugaacgcccucaucaacgaccagcugaucaugaagaaccaccuccgcgacaucaugugcauccccuacugcaacuacagcaaguacugguaccugaacaacaccgccaccggcaagaccucccugcccaagugcuggcugaucagcaacggcuccuaccucaacgagacgcacuucagcgacgacaucgagcaggaggcggacaacaugaucaccgagaugcugcagaaggaguacauggagcggcaggggaagacgccccugggccucgucgaccuguucguguucuccaccagcuucuaccugaucuccaucuuccugcaccucgugaagaucccgacccaccgccacaucgucggcaagagcugccccaagccccaccggcugaaccacauggggaucugcuccugcgggcuguacaagcagcccggcgugccggugcgcuggaagcggugaggacuaguaauaaggaaacuguaugaaugucugugggcaggaagugaagagauccuucuguaaagguuuuuggaauuaugucugcugaauaauaaacuuuuuugaaauaauaaaucugguagaaaaaugagaucucaaaggcucuuuucagagccaccaaaaaaaaaaaaaaaaaaaaaaaaaaaaaaaaaaaaaaaaaaaaaaaaaaaaaaaaaaaaaaaaaaaaaaaaaaaaaaaaaaaaaaaaaaaaaaaaaaaaa

SEQ ID NO: 29117 - RNA, 1812 nt, Artificial Sequence
  mRNA product Design b-4 (hSL-A100) comprising derived and/or modified sequence from LASV(G3010-SLE-2013;Clade IV)__AIT17344__GPCmut5 (opt1)
aggagagucccgcagucggcguccagcggcucugcuuguucgugugugugucguugcaggccuuauucaagcuuaccaugggccagaucgugaccuucuuccaggaggucccccacgugaucgaggaggugaugaacaucguccugaucgcccucagcauccuggccgugcugaaggggcucuacaacuucgcgaccugcggccugguggggcuggucacguuccuccugcugugcggccgcuccugcaccaccagccucuacaaggggguguacgagcugcagacccuggagcucaacauggagacgcugaacaugaccaugccgcuguccugcaccaagaacaacagccaccacuacaucauggugggcaacgagaccggccucgagcugacgcugaccaacaccuccaucaucaaccacaaguucugcaaccucagcgacgcccacaagaagaaccuguacaaccacgcccugauguccaucaucagcaccuuccaccucuccauccccaacuucaaccaguacgaggccaugagcugcgacuucaacgggggcaagaucuccguccaguacaaccugagccacuccuacgccggggacgcggccagccacugcggcacgguggccaacggggugcugcagaccuucaugcggauggccuggggcggcuccuacaucgcgcucgacagcgggugcggcaagugggacugcaucaugaccuccuaccaguaccugaucauccagaacaccacgugggaggaccacugccaguucagccgccccucccccaucggguaccugggccuccugagccagcggacccgcgacaucuacaucagccggcgccugcucggcaccuucaccuggacgcuguccgacagcgaggggaaggacaccccgggcggguacugccugacccgguggaugcucaucgaggccgagcugaagugcuucggcaacaccgccgucgccaagugcaacgagaagcacgacgaggaguucugcgacaugcugcgccucuucgacuucaacaagcaggccauccagcggcugaagacgcccgcgcagauguccauccagcugaucaacaaggccgugaacgcccucaucaacgaccagcugaucaugaagaaccaccuccgcgacaucaugugcauccccuacugcaacuacagcaaguacugguaccugaaccacaccaccaccggcaagacgucccugcccaagugcuggcuggugagcaacggcuccuaccucaacgagacccacuucagcgacgacaucgagcagcaggccgacaacaugaucaccgagaugcugcagaaggaguacauggagcggcaggggaagacgccccugggccucgucgaccuguucguguucuccaccagcuucuaccugaucuccaucuuccugcaccucgugaagaucccgacccaccgccacaucgucggcaagagcugccccaagccccaccggcugaaccacauggggaucugcuccugcgggcuguacaagcagcccggcgugccggugcgcuggaagcggugaggacuaguaauaaggaaacuguaugaaugucugugggcaggaagugaagagauccuucuguaaagguuuuuggaauuaugucugcugaauaauaaacuuuuuugaaauaauaaaucugguagaaaaaugagaucucaaaggcucuuuucagagccaccaaaaaaaaaaaaaaaaaaaaaaaaaaaaaaaaaaaaaaaaaaaaaaaaaaaaaaaaaaaaaaaaaaaaaaaaaaaaaaaaaaaaaaaaaaaaaaaaaaaaa

SEQ ID NO: 29118 - RNA, 1812 nt, Artificial Sequence
  mRNA product Design b-4 (hSL-A100) comprising derived and/or modified sequence from LASV(G502-SLE-2009;Clade IV)__AIT17126__GPCmut5 (opt1)
aggagagucccgcagucggcguccagcggcucugcuuguucgugugugugucguugcaggccuuauucaagcuuaccaugggccagaucgugaccuucuuccaggaggucccccacgugaucgaggaggugaugaacaucguccugaucgcccucagcauccuggccgugcugaaggggcucuacaacuucgcgaccugcggccugguggggcugcucacguuccugcugcucugcggccgcuccugcaccaccgggcuguacaagggcgucuacgagcugcagacccucgagcugaacauggagacgcugaacaugaccaugccgcucagcugcaccaagaacaacucccaccacuacaucauggugggcaacgagaccgggcuggagcugacgcucaccaacaccagcaucaucaaccacaaguucugcaaccuguccgacgcccacaagaagaaccuguacgaccacgcccucaugagcaucaucuccaccuuccaccugagcauccccaacuucaaccaguacgaggccauguccugcgacuucaacggcgggaagaucagcgugcaguacaaccugucccacagcuacgccggcgacgcggccgaccacugcgggacggucgccaacggcgugcuccagaccuucaugcggauggccuggggcggguccuacaucgcgcuggacagcggcugcgggcggugggacugcaucaugaccuccuaccaguaccugaucauccagaacaccacgugggaggaccacugccaguucagccgccccucccccaucggcuaccucggccugcugagccagcggacccgcgacaucuacaucucccggcgccuccuggggaccuucaccuggacgcugagcgacagcgagggcaaggacacccccgggggcuacugccucacccgguggaugcugaucgaggccgagcugaagugcuucgggaacaccgccguggccaagugcaacgagaagcacgacgaggaguucugcgacaugcuccgccuguucgacuucaacaagcaggccauccagcggcugaaggcgcccgcccagauguccauccagcucaucaacaaggccgucaacgcccugaucaacgaccagcuggugaugaagaaccaccuccgcgacaucaugugcauccccuacugcaacuacagccgguacugguaccugaaccacacgaccaccggccgcaccucccugcccaagugcuggcucgugagcaacggguccuaccugaacgagacgcacuucagcgacgacaucgagcagcaggccgacaacaugaucaccgagaugcugcagaaggaguacauggagcggcagggcaagaccccgcucgggcuggucgaccuguucguguucuccaccagcuucuaccugaucuccaucuuccuccaccuggugaagaucccgacgcaccgccacaucgucggcaagagcugccccaagccccaccggcugaaccacauggggaucugcuccugcggccucuacaagcagcccggcgugccggugaaguggaagcgcugaggacuaguaauaaggaaacuguaugaaugucugugggcaggaagugaagagauccuucuguaaagguuuuuggaauuaugucugcugaauaauaaacuuuuuugaaauaauaaaucugguagaaaaaugagaucucaaaggcucuuuucagagccaccaaaaaaaaaaaaaaaaaaaaaaaaaaaaaaaaaaaaaaaaaaaaaaaaaaaaaaaaaaaaaaaaaaaaaaaaaaaaaaaaaaaaaaaaaaaaaaaaaaaaa

SEQ ID NO: 29119 - RNA, 1812 nt, Artificial Sequence
  mRNA product Design b-4 (hSL-A100) comprising derived and/or modified sequence from LASV(G733-SLE-2010;Clade IV)__AIT17154__GPCmut5 (opt1)
aggagagucccgcagucggcguccagcggcucugcuuguucgugugugugucguugcaggccuuauucaagcuuaccaugggccagaucgugaccuucuuccaggaggucccccacgugaucgaggaggugaugaacaucguccugaucgcccucagcauccuggccgugcugaaggggcucuacaacuucgcgaccugcggcaucguggggcuggucuccuuccugcuccugugcggccgcagcugcacgaccucccuguacaaggggguguacgagcuccagacccuggagcugaacauggagacccucaacaugacgaugccgcugagcugcaccaagaacaacucccaccacuacaucauggugggcaacgagaccggccuggagcucacccugacgaacaccagcaucaucaaccacaaguucugcaaccuguccgacgcccacaagaagaaccucuacgaccacgcccugaugagcaucaucuccaccuuccaccugagcauccccaacuucaaccaguacgaggccauguccugcgacuucaacgggggcaagaucagcguccaguacaaccucucccacagcuacgccggggacgcggccaaccacugcggcaccaucgccaacggggugcugcagacguucaugcggauggccuggggcggcuccuacaucgcgcuggacagcgggugcgaccggugggacugcaucaugaccuccuaccaguaccucaucauccagaacaccaccugggaggaccacugccaguucagccgccccucccccaucggcuaccuggggcugcucagccagcggacgcgcgacaucuacaucagccggcgccugcugggcaccuucaccuggacccucuccgacagcgagggcaaggacacgcccgggggcuacugccugacccgguggaugcugaucgaggccgagcucaagugcuucgggaacaccgccguggccaagugcaacgagaagcacgacgaggaguucugcgacaugcugcgccuguucgacuucaacaagcaggccauccagcggcucaaggcgcccgcccagauguccauccagcugaucaacaaggccgucaacgcccugaucaacgaccagcucaucaugaagaaccaccuccgcgacaucaugugcauccccuacugcaacuacagcaaguacugguaccugaaccacaccacgaccgggaagaccucccugcccaagugcuggcuggugagcaacggcuccuaccugaacgagacccacuucagcgacgacaucgagcagcaggccgacaacaugaucacggagaugcuccagaaggaguacauggagcggcagggcaagaccccgcuggggcugguggaccucuucgucuucuccaccagcuucuaccugaucuccaucuuccugcaccuggugaagaucccgacccaccgccacguggucggcaagagcugccccaagccccaccggcucaaccacauggggaucugcuccugcggccuguacgggcagcccggcgugccggugaaguggaagcgcugaggacuaguaauaaggaaacuguaugaaugucugugggcaggaagugaagagauccuucuguaaagguuuuuggaauuaugucugcugaauaauaaacuuuuuugaaauaauaaaucugguagaaaaaugagaucucaaaggcucuuuucagagccaccaaaaaaaaaaaaaaaaaaaaaaaaaaaaaaaaaaaaaaaaaaaaaaaaaaaaaaaaaaaaaaaaaaaaaaaaaaaaaaaaaaaaaaaaaaaaaaaaaaaaa

SEQ ID NO: 29120 - RNA, 1812 nt, Artificial Sequence
  mRNA product Design b-4 (hSL-A100) comprising derived and/or modified sequence from MOPV/LASV reassortant(IGS-1;Clade IV)__AFY05576__GPCmut5 (opt1)
aggagagucccgcagucggcguccagcggcucugcuuguucgugugugugucguugcaggccuuauucaagcuuaccaugggccagaucgugaccuucuuccaggaggucccccacgugaucgaggaggugaugaacaucguccugaucgcccucagcgugcuggccgugcugaaggggcucuacaacuucgcgaccugcggccuggucgggcuggugacguuccuccugcugugcggccgcuccugcaccaccagccucuacaaggggguguacgagcugcagacccuggagcucaacauggagacgcugaacaugaccaugccgcuguccugcaccaagaacaacagccaccacuacaucauggucggcaacgagaccggccucgagcugacgcugaccaacaccuccaucaucaaccacaaguucugcaaccucagcgacgcccacaagaagaaccuguacgaccacgcccugauguccaucaucagcaccuuccaccucuccauccccaacuucaaccaguacgaggccaugagcugcgacuucaacgggggcaagaucuccgugcaguacaaccugagccacuccuacgccggggacgcggccaaccacugcggcacgguggccaacgggguccugcagaccuucaugcggauggccuggggcggcagcuacaucgcgcucgacuccgggugcggcaacugggacugcaucaugaccagcuaccaguaccugaucauccagaacaccacgugggaggaccacugccaguucucccggcccagccccaucggguaccugggccuccugucccagcgcacccgggacaucuacaucagccgccggcugcucggcaccuucaccuggacgcugagcgacuccgagggggaggacaccccgggcggguacugccugacccgcuggaugcucaucgaggccgagcugaagugcuucggcaacaccgccguggccaagugcaacgagaagcacgacgaggaguucugcgacaugcugcggcuguucgacuucaacaagcaggccauccagcgccugaaggcgcccgcccagaugagcauccagcugaucaacaaggccgugaacgcccucaucaacgaccagcugaucaugaagaaccaccuccgggacaucaugugcauccccuacugcaacuacuccaaguacugguaccucaaccacacgaccaccggccgcaccagccugcccaagugcuggcuggucuccaacggcagcuaccucaacgagacgcacuucuccgacgacaucgagcagcaggccgacaacaugaucaccgagaugcugcagaaggaguacauggagcggcaggggaagacgccccugggccucguggaccuguucguguucagcaccuccuucuaccugaucagcaucuuccugcaccucgucaagaucccgacccaccgccacaucguggggaaguccugccccaagccccaccggcugaaccacaugggcaucugcagcugcgggcuguacaagcagcccggcgugccggucaaguggaagcgcugaggacuaguaauaaggaaacuguaugaaugucugugggcaggaagugaagagauccuucuguaaagguuuuuggaauuaugucugcugaauaauaaacuuuuuugaaauaauaaaucugguagaaaaaugagaucucaaaggcucuuuucagagccaccaaaaaaaaaaaaaaaaaaaaaaaaaaaaaaaaaaaaaaaaaaaaaaaaaaaaaaaaaaaaaaaaaaaaaaaaaaaaaaaaaaaaaaaaaaaaaaaaaaaaa

SEQ ID NO: 29121 - RNA, 1812 nt, Artificial Sequence
  mRNA product Design b-4 (hSL-A100) comprising derived and/or modified sequence from LASV(LM765-SLE-2012;Clade IV)__AIT17814__GPCmut5 (opt1)
aggagagucccgcagucggcguccagcggcucugcuuguucgugugugugucguugcaggccuuauucaagcuuaccaugggccagaucgugaccuucuuccaggaggucccccacgugaucgaggaggugaugaacaucguccugaucgcccucagcauccuggccgugcugaaggggcucuacaacuucgcgaccugcggccugguggggcuggucacguuccuccugcugugcggccgcuccugcaccaccagccucuacaaggggguguacgagcugcagacccuggagcucaacauggagacgcugaacaugaccaugccgcuguccugcaccaagaacaacagccaccacuacaucauggugggcaacgagaccggccucgagcugacgcugaccaacaccuccaucaucgaccacaaguucugcaaccucagcgacgcccaccggaagaaccuguacgaccacgcccugauguccaucaucagcaccuuccaccucuccauccccaacuucaaccaguacgaggccaugagcugcgacuucaacgggggcaagaucuccguccaguacaaccugagccacuccuacgccaaggacgcggccgaccacugcgggacgguggccaacggcgugcugcagaccuucaugcgcauggccuggggcgggagcuacaucgcgcucgacuccggcugcgggcgcugggacugcaucaugaccagcuaccaguaccugaucauccagaacaccacgugggaggaccacugccaguucucccggcccagccccaucggcuaccuggggcuccugucccagcgcacccgggacaucuacaucagccgccggcugcucggcaccuucaccuggacgcugagcgacuccgagggcaaggacacccccgggggcuacugccugacccgcuggaugcucaucgaggccgagcugaagugcuucgggaacaccgccgucgccaagugcaacgagaagcacgacgaggaguucugcgacaugcugcggcuguucgacuucaacaagcaggccauccagcgccugaaggcgcccgcccagaugagcauccagcugaucaacaaggccgugaacgcccucaucaacgaccagcugaucaugaagaaccaccuccgggacaucaugugcauccccuacugcaacuacuccaaguacugguaccucaaccacacgaccaccgggaagaccagccugcccaagugcuggcugguguccaacggcagcuaccucaacgagacgcacuucuccgacgacaucgagcagcaggccgacaacaugaucaccgagaugcugcagaaggaguacauggagcgccagggcaagaccccgcuggggcucgucgaccuguucguguucagcaccuccuucuaccugaucagcaucuuccugcaccucgugaagaucccgacgcaccggcacaucgucggcaagcccugccccaagccccaccgccugaaccacauggggaucugcuccugcggccuguacaagcagccgggggugcccgugaaguggaagcggugaggacuaguaauaaggaaacuguaugaaugucugugggcaggaagugaagagauccuucuguaaagguuuuuggaauuaugucugcugaauaauaaacuuuuuugaaauaauaaaucugguagaaaaaugagaucucaaaggcucuuuucagagccaccaaaaaaaaaaaaaaaaaaaaaaaaaaaaaaaaaaaaaaaaaaaaaaaaaaaaaaaaaaaaaaaaaaaaaaaaaaaaaaaaaaaaaaaaaaaaaaaaaaaaa

SEQ ID NO: 29122 - RNA, 1812 nt, Artificial Sequence
  mRNA product Design b-4 (hSL-A100) comprising derived and/or modified sequence from LASV(LM776-SLE-2012;Clade IV)__AIT17824__GPCmut5 (opt1)
aggagagucccgcagucggcguccagcggcucugcuuguucgugugugugucguugcaggccuuauucaagcuuaccaugggccagaucgugaccuucuuccaggaggucccccacgugaucgaggaggugaugaacaucguccugaucgcccucagcauccuggccgugcugaaggggcucuacaacuucgcgaccugcggccugguggggcuggucacguuccuccugcugugcggccgcuccugcaccaccagcguguacaaggggguguacgagcuccagacccuggagcugaacauggagacgcucaacaugaccaugccgcuguccugcaccaagaacaacagccaccacuacaucauggucggcaacgagaccggccuggagcucacgcugaccaacaccuccaucaucaaccacaaguucugcaaccugagcgacgcccacaagaagaaccucuacgaccacgcccugauguccaucaucagcaccuuccaccuguccauccccaacuucaaccaguacgaggccaugagcugcgacuucaacgggggcaagaucuccgugcaguacaaccucagccacuccuacgccggggacgcggccaaccacugcggcacgguggccaacgggguccugcagaccuucaugcggauggccuggggcggcagcuacaucgcgcuggacuccgggugcggcaagugggacugcaucaugaccagcuaccaguaccucaucauccagaacaccacgugggaggaccacugccaguucucccgccccagccccaucggguaccugggccugcucucccagcggacccgcgacaucuacaucagccggcgccugcugggcaccuucaccuggacgcucagcgacuccgaggggaaggacaccccgggcggguacugccugacccgguggaugcugaucgaggccgagcucaagugcuucggcaacaccgccguggccaagugcaacgagaagcacgacgaggaguucugcgacaugcugcgccuguucgacuucaacaagcaggccauccagcggcucaaggcgcccgcccagaugagcauccagcugaucaacaaggccgugaacgcccugaucaacgaccagcucaucaugaagaaccaccuccgcgacaucaugugcauccccuacugcaacuacuccaaguacugguaccugaaccacacgaccaccggcaagaccagccugcccaagugcuggcuggucuccaacggcagcuaccugaacgagacgcacuucuccgacgacaucgagcagcaggccgacaacaugaucaccgagaugcuccagaaggaguacauggagcggcaggggaagacgccccugggccugguggaccucuucguguucagcaccuccuucuaccugaucagcaucuuccugcaccuggucaagaucccgacccaccgccacaucguggggaaguccugccccaagccccaccggcucaaccacaugggcaucugcagcugcgggcuguacaagcagcccggcgugccgguccgcuggaagcggugaggacuaguaauaaggaaacuguaugaaugucugugggcaggaagugaagagauccuucuguaaagguuuuuggaauuaugucugcugaauaauaaacuuuuuugaaauaauaaaucugguagaaaaaugagaucucaaaggcucuuuucagagccaccaaaaaaaaaaaaaaaaaaaaaaaaaaaaaaaaaaaaaaaaaaaaaaaaaaaaaaaaaaaaaaaaaaaaaaaaaaaaaaaaaaaaaaaaaaaaaaaaaaaaa

SEQ ID NO: 29123 - RNA, 1812 nt, Artificial Sequence
  mRNA product Design b-4 (hSL-A100) comprising derived and/or modified sequence from LASV(Mad39;Clade IV)__ANH09722__GPCmut5 (opt1)
aggagagucccgcagucggcguccagcggcucugcuuguucgugugugugucguugcaggccuuauucaagcuuaccaugggccagaucgugaccuucuuccaggaggucccccacgugaucgaggaggugaugaacaucguccugaucgcccucagcauccuggccgugcugaaggggcucuacaacguggcgaccugcggccugaucgggcuggucacguuccuccugcugugcggccgcuccugcaccaccacccucuacaaggggguguacgagcugcaggcccuggagcucaacauggagacgcugaacaugaccaugccgcugagcugcaccaagaacaacucccaccacuacauccgggugggcaacgagaccggccucgagcugacgcugaccaacaccagccucaucaaccacaaguucugcaaccuguccgacgcccacaagaagaaccuguacgaccacgcccucaugagcaucaucuccaccuuccaccugagcauccccaacuucaaccaguacgaggccauguccugcgacuucaacgacgggaagaucagcguccaguacaaccugucccacacguacgcgggcgacaccgccaaccacugcgggaccguggccaacggcgugcuccagaccuucaugcgcauggccuggggcgggagcuacaucgcgcuggacuccggcugcgggggcugggacugcaucaugacgagcuaccaguaccugaucauccagaacaccaccugggaggaccacugccaguucucccggcccagccccaucggguaccucggccugcugucccagcggacccgcgacaucuacaucagccggcgccuccugggcacguucaccuggacccuguccgacagcgaggggaaggacaccccgggcggguacugccucacgcgguggaugcugaucgaggccgagcugaagugcuucggcaacaccgccgucgccaagugcaacgagaagcacgacgaggaguucugcgacaugcuccgccuguucgacuucaacaagcaggccauccagcggcugaaggcgcccgcccagaugagcauccagcucaucaacaaggccgugaacgcccugaucaacgaccagcugaucaugaagaaccaccuccgcgacaucaugugcauccccuacugcaacuacuccaaguacugguaccugaaccacaccgugaccggcaagacgagccugcccaagugcuggcucgucuccaacggcagcuaccugaacgagacccacuucuccgacgacaucgagcagcaggccgacaacaugaucaccgagaugcugcagaaggaguacauggagcggcaggggaagacgccccucggccugguggaccuguucguguucagcaccuccuucuaccugaucagcaucuuccuccaccuggucaagaucccgacccaccgccacgugguggggaagcccugccccaagccccaccggcugaaccacaugggcaucugcuccugcggguucuacaagcagccgggcguccccgugcgcuggaagcggugaggacuaguaauaaggaaacuguaugaaugucugugggcaggaagugaagagauccuucuguaaagguuuuuggaauuaugucugcugaauaauaaacuuuuuugaaauaauaaaucugguagaaaaaugagaucucaaaggcucuuuucagagccaccaaaaaaaaaaaaaaaaaaaaaaaaaaaaaaaaaaaaaaaaaaaaaaaaaaaaaaaaaaaaaaaaaaaaaaaaaaaaaaaaaaaaaaaaaaaaaaaaaaaaa

SEQ ID NO: 29124 - RNA, 1812 nt, Artificial Sequence
  mRNA product Design b-4 (hSL-A100) comprising derived and/or modified sequence from LASV(Z0947-SLE-2011;Clade IV)__AIT17840__GPCmut5 (opt1)
aggagagucccgcagucggcguccagcggcucugcuuguucgugugugugucguugcaggccuuauucaagcuuaccaugggccagaucgugaccuucuuccaggaggucccccacgugaucgaggaggugaugaacaucguccugaucgcccucagcauccuggccgugcugaaggggcucuacaacuucgcgaccugcggccugguggggcuggucacguuccuccugcugugcggccgcuccugcaccaucagccucuacaaggggguguacgagcugcagacccuggagcucaacauggagacccugaacaugacgaugccgcuguccugcaccaagaacaacagccaccacuacaucauggugggcaacgagaccggccucgagcugacccugacgaacaccuccaucaucaaccacaaguucugcaaccucagcgacgcccacaagaagaaccuguacgaccacgcccugauguccaucaucagcaccuuccaccucuccauccccaacuucaaccaguacgaggccaugagcugcgacuucaacgggggcaagaucuccguccaguacaaccugagccacuccuacgccggggacgcggccaaccacugcggcaccguggccaacggggugcugcagacguucaugcggauggccuggggcggcagcuacaucgcgcucgacuccgggugcgaccggugggacugcaucaugaccagcuaccaguaccugaucauccagaacaccaccugggaggaccacugccaguucucccgccccagccccaucggcuaccuggggcuccugucccagcggacgcgcgacaucuacaucagccggcgccugcucggcaccuucaccuggacccugagcgacuccgagggcaaggacacgcccgggggcuacugccugacccgguggaugcucaucgaggccgagcugaagugcuucgggaacaccgccgucgccaagugcaacgagaagcacgacgaggaguucugcgacaugcugcgccucuucgacuucaacaagcaggccauccagcggcugaaggcgcccgcccagaugagcauccagcugaucaacaaggccgugaacgcccucaucaacgaccagcugaucaugaagaaccaccuccgcgacaucaugugcauccccuacugcaacuacuccaaguacugguaccugaaccacaccacgaccgggaagaccagccugcccaagugcuggcugguguccaacggcagcuaccucaacgagacccacuucuccgacgacaucgagcagcaggccgacaacaugaucacggagaugcugcagaaggaguacauggagcggcagggcaagaccccgcuggggcucgucgaccuguucguguucagcaccuccuucuaccugaucagcaucuuccugcaccucgugaagaucccgacccaccgccacaucgucggcaagcccugccccaagccccaccggcugaaccacauggggaucugcuccugcggccuguacaagcagccgggggugcccgugaaguggaagcgcugaggacuaguaauaaggaaacuguaugaaugucugugggcaggaagugaagagauccuucuguaaagguuuuuggaauuaugucugcugaauaauaaacuuuuuugaaauaauaaaucugguagaaaaaugagaucucaaaggcucuuuucagagccaccaaaaaaaaaaaaaaaaaaaaaaaaaaaaaaaaaaaaaaaaaaaaaaaaaaaaaaaaaaaaaaaaaaaaaaaaaaaaaaaaaaaaaaaaaaaaaaaaaaaaa

SEQ ID NO: 29125 - RNA, 1812 nt, Artificial Sequence
  mRNA product Design b-4 (hSL-A100) comprising derived and/or modified sequence from LASV(Josiah;Clade IV)__NP_694870__GPCmut5 (opt1)
aggagagucccgcagucggcguccagcggcucugcuuguucgugugugugucguugcaggccuuauucaagcuuaccaugggccagaucgugaccuucuuccaggaggucccccacgugaucgaggaggugaugaacaucguccugaucgcccucagcgugcuggccgugcugaaggggcucuacaacuucgcgaccugcggccuggucgggcuggugacguuccuccugcugugcggccgcuccugcaccaccagccucuacaaggggguguacgagcugcagacccuggagcucaacauggagacgcugaacaugaccaugccgcuguccugcaccaagaacaacagccaccacuacaucauggucggcaacgagaccggccucgagcugacgcugaccaacaccuccaucaucaaccacaaguucugcaaccucagcgacgcccacaagaagaaccuguacgaccacgcccugauguccaucaucagcaccuuccaccucuccauccccaacuucaaccaguacgaggccaugagcugcgacuucaacgggggcaagaucuccgugcaguacaaccugagccacuccuacgccggggacgcggccaaccacugcggcacgguggccaacgggguccugcagaccuucaugcggauggccuggggcggcagcuacaucgcgcucgacuccgggugcggcaacugggacugcaucaugaccagcuaccaguaccugaucauccagaacaccacgugggaggaccacugccaguucucccgccccagccccaucggguaccugggccuccugucccagcggacccgcgacaucuacaucagccggcgccugcucggcaccuucaccuggacgcugagcgacuccgaggggaaggacaccccgggcggguacugccugacccgguggaugcucaucgaggccgagcugaagugcuucggcaacaccgccguggccaagugcaacgagaagcacgacgaggaguucugcgacaugcugcgccucuucgacuucaacaagcaggccauccagcggcugaaggcgcccgcccagaugagcauccagcugaucaacaaggccgugaacgcccucaucaacgaccagcugaucaugaagaaccaccuccgcgacaucaugugcauccccuacugcaacuacuccaaguacugguaccugaaccacacgaccaccgggcggaccagccugcccaagugcuggcuggucuccaacggcagcuaccucaacgagacgcacuucuccgacgacaucgagcagcaggccgacaacaugaucaccgagaugcugcagaaggaguacauggagcgccagggcaagaccccgcuggggcugguggaccucuucguguucagcaccuccuucuaccugaucagcaucuuccugcaccucgucaagauccccacgcaccggcacaucgugggcaaguccugccccaagccccaccgccugaaccacauggggaucugcagcugcggccuguacaagcagccgggggugcccgucaaguggaagcggugaggacuaguaauaaggaaacuguaugaaugucugugggcaggaagugaagagauccuucuguaaagguuuuuggaauuaugucugcugaauaauaaacuuuuuugaaauaauaaaucugguagaaaaaugagaucucaaaggcucuuuucagagccaccaaaaaaaaaaaaaaaaaaaaaaaaaaaaaaaaaaaaaaaaaaaaaaaaaaaaaaaaaaaaaaaaaaaaaaaaaaaaaaaaaaaaaaaaaaaaaaaaaaaaa

SEQ ID NO: 29126 - RNA, 1809 nt, Artificial Sequence
  mRNA product Design b-4 (hSL-A100) comprising derived and/or modified sequence from LASV(LP;Clade I)__AAF86701__GPCmut5 (opt1)
aggagagucccgcagucggcguccagcggcucugcuuguucgugugugugucguugcaggccuuauucaagcuuaccaugggccagaucaucaccuucuuccaggaggugccccacgucaucgaggaggugaugaacaucgugcugaucgcccucagccugcuggccauccucaaggggcuguacaacaucgcgaccugcggcaucaucgggcuggucgccuuccucuuccugugcggcaaguccugcagccugacgcucaagggcggguacgagcugcagacccuggagcucaacauggagacccugaacaugaccaugccgcuguccugcacgaagaacagcucccaccacuacauccgcgugggcaacgagaccgggcucgagcugacccugaccaacacgagcaucaucaaccacaaguucugcaaccucuccgacgcccacaagaagaaccuguacgaccacgcccugaugagcaucaucuccaccuuccaccucagcauccccaacuucaaccaguacgaggccauguccugcgacuucaacggcgggaagaucagcgugcaguacaaccugucccacagcuacgcgggcgacgccgccgagcacugcgggaccgucgccaacggcgugcugcagaccuucaugcggauggcguggggcgggcgcuacaucgcccucgacuccggcugcgggaacugggacugcaucaugacgagcuaccaguaccugaucauccagaacaccaccugggaggaccacugccaguucucccggcccagccccaucggcuaccugggccuccugucccagcgcacccgggacaucuacaucagccgccggcugcucgggacguucaccuggacccugagcgacuccgagggcaacgagacccccgggggcuacugccugacgcgcuggaugcucaucgaggccgagcugaagugcuucgggaacaccgccguggccaagugcaacgagaagcacgacgaggaguucugcgacaugcugcggcuguucgacuucaacaagcaggcgauccgccggcugaaggccccggcccagaugagcauccagcugaucaacaaggccgucaacgcccucaucaacgaccagcugaucaugaagaaccaccuccgcgacaucaugugcauccccuacugcaacuacuccaaguacugguaccucaaccacaccagcuccggccggaccagccugcccaagugcuggcugaucuccaacggcagcuaccucaacgagacgcaguucuccgacgacaucgagcagcaggcggacaacaugaucaccgagaugcugcagaaggaguacaucgagcgccaggggaagaccccgcugggccugguggacaucuucaucuucagcaccuccuucuaccucaucagcaucuuccugcaccugaucaagauccccacgcaccggcacaucguggggaagcccugccccaagccgcaccgccucaaccacaugggcgucugcuccugcgggcuguacaagcaccccggcgugcccaccaaguggaagcggugaggacuaguaauaaggaaacuguaugaaugucugugggcaggaagugaagagauccuucuguaaagguuuuuggaauuaugucugcugaauaauaaacuuuuuugaaauaauaaaucugguagaaaaaugagaucucaaaggcucuuuucagagccaccaaaaaaaaaaaaaaaaaaaaaaaaaaaaaaaaaaaaaaaaaaaaaaaaaaaaaaaaaaaaaaaaaaaaaaaaaaaaaaaaaaaaaaaaaaaaaaaaaaaaa

SEQ ID NO: 29127 - RNA, 1809 nt, Artificial Sequence
  mRNA product Design b-4 (hSL-A100) comprising derived and/or modified sequence from LASV(803213;Clade II)__AAF86703__GPCmut5 (opt1)
aggagagucccgcagucggcguccagcggcucugcuuguucgugugugugucguugcaggccuuauucaagcuuaccaugggccagaucaucaccuucuuccaggaggugccccacgucaucgaggaggugaugaacaucgugcugaucgcccucagccugcuggccauccucaaggggaucuacaacgucgcgaccugcggccuguucgggcugaucuccuuccuccugcugugcggccgcagcugcuccgugacguacaaggggguguacgagcuccagacccuggagcugaacauggccaaccucaacaugaccaugccgcugagcugcaccaagaacaacucccaccacuacaucauggucggcaacgagacgggccuggagcucacccugaccaacaccagcaucaucaaccacaaguucugcaaccuguccgacgcccacaagaagaaccucuacgaccacgcccugaugagcaucaucuccacguuccaccugagcauccccaacuucaaccaguacgaggccauguccugcgacuucaacgggggcaagaucagcgugcaguacaaccucucccacagcuucgcgguggacgccgccaaccacugcgggaccaucgccaacggcguccugcagaccuucaugcggauggcguggggcggguccuacaucgcccuggacagcggcugcgggaacugggacugcaucaugaccuccuaccaguaccucaucauccagaacacgaccugggaggaccacugccaguucagccgccccucccccaucggcuaccuggggcugcucagccagcggacccgcgacaucuacaucagccggcgccugcugggcaccuucacguggacccucuccgacagcgagggcaacgaggcccccgggggcuacugccugacccgguggaugcugaucgaggccgagcucaagugcuucgggaacaccgccguggcgaagugcaacgagaagcacgacgaggaguucugcgacaugcugcgccuguucgacuucaacaagcaggccaucaagcggcucaagacgccggcccagauguccauccagcugaucaacaaggccgugaacgcccugaucaacgaccagcucaucaugaagaaccaccuccgcgacaucaugugcauccccuacugcaacuacagccgguacugguaccugaaccacaccgucaccggcaagaccucccugccccgcugcuggcuggugagcaacggguccuaccugaacgagacgcacuucagcgacgacaucgagcagcaggcggacaacaugaucaccgagaugcuccagaaggaguacauggaccggcagggcaagaccccgcugggccugguggaccuguucgucuucuccaccagcuucuaccucaucuccaucuuccugcaccuggugaagauccccacgcaccgccacaucguggggaagcccugccccaagccgcaccggcucaaccacaugggcaucugcagcugcgggcuguacaagcaccccggcguccccgugaaguggaagcgcugaggacuaguaauaaggaaacuguaugaaugucugugggcaggaagugaagagauccuucuguaaagguuuuuggaauuaugucugcugaauaauaaacuuuuuugaaauaauaaaucugguagaaaaaugagaucucaaaggcucuuuucagagccaccaaaaaaaaaaaaaaaaaaaaaaaaaaaaaaaaaaaaaaaaaaaaaaaaaaaaaaaaaaaaaaaaaaaaaaaaaaaaaaaaaaaaaaaaaaaaaaaaaaaaa

SEQ ID NO: 29128 - RNA, 1809 nt, Artificial Sequence
  mRNA product Design b-4 (hSL-A100) comprising derived and/or modified sequence from LASV(GA391;Clade III)__CAA36645__GPCmut5 (opt1)
aggagagucccgcagucggcguccagcggcucugcuuguucgugugugugucguugcaggccuuauucaagcuuaccaugggccagaucgugaccuucuuccaggaggucccccacgugaucgaggaggugaugaacaucguccugaucgcccucagcauccuggccauccugaaggggcucuacaacguggcgaccugcggccugaucgggcuggugacguuccuccugcuguccggccgcagcugcucccucaucuacaaggggaccuacgagcugcagacccuggagcucaacauggagacccugaacaugacgaugccgcugagcugcaccaagaacaacucccaccacuacauccgggucggcaacgagaccggccucgagcugacccugacgaacaccagcauccucaaccacaaguucugcaaccuguccgacgcccacaagcgcaaccuguacgaccacagccucauguccaucaucagcaccuuccaccuguccauccccaacuucaaccaguacgaggccaugagcugcgacuucaacgggggcaagaucaccgugcaguacaaccugucccacagcuucgccguggacgccgcggggcacugcggcacgcucgccaacgggguccugcagaccuucaugcggauggccuggggcggcuccuacaucgcccuggacagcgggugcggcaacugggacugcaucaugaccuccuaccaguaccucaucauccagaacaccacgugggacgaccacugccaguucagccgccccucccccaucggguaccugggccugcucagccagcggacccgcgacaucuacaucagccggcgccugcugggcaccuucaccuggacgcucuccgacagcgaggggaacgagaccccgggcggguacugccugacccgguggaugcugaucgaggcggagcucaagugcuucggcaacaccgccguggccaagugcaacgagaagcacgacgaggaguucugcgacaugcugcgccuguucgacuucaacaagcaggccauccggcgccucaagacgcccgcccagauguccauccagcugaucaacaaggcggugaacgcccugaucaacgaccagcucaucaugaagaaccaccuccgggacaucaugugcauccccuacugcaacuacagccgcuacugguaccugaaccacaccuccaccgggaagaccagccugccccggugcuggcugaucuccaacggcagcuaccugaacgagacgaaguucuccgacgacaucgagcagcaggccgacaacaugaucaccgagaugcugcagaaggaguacaucgaccgccagggcaagaccccgcucgggcuggucgaccuguucguguucagcaccuccuucuaccucaucagcaucuuccugcaccuggugaagauccccacgcaccggcacaucgucggcaagcccugccccaagccgcaccgccucaaccacauggggaucugcuccugcggccuguacaagcagcccggggugcccgugcgguggaagcgcugaggacuaguaauaaggaaacuguaugaaugucugugggcaggaagugaagagauccuucuguaaagguuuuuggaauuaugucugcugaauaauaaacuuuuuugaaauaauaaaucugguagaaaaaugagaucucaaaggcucuuuucagagccaccaaaaaaaaaaaaaaaaaaaaaaaaaaaaaaaaaaaaaaaaaaaaaaaaaaaaaaaaaaaaaaaaaaaaaaaaaaaaaaaaaaaaaaaaaaaaaaaaaaaaa

SEQ ID NO: 29129 - RNA, 1812 nt, Artificial Sequence
  mRNA product Design b-4 (hSL-A100) comprising derived and/or modified sequence from LASV(AV;Clade V)__CCA30314__GPCmut5 (opt1)
aggagagucccgcagucggcguccagcggcucugcuuguucgugugugugucguugcaggccuuauucaagcuuaccaugggccagaucgugaccuucuuccaggaggucccccacgugaucgaggaggugaugaacaucguccugaucgcccucagcauccuggccgugcugaaggggcucuacaacaucgcgaccugcggccugaucgggcugaucacguuccuccugcugugcggccgcuccugcagcuccaaccucuacaaggggguguacgagcugcagagccuggaccucaacauggagacccugaacaugaccaugccgcuguccugcaccaagaacaacagccaccacuacauccgggucggcaacgacacgggccucgagcugacccugaccaacaccuccauccucaaccacaaguucugcaaccugagcgacgcccacaagaaggaccuguacgaccacgcccucauguccaucaucagcacguuccaccuguccauccccaacuucaaccaguacgaggccaugagcugcgacuucaacgggggcaagaucuccgugcaguacaaccugagccacuccuacgccaucgacgcggccaaccacugcgggaccguggccaacggcauccuccagaccuucaugcgcauggccuggggcgggagcuacaucgcgcuggacuccggcugcgggaacugggacugcaucaugaccagcuaccaguaccugaucauccagaacacgaccugggagaaccacugccaguucucccggcccagccccaucggcuaccucgggcugcugagccagcgcacccgggacaucuacaucucccgccggcuccugggcaccuucacguggacccugagcgacuccgagggcaacgccacccccgggggcuacugccucacccgcuggaugcugaucgaggccgagcugaagugcuucgggaacacggccgucgccaagugcaacgagaagcacgacgaggaguucugcgacaugcuccggcuguucgacuucaacaagcaggcgaucagccgccugaaguccccggcccagaugagcauccagcucaucaacaaggccgugaacgcccugaucaacgaccagcugaucaugaagaaccaccuccgggacaucaugugcauccccuacugcaacuacuccaaguacugguaccugaaccacaccaucaccggcaagaccagccugcccaagugcuggcucguguccaacgggagcuaccugaacgagacgcacuucuccgacgacaucgagcagcaggccgacaacaugaucaccgagaugcugcagaaggaguacauggagcgccagggcaagaccccgcugggccucgucgaccuguucguguucagcaccuccuucuaccugaucagcaucuuccuccggcuggugaagauccccacgcaccgccacaucgucgggaagcccugccccaagccgcaccggcugaaccacaugggcaucugcuccugcgggcucuacaagcagcccggcgugcccgugcgcuggaagcggugaggacuaguaauaaggaaacuguaugaaugucugugggcaggaagugaagagauccuucuguaaagguuuuuggaauuaugucugcugaauaauaaacuuuuuugaaauaauaaaucugguagaaaaaugagaucucaaaggcucuuuucagagccaccaaaaaaaaaaaaaaaaaaaaaaaaaaaaaaaaaaaaaaaaaaaaaaaaaaaaaaaaaaaaaaaaaaaaaaaaaaaaaaaaaaaaaaaaaaaaaaaaaaaaa

SEQ ID NO: 29130 - RNA, 1809 nt, Artificial Sequence
  mRNA product Design b-4 (hSL-A100) comprising derived and/or modified sequence from LASV(Togo/2016/7082;Clade VI)__AMR44577__GPCmut5 (opt1)
aggagagucccgcagucggcguccagcggcucugcuuguucgugugugugucguugcaggccuuauucaagcuuaccaugggccagaucaucaccuucuuccaggaggugccccacgucaucgaggaggugaugaacaucgugcugaucgcccucagccugcuggccauccucaagggggucuacaacguggcgaccugcggcaucaucgggcuggugacguuccuguuccucugcggccgcuccugcagccugaucuacaagggguccuacgagcugcagacccucgagcugaacauggagacccugaacaugaccaugccgcucagcugcacgaagaacuccagccaccacuacauccgggucggcaacgagaccggccuggagcugacccucaccaacacguccaucaucaaccacaaguucugcaaccugagcgacgcccacaagcgcaaccuguacgaccacgcccucauguccauccugagcaccuuccaccuguccauccccaacuucaaccaguacgaggccaugagcugcgacuucaacgggggcaagaucuccgugcaguacaaccucagccacgccuacgcgguggacgccgccgagcacugcgggaccgucgccaacggcgugcugcagaccuucaugcggauggcguggggcggguccuacaucgcccuggacagcggcugcgggaacugggacugcaucaugacguccuaccaguaccucaucauccagaacaccaccugggaggaccacugccaguucagccgccccucccccaucggcuaccuggggcugcucagccagcggacccgcgacaucuacaucagccggcgccugcugggcacguucaccuggacccucuccgacagcgagggcaacgagacccccgggggcuacugccugacgcgguggaugcugaucgaggccgagcucaagugcuucgggaacaccgccguggccaagugcaacgagaagcacgacgaggaguucugcgacaugcugcgccuguucgacuucaacaagcaggcgauccagcggcucaaguccccggcccagaugagcauccagcugaucaacaaggccgucaacgcccugaucaacgaccagcucaucaugaagaaccaccuccgcgacaugaugugcauccccuacugcaacuacuccaaguacugguaccugaaccacaccagcuccggccggaccagccugcccaagugcuggcugguguccaacgggagcuaccugaacgagacgcacuucuccgacgacaucgagcagcaggccgacaacaugaucaccgagaugcuccagaaggaguacaucgaccgccagggcaagaccccgcugggccugguggaccuguucgucuucagcaccuccuucuaccucaucagcaucuuccugcaccugaucaagauccccacgcaccggcacaucguggggaagcccugccccaagccgcaccgccucaaccacaugggcaucugcuccugcgggcuguacaagcagcccggcgugcccacccgguggaagcgcugaggacuaguaauaaggaaacuguaugaaugucugugggcaggaagugaagagauccuucuguaaagguuuuuggaauuaugucugcugaauaauaaacuuuuuugaaauaauaaaucugguagaaaaaugagaucucaaaggcucuuuucagagccaccaaaaaaaaaaaaaaaaaaaaaaaaaaaaaaaaaaaaaaaaaaaaaaaaaaaaaaaaaaaaaaaaaaaaaaaaaaaaaaaaaaaaaaaaaaaaaaaaaaaaa

SEQ ID NO: 29131 - RNA, 1809 nt, Artificial Sequence
  mRNA product Design b-4 (hSL-A100) comprising derived and/or modified sequence from LASV(KAK-428;Clade n.d. (VII))__ANH09740__GPCmut5 (opt1)
aggagagucccgcagucggcguccagcggcucugcuuguucgugugugugucguugcaggccuuauucaagcuuaccaugggccagaucgugaccuucuuccaggaggucccccacgugaucgaggaggugaugaacaucguccugaucgcccucagccugcuggccauccucaaggggcuguacaacuucgcgaccugcggcgugaucgggcugaucacguuccuccugcugugcggccgcuccugcagcgccaccuacaaggggcaguacgagcuccagacccuggagcugaacauggagucccucaacaugaccaugccgcugagcugcacgaagaacaacucccaccacuacauccgggccggcaacaacaccggccuggagcucacccugaccaacacgagcaucaucucccacaaguucugcaaccugagcgacgcccacaagaagaaccucuacgaccacacccugauguccaucaucaccaccuuccaccugagcauccccaacuucaaccaguacgaggccauguccugcgacuucaacgggggcaagaucagcauccaguacaaccucucccacagcuacgcgggggacgccgcccagcacugcggcacgguggccaacgggguccugcagaccuucaugcgcauggcguggggcggcuccuaccuggcccucgacagcgggugccggggcugggacugcaucaucuccagcuaccaguaccugaucauccagaacaccaccugggacgaccacugccaguucucccgccccagccccaucggguaccugggcuucgugagccagaagacgcgggacaucuacaucucccgccggcuccugggcaccuucaccuggacccugagcgacuccgaggggcacgacaugccgggcggguacugccucacgcgcuggaugcugaucgaggccgaccugaagugcuucggcaacaccgccguggccaagugcaacgagaagcacgacgaggaguucugcgacauguggcggcuguucgacuucaacaagcaggcgauccagcgccugaaggcccccgcccagaugaacauccagcugaucaacaaggccgucaacgcccucaucaacgaccagcugaugaugaagaaccaccuccgggacaucaugugcauccccuacugcaacuacagcaaguucugguaccucaacaacaccaccacggggcgcaccucccugccccggugcuggcugaucagcaacggcuccuaccucaacgagacccacuucagcgacgacaucgagcagcaggcggacaacaugaucaccgagaugcugcagaaggaguacauggaccgccagggcaagacgccgcuggggcucguggaccuguucguguucuccaccagcuucuaccugaucaccaucuuccugcaccucgucaagauccccacccaccggcacaucgugggcaagcccugccccaagccgcaccgccugaaccacauggggaucugcuccugcggccuguacaagcagcccggggugcccguccgguggaagcgcugaggacuaguaauaaggaaacuguaugaaugucugugggcaggaagugaagagauccuucuguaaagguuuuuggaauuaugucugcugaauaauaaacuuuuuugaaauaauaaaucugguagaaaaaugagaucucaaaggcucuuuucagagccaccaaaaaaaaaaaaaaaaaaaaaaaaaaaaaaaaaaaaaaaaaaaaaaaaaaaaaaaaaaaaaaaaaaaaaaaaaaaaaaaaaaaaaaaaaaaaaaaaaaaaa

SEQ ID NO: 29132 - RNA, 1809 nt, Artificial Sequence; identical to SEQ ID NO: 29126
  mRNA product Design b-4 (hSL-A100) comprising derived and/or modified sequence from LASV(Pinneo-NIG-1969;Clade I)__AIT17836__GPCmut5 (opt1)

SEQ ID NO: 29133 - RNA, 1809 nt, Artificial Sequence
  mRNA product Design b-4 (hSL-A100) comprising derived and/or modified sequence from LASV(ISTH0009-NIG-2011;Clade II)__AIT17404__GPCmut5 (opt1)
aggagagucccgcagucggcguccagcggcucugcuuguucgugugugugucguugcaggccuuauucaagcuuaccaugggccagaucaucaccuucuuccaggaggugccccacgucaucgaggaggugaugaacaucgugcugaucgcccucagccugcuggccauccucaaggggaucuacaacgucgcgaccugcggccuguucgggcugguguccuuccuccugcugugcggccgcagcugcuccacgaccuacaaggggguguacgagcuccagacccuggagcuggacauggccagccucaacaugaccaugccgcuguccugcacgaagaacaacagccaccacuacaucauggucggcaacgagaccggccuggagcucacccugaccaacacguccaucaucaaccacaaguucugcaaccugagcgacgcccacaagaagaaccucuacgaccacgcccugauguccaucaucagcaccuuccaccuguccauccccaacuucaaccaguacgaggccaugagcugcgacuucaacgggggcaagaucuccgugcaguacaaccucagccacgcguacgccguggacgccgccaaccacugcgggaccaucgcgaacggcguccugcagaccuucaugcggauggccuggggcggguccuacaucgcccuggacagcggcugcggguccugggacugcaucaugacgagcuaccaguaccucaucauccagaacaccaccugggaggaccacugccaguucucccgccccagccccaucggcuaccuggggcugcucagccagcggacccgcgacaucuacaucucccggcgccugcugggcacguucaccuggacccucagcgacuccgagggcaacgagacccccgggggcuacugccugacgcgguggaugcugaucgaggccgagcucaagugcuucgggaacaccgccguggcgaagugcaacgagaagcacgacgaggaguucugcgacaugcugcgccuguucgacuucaacaagcaggccauccggcgccucaagaccccggcccagaugagcauccagcugaucaacaaggccgugaacgcccugaucaacgaccagcucaucaugaagaaccaccuccgggacaucaugugcauccccuacugcaacuacuccaaguacugguaccugaaccacaccgucacgggcaagaccagccugccccgcugcuggcugguguccaacgggagcuaccugaacgagacccacuucuccgacgacaucgagcagcaggcggacaacaugaucaccgagcuccugcagaaggaguacauggaccggcagggcaagacgccgcugggccugguggaccucuucgucuucagcaccuccuucuaccugaucagcaucuuccugcaccucaucaagauccccacccaccgccacaucaccgggaagcccugccccaagccgcaccggcugaaccacaugggcaucugcuccugcgggcuguacaagcaccccggcgugcccgugaaguggaagcgcugaggacuaguaauaaggaaacuguaugaaugucugugggcaggaagugaagagauccuucuguaaagguuuuuggaauuaugucugcugaauaauaaacuuuuuugaaauaauaaaucugguagaaaaaugagaucucaaaggcucuuuucagagccaccaaaaaaaaaaaaaaaaaaaaaaaaaaaaaaaaaaaaaaaaaaaaaaaaaaaaaaaaaaaaaaaaaaaaaaaaaaaaaaaaaaaaaaaaaaaaaaaaaaaaa

SEQ ID NO: 29134 - RNA, 1809 nt, Artificial Sequence
  mRNA product Design b-4 (hSL-A100) comprising derived and/or modified sequence from LASV(ISTH2010-NIG-2012;Clade II)__AIT17482__GPCmut5 (opt1)
aggagagucccgcagucggcguccagcggcucugcuuguucgugugugugucguugcaggccuuauucaagcuuaccaugggccagaucaucaccuucuuccaggaggugccccacgucaucgaggaggugaugaacaucgugcugaucgcccucagccugcuggccauccucaaggggaucuacaacgucgcgaccugcggccuguucgggcugguguccuuccuccugcugugcggccgcagcugcuccacgaccuacaaggggguguacgagcuccagacccuggagcuggacauggccagccucaacaugaccaugccgcuguccugcacgaagaacaacagccaccacuacaucauggucggcaacgagaccggccuggagcucacccugaccaacacguccaucaucaaccacaaguucugcaaccugagcgacgcccacaagaagaaccucuacgaccacgcccugauguccaucaucagcaccuuccaccuguccauccccaacuucaaccaguacgaggccaugagcugcgacuucaacgggggcaagaucuccgugcaguacaaccucagccacgcguacgccguggacgccgccaaccacugcgggaccaucgcgaacggcguccugcagaccuucaugcggauggccuggggcggguccuacaucgcccuggacagcggcugcggguccugggacugcaucaugacgagcuaccaguaccucaucauccagaacaucaccugggaggaccacugccaguucucccgccccagccccaucggcuaccuggggcugcucagccagcggacccgcgacaucuacaucucccggcgccugcugggcaccuucacguggacccucagcgacuccgagggcaacgagacccccgggggcuacugccugacccgguggaugcugaucgaggccgagcucaagugcuucgggaacacggccguggcgaagugcaacgagaagcacgacgaggaguucugcgacaugcugcgccuguucgacuucaacaagcaggccauccggcgccucaagaccccggcccagaugagcauccagcugaucaacaaggccgugaacgcccugaucaacgaccagcucaucaugaagaaccaccuccgggacaucaugugcauccccuacugcaacuacuccaaguacugguaccugaaccacaccgucaccggcaagacgagccugccccgcugcuggcugguguccaacgggagcuaccugaacgagacccacuucuccgacgacaucgagcagcaggcggacaacaugaucaccgagcuccugcagaaggaguacaucgaccggcagggcaagaccccgcugggccugguggaccucuucgucuucagcacguccuucuaccugaucagcaucuuccugcaccucgugaagauccccacccaccgccacguggucgggaagcccugccccaagccgcaccggcugaaccacaugggcaucugcuccugcgggcuguacaagcaccccggcgugcccgugaaguggaagcgcugaggacuaguaauaaggaaacuguaugaaugucugugggcaggaagugaagagauccuucuguaaagguuuuuggaauuaugucugcugaauaauaaacuuuuuugaaauaauaaaucugguagaaaaaugagaucucaaaggcucuuuucagagccaccaaaaaaaaaaaaaaaaaaaaaaaaaaaaaaaaaaaaaaaaaaaaaaaaaaaaaaaaaaaaaaaaaaaaaaaaaaaaaaaaaaaaaaaaaaaaaaaaaaaaa

SEQ ID NO: 29135 - RNA, 1809 nt, Artificial Sequence
  mRNA product Design b-4 (hSL-A100) comprising derived and/or modified sequence from LASV(Lassa virus/H.sapiens-wt/NGA/2015/ISTH_0543;Clade II)__AVO03639__GPCmut5 (opt1)
aggagagucccgcagucggcguccagcggcucugcuuguucgugugugugucguugcaggccuuauucaagcuuaccaugggccagaucaucaccuucuuccaggaggugccccacgucaucgaggaggugaugaacaucgugcugaucgcccucagccugcuggccauccucaaggggaucuacaacgucgcgaccugcggccuguucgggcugguguccuuccuccugcugugcggccgcagcugcuccacgaccuacaaggggguguacgagcuccagacccuggagcuggacauggccaaccucaacaugaccaugccgcugagcugcacgaagaacaacucccaccacuacaucauggucggcaacgagaccggccuggagcucacccugaccaacacgagcaucaucaaccacaaguucugcaaccuguccgacgcccacaagaagaaccucuacgaccacgcccugaugagcaucaucuccaccuuccaccugagcauccccaacuucaaccaguacgaggccauguccugcgacuucaacgggggcaagaucagcgugcaguacaaccucucccacaccuacgcgguggacgccgccaaccacugcgggaccaucgccaacggcguccugcagacguucaugcggauggcguggggcgggagcuacaucgcccuggacuccggcugcgggagcugggacugcaucaugaccuccuaccaguaccucgugauccagaacaccaccugggaggaccacugccaguucagccgccccucccccaucggcuaccuggggcugcucagccagcggacgcgcgacaucuacaucagccggcgccugcugggcaccuucaccuggacccucuccgacagcgagggcaacgagacgcccgggggcuacugccugacccgguggaugcugaucgaggccgagcucaagugcuucgggaacaccgccguggccaagugcaacgagaagcacgacgaggaguucugcgacaugcugcgccuguucgacuucaacaagcaggcgauccggcgccucaagaccccggcccagauguccauccagcugaucaacaaggccgucaacgcccugaucaacgaccagcucaucaugaagaaccaccuccgggacaucaugugcauccccuacugcaacuacagcaaguacugguaccugaaccacacggugaccggcaagaccucccugccccgcugcuggcuggugagcaacggguccuaccugaacgagacccacuucagcgacgacaucgagcagcaggccgacaacaugaucacggagcuccugcagaaggaguacaucgaccggcagggcaagaccccgcugggccuggucgaccucuucguguucuccaccagcuucuaccugaucuccaucuuccugcaccucgugaagauccccacccaccgccacaucacggggaagcccugccccaagccgcaccggcugaaccacaugggcaucugcagcugcgggcuguacaagcaccccggcguccccgugaaguggaagcgcugaggacuaguaauaaggaaacuguaugaaugucugugggcaggaagugaagagauccuucuguaaagguuuuuggaauuaugucugcugaauaauaaacuuuuuugaaauaauaaaucugguagaaaaaugagaucucaaaggcucuuuucagagccaccaaaaaaaaaaaaaaaaaaaaaaaaaaaaaaaaaaaaaaaaaaaaaaaaaaaaaaaaaaaaaaaaaaaaaaaaaaaaaaaaaaaaaaaaaaaaaaaaaaaaa

SEQ ID NO: 29136 - RNA, 1809 nt, Artificial Sequence
  mRNA product Design b-4 (hSL-A100) comprising derived and/or modified sequence from LASV(Lassa virus/H.sapiens-wt/NGA/2016/ISTH_0009;Clade II)__AVO03571__GPCmut5 (opt1)
aggagagucccgcagucggcguccagcggcucugcuuguucgugugugugucguugcaggccuuauucaagcuuaccaugggccagaucaucaccuucuuccaggaggugccccacgucaucgaggaggugaugaacaucgugcugaucgcccucagccugcuggccauccucaaggggaucuacaacgucgcgaccugcggccugcuggggcucguguccuuccugcugcucugcggccgcagcugcuccacgaccuacaaggggguguacgagcugcagacccuggagcucgacauggccagccugaacaugaccaugccgcuguccugcacgaagaacaacagccaccacuacaucauggucggcaacgagaccggccucgagcugacccugaccaacacguccaucaucaaccacaaguucugcaaccucagcgacgcccacaagaagaaccuguacgaccacgcccugauguccaucaucagcaccuuccaccucuccauccccaacuucaaccaguacgaggccaugagcugcgacuucaacgggggccggaucuccgugcaguacaaccugagccacuccuacgcgguggacgccgccaaccacugcgggaccaucgccaacggcguccugcagaccuucaugcgcauggcguggggcgggagcuacaucgcccucgacuccggcugcgggagcugggacugcaucaugacguccuaccaguaccugaucauccagaacaccaccugggaggaccacugccaguucagccggcccagccccaucggcuaccuggggcuccugucccagcgcacccgggacaucuacaucagccgccggcugcucggcacguucaccuggacccuguccgacagcgagggcaacgagacccccgggggcuacugccugacgcgcuggaugcucaucgaggccgagcugaagugcuucgggaacaccgccguggccaagugcaacgagaagcacgacgaggaguucugcgacaugcugcggcuguucgacuucaacaagcaggcgauccgccggcugaagaccccggcccagauguccauccagcugaucaacaaggccgugaacgcccucaucaacgaccagcugaucaugaagaaccaccuccgcgacaucaugugcauccccuacugcaacuacagcaaguacugguaccucaaccacaccgucacgggcaagaccucccugccccggugcuggcuggugagcaacggguccuaccucaacgagacccacuucagcgacgacaucgagcagcaggccgacaacaugaucaccgagcugcugcagaaggaguacaucgaccgccagggcaagacgccgcugggccucguggaccuguucgucuucuccaccagcuucuaccugaucuccaucuuccuccaccuggugaagauccccacccaccggcacaucaccgggaagcccugccccaagccgcaccgccugaaccacaugggcaucugcagcugcgggcucuacaaccaccccggcgugcccgucaaguggaagcggugaggacuaguaauaaggaaacuguaugaaugucugugggcaggaagugaagagauccuucuguaaagguuuuuggaauuaugucugcugaauaauaaacuuuuuugaaauaauaaaucugguagaaaaaugagaucucaaaggcucuuuucagagccaccaaaaaaaaaaaaaaaaaaaaaaaaaaaaaaaaaaaaaaaaaaaaaaaaaaaaaaaaaaaaaaaaaaaaaaaaaaaaaaaaaaaaaaaaaaaaaaaaaaaaa

SEQ ID NO: 29137 - RNA, 1809 nt, Artificial Sequence
  mRNA product Design b-4 (hSL-A100) comprising derived and/or modified sequence from LASV(Lassa virus/H.sapiens-wt/NGA/2016/ISTH_0017;Clade II)__AVO03567__GPCmut5 (opt1)
aggagagucccgcagucggcguccagcggcucugcuuguucgugugugugucguugcaggccuuauucaagcuuaccaugggccagaucaucaccuucuuccaggaggugccccacgucaucgaggaggugaugaacaucgugcugaucgcccucagccugcuggccauccucaaggggaucuacaacgucgcgaccugcggccuguucgggcugguguccuuccuccugcugugcggccgcagcugcuccacgaccuacaaggggguguacgagcuccagacccuggagcuggacauggccagccucaacaugaccaugccgcuguccugcacgaagaacaacagccaccacuacaucauggucggcaacgagaccggccuggagcucacccugaccaacacguccaucaucaaccacaaguucugcaaccugagcgacgcccacaagaagaaccucuacgaccacgcccugauguccaucaucagcaccuuccaccuguccauccccaacuucaaccaguacgaggccaugagcugcgacuucaacgggggcaagaucuccgugcaguacaaccucagccacaccuacgcgaucgacgccgccaaccacugcgggaccaucgccaacggcgugcugcagacguucaugcggauggcguggggcggguccuacaucgcccuggacagcggcugcggguccugggacugcaucaugaccagcuaccaguaccucaucauccagaacaccaccugggaggaccacugccaguucucccgccccagccccaucggcuaccuggggcugcucagccagcggacgcgcgacaucuacaucucccggcgccugcugggcaccuucaccuggacccucagcgacuccgagggcaacgagacgcccgggggcuacugccugacccgguggaugcugaucgaggccgagcucaagugcuucgggaacaccgccgucgccaagugcaacgagaagcacgacgaggaguucugcgacaugcugcgccuguucgacuucaacaagcaggcgauccggcgccucaagaccccggcccagaugagcauccagcugaucaacaaggccgugaacgcccugaucaacgaccagcucaucaugaagaaccaccuccgggacaucaugugcauccccuacugcaacuacuccaaguacugguaccugaaccacacggugaccggcaagaccagccugccccgcugcuggcuggucuccaacgggagcuaccugaacgagacccacuucuccgacgacaucgagcagcaggccgacaacaugaucacggagcuccugcagaaggaguacauggaccggcagggcaagaccccgcugggccugguggaccucuucguguucagcaccuccuucuaccugaucagcaucuuccugcaccucguccgcauccccacccaccggcacgugaucgggaagcccugccccaagccgcaccgccugaaccacaugggcaucugcuccugcgggcuguacaagcaccccggcgugcccgucaaguggaagcggugaggacuaguaauaaggaaacuguaugaaugucugugggcaggaagugaagagauccuucuguaaagguuuuuggaauuaugucugcugaauaauaaacuuuuuugaaauaauaaaucugguagaaaaaugagaucucaaaggcucuuuucagagccaccaaaaaaaaaaaaaaaaaaaaaaaaaaaaaaaaaaaaaaaaaaaaaaaaaaaaaaaaaaaaaaaaaaaaaaaaaaaaaaaaaaaaaaaaaaaaaaaaaaaaa

SEQ ID NO: 29138 - RNA, 1809 nt, Artificial Sequence
  mRNA product Design b-4 (hSL-A100) comprising derived and/or modified sequence from LASV(Lassa virus/H.sapiens-wt/NGA/2018/ISTH_0959;Clade II)__AVV65099__GPCmut5 (opt1)
aggagagucccgcagucggcguccagcggcucugcuuguucgugugugugucguugcaggccuuauucaagcuuaccaugggccagaucaucaccuucuuccaggaggugccccacgucaucgaggaggugaugaacaucgugcugaucgcccucagccugcuggccauccucaaggggaucuacaacgucgugaccugcggccuguucgggcugguguccuuccuccugcugugcggccgcagcugcuccacgaccuacaagggggucuacgagcuccagacccuggagcuggacauggcgagccucaacaugaccaugccgcuguccugcacgaagaacaacagccaccacuacaucauggugggcaacgagaccggccuggagcucacccugaccaacacguccaucaucaaccacaaguucugcaaccugagcgacgcccacaagaagaaccucuacgaccacgcccugauguccaucaucagcaccuuccaccuguccauccccaacuucaaccaguacgaggccaugagcugcgacuucaacgggggcaagaucuccgugcaguacaaccucagccacgccuacgcgaucgacgccgccaaccacugcgggaccaucgccaacggcguccugcagaccuucaugcggauggcguggggcggguccuacaucgcccuggacagcggcugcggguccugggacugcaucaugacgagcuaccaguaccucaucauccagaacaccaccugggaggaccacugccaguucucccgccccagccccaucggcuaccuggggcugcucagccagcggacccgcgacaucuacaucucccggcgccugcugggcacguucaccuggacccucagcgacuccgagggcaacgagacccccgggggcuacugccugacgcgguggaugcugaucgaggccgagcucaagugcuucgggaacaccgccguggccaagugcaacgagaagcacgacgaggaguucugcgacaugcugcgccuguucgacuucaacaagcaggcgauccggcgccucaagaccccggcccagaugagcauccagcugaucaacaaggccgugaacgcccugaucaacgaccagcucaucaugaagaaccaccuccgggacaucaugugcauccccuacugcaacuacuccaaguacugguaccugaaccacaccgucacgggcaagaccagccugccccgcugcuggcugguguccaacgggagcuaccugaacgagacccacuucuccgacgacaucgagcagcaggccgacaacaugaucaccgagcuccugcagaaggaguacaucgaccggcagggcaagacgccgcugggccugguggaccucuucgucuucagcaccuccuucuaccugaucagcaucuuccugcaccucgugaagauccccacccaccgccacgugaucgggaagcccugccccaagccgcaccggcugaaccacaugggcaucugcuccugcgggcuguacaagcaccccggcguccccgugaaguggaagcgcugaggacuaguaauaaggaaacuguaugaaugucugugggcaggaagugaagagauccuucuguaaagguuuuuggaauuaugucugcugaauaauaaacuuuuuugaaauaauaaaucugguagaaaaaugagaucucaaaggcucuuuucagagccaccaaaaaaaaaaaaaaaaaaaaaaaaaaaaaaaaaaaaaaaaaaaaaaaaaaaaaaaaaaaaaaaaaaaaaaaaaaaaaaaaaaaaaaaaaaaaaaaaaaaaa

SEQ ID NO: 29139 - RNA, 1809 nt, Artificial Sequence
  mRNA product Design b-4 (hSL-A100) comprising derived and/or modified sequence from LASV(LASV003-NIG-2008;Clade II)__AIT17580__GPCmut5 (opt1)
aggagagucccgcagucggcguccagcggcucugcuuguucgugugugugucguugcaggccuuauucaagcuuaccaugggccagaucaucaccuucuuccaggaggugccccacgucaucgaggaggugaugaacaucgugcugaucgcccucagccugcuggccauccucaaggggaucuacaacgucgcgaccugcggccuguucgggcugguguccuuccuccugcugugcggccgcagcugcuccacgaccuacaaggggguguacgagcuccagacccuggagcuggacauggccagccucaacaugaccaugccgcuguccugcacgaagaacaacagccaccacuacaucauggucggcaacgagaccggccuggagcucacccugaccaacacguccaucaucaaccacaaguucugcaaccugagcgacgcccacaagaagaaccucuacgaccacgcccugauguccaucaucagcaccuuccaccuguccauccccaacuucaaccaguacgaggccaugagcugcgacuucaacgggggcaagaucuccgugcaguacaaccucagccacaccuacgcgguggacgccgccaaccacugcgggaccaucgccaacggcguccugcagacguucaugcggauggcguggggcggguccuacaucgcccuggacagcggcugcggguccugggacugcaucaugaccagcuaccaguaccucaucauccagaacaccaccugggaggaccacugccaguucucccgccccagccccaucggcuaccuggggcugcucagccagcggacgcgcgacaucuacaucucccggcgccugcugggcaccuucaccuggacccucagcgacuccgagagcaacgagacgccgggcggguacugccugacccgguggaugcugaucgaggccgagcucaagugcuucggcaacaccgccguggccaagugcaacgagaagcacgacgaggaguucugcgacaugcugcgccuguucgacuucaacaagcaggcgauccggcgccucaaggcccccgcccagauguccauccagcugaucaacaaggccgugaacgcccugaucaacgaccagcucaucaugaagaaccaccuccgggacaucaugugcauccccuacugcaacuacagcaaguacugguaccugaaccacaccgucacggggcgcaccucccugccccggugcuggcuggugagcaacggcuccuaccugaacgagacccacuucagcgacgacaucgagcagcaggcggacaacaugaucaccgagcuccugcagaaggaguacauggaccgccaggggaagacgccgcugggccugguggaccucuucgucuucuccaccagcuucuaccugaucuccaucuuccugcaccucgugaagauccccacccaccggcacgugaucggcaagcccugccccaagccgcaccgccugaaccacauggggaucugcagcugcggccuguacaagcaccccgggguccccgugaaguggaagcggugaggacuaguaauaaggaaacuguaugaaugucugugggcaggaagugaagagauccuucuguaaagguuuuuggaauuaugucugcugaauaauaaacuuuuuugaaauaauaaaucugguagaaaaaugagaucucaaaggcucuuuucagagccaccaaaaaaaaaaaaaaaaaaaaaaaaaaaaaaaaaaaaaaaaaaaaaaaaaaaaaaaaaaaaaaaaaaaaaaaaaaaaaaaaaaaaaaaaaaaaaaaaaaaaa

SEQ ID NO: 29140 - RNA, 1809 nt, Artificial Sequence
  mRNA product Design b-4 (hSL-A100) comprising derived and/or modified sequence from LASV(LASV035-NIG-2009;Clade II)__AIT17588__GPCmut5 (opt1)
aggagagucccgcagucggcguccagcggcucugcuuguucgugugugugucguugcaggccuuauucaagcuuaccaugggccagaucaucaccuucuuccaggaggugccccacgucaucgaggaggugaugaacaucgugcugaucgcccucagccugcuggccauccucaaggggaucuacaacgucgcgaccugcggccuguucgggcugguguccuuccuccugcugugcggccgcagcugcuccacgaccuacaaggggguguacgagcuccagacccuggagcuggacauggccagccucaacaugaccaugccgcuguccugcacgaagaacaacagccaccacuacaucauggucggcaacgagaccggccuggagcucacccugaccaacacguccaucaucaaccacaaguucugcaaccugagcgacgcccacaagaagaaccucuacgaccacgcccugauguccaucaucagcaccuuccaccuguccauccccaacuucaaccaguacgaggccaugagcugcgacuucaacgggggcaagaucuccgugcaguacaaccucagccacgcguacgccguggacgccgccaaccacugcgggaccaucgcgaacggcguccugcagaccuucaugcggauggccuggggcggguccuacaucgcccuggacagcggcugcggguccugggacugcaucaugacgagcuaccaguaccucaucauccagaacaccaccugggaggaccacugccaguucucccgccccagccccaucggcuaccuggggcugcucagccagcggacccgcgacaucuacaucucccggcgccugcugggcacguucaccuggacccucagcgacuccgagggcaacgagacccccgggggcuacugccugacgcgguggaugcugaucgaggccgagcucaagugcuucgggaacaccgccguggcgaagugcaacgagaagcacgacgaggaguucugcgacaugcugcgccuguucgacuucaacaagcaggccauccggcgccucaaggccccggcccagaugagcauccagcugaucaacaaggccgugaacgcgcugaucaacgaccagcucaucaugaagaaccaccuccgggacaucaugugcauccccuacugcaacuacuccaaguacugguaccugaaccacaccgucaccggcaagacgagccugccccgcugcuggcugguguccaacgggagcuaccugaacgagacccacuucuccgacgacaucgagcagcaggccgacaacaugaucaccgagcuccugcagaaggaguacaucgaccggcagggcaagaccccgcugggccugguggaccucuucgucuucagcacguccuucuaccugaucagcaucuuccugcaccucgugaagauccccacccaccgccacgugaucgggaagcccugccccaagccgcaccggcugaaccacaugggcaucugcuccugcgggcuguacaagcaccccggcguccccgugaaguggaagcgcugaggacuaguaauaaggaaacuguaugaaugucugugggcaggaagugaagagauccuucuguaaagguuuuuggaauuaugucugcugaauaauaaacuuuuuugaaauaauaaaucugguagaaaaaugagaucucaaaggcucuuuucagagccaccaaaaaaaaaaaaaaaaaaaaaaaaaaaaaaaaaaaaaaaaaaaaaaaaaaaaaaaaaaaaaaaaaaaaaaaaaaaaaaaaaaaaaaaaaaaaaaaaaaaaa

SEQ ID NO: 29141 - RNA, 1809 nt, Artificial Sequence
  mRNA product Design b-4 (hSL-A100) comprising derived and/or modified sequence from LASV(LASV1000-NIG-2009;Clade II)__AIT17782__GPCmut5 (opt1)
aggagagucccgcagucggcguccagcggcucugcuuguucgugugugugucguugcaggccuuauucaagcuuaccaugggccagaucaucaccuucuuccaggaggugccccacgucaucgaggaggugaugaacaucgugcugaucgcccucagccugcuggccauccucaaggggaucuacaacgucgcgaccugcggccuguucgggcugguguccuuccuccugcugugcggccgcagcugcuccacgaccuacaaggggguguacgagcuccagacccuggagcuggacauggccagccucaacaugaccaugccgcuguccugcacgaagaacaacagccaccacuacaucauggucggcaacgagaccggccuggagcucacccugaccaacacguccaucaucaaccacaaguucugcaaccugagcgacgcccacaagaagaaccucuacgaccacgcccugauguccaucaucagcaccuuccaccuguccauccccaacuucaaccaguacgaggccaugagcugcgacuucaacgggggcaagaucuccgugcaguacaaccucagccacaccuacgcgguggacgccgccaaccacugcgggaccaucgccaacggcguccugcagacguucaugcggauggcguggggcggguccuacaucgcccuggacagcggcugcggguccugggacugcaucaugaccagcuaccaguaccucaucauccagaacaccaccugggaggaccacugccaguucucccgccccagccccaucggcuaccuggggcugcucagccagcggacgcgcgacaucuacaucucccggcgccugcugggcaccuucaccuggacccucagcgacuccgagggcaacgagacgcccgggggcuacugccugacccgguggaugcugaucgaggccgagcucaagugcuucgggaacaccgccguggccaagugcaacgagaagcacgacgaggaguucugcgacaugcugcgccuguucgacuucaacaagcaggcgaucaagcggcucaagaccccggcccagaugagcauccagcugaucaacaaggccgugaacgcccugaucaacgaccagcucaucaugaagaaccaccuccgcgacaucaugugcauccccuacugcaacuacuccaaguacugguaccugaaccacacggucaccggcaagaccagccugccccggugcuggcugguguccaacgggagcuaccugaacgagacccacuucuccgacgacaucgagcagcaggccgacaacaugaucacggagcuccugcagaaggaguacaucgaccgccagggcaagaccccgcugggccugguggaccucuucgucuucagcaccuccuucuaccugaucagcaucuuccugcaccucgugaagauccccacccaccggcacguggucgggaagcccugccccaagccgcaccgccugaaccacaugggcaucugcuccugcgggcuguacaagcaccccggcgugcccgugaaguggaagcggugaggacuaguaauaaggaaacuguaugaaugucugugggcaggaagugaagagauccuucuguaaagguuuuuggaauuaugucugcugaauaauaaacuuuuuugaaauaauaaaucugguagaaaaaugagaucucaaaggcucuuuucagagccaccaaaaaaaaaaaaaaaaaaaaaaaaaaaaaaaaaaaaaaaaaaaaaaaaaaaaaaaaaaaaaaaaaaaaaaaaaaaaaaaaaaaaaaaaaaaaaaaaaaaaa

SEQ ID NO: 29142 - RNA, 1809 nt, Artificial Sequence
  mRNA product Design b-4 (hSL-A100) comprising derived and/or modified sequence from LASV(LASV221-NIG-2010;Clade II)__AIT17624__GPCmut5 (opt1)
aggagagucccgcagucggcguccagcggcucugcuuguucgugugugugucguugcaggccuuauucaagcuuaccaugggccagaucaucaccuucuuccaggaggugccccacgucaucgaggaggugaugaacaucgugcugaucgcccucagccugcuggccauccucaaggggaucuacaacgucgcgaccugcggccuguucgggcugguguccuuccuccugcugugcggccgcagcugcuccacgaccuacaaggggguguacgagcuccagacccuggagcuggacauggccagccucaacaugaccaugccgcuguccugcacgaagaacaacagccaccacuacaucauggucggcaacgagaccggccuggagcucacccugaccaacacguccaucaucaaccacaaguucugcaaccugagcgacgcccacaagaagaaccucuacgaccacgcccugauguccaucaucagcaccuuccaccuguccauccccaacuucaaccaguacgaggccaugagcugcgacuucaacgggggcaagaucuccgugcaguacaaccucagccacaccuacgcgaucgacgccgccaaccacugcgggaccaucgccaacggcgugcugcagacguucaugcggauggcguggggcggguccuacaucgcccuggacagcggcugcggguccugggacugcaucaugaccagcuaccaguaccucaucauccagaacaccaccugggaggaccacugccaguucucccgccccagccccaucggcuaccuggggcugcucagccagcggacgcgcgacaucuacaucucccggcgccugcugggcaccuucaccuggacccucagcgacuccgagggcaacgagacgcccgggggcuacugccugacccgguggaugcugaucgaggccgagcucaagugcuucgggaacaccgccgucgccaagugcaacgagaagcacgacgaggaguucugcgacaugcugcgccuguucgacuucaacaagcaggcgauccggcgccucaagaccccggcccagaugagcauccagcugaucaacaaggccgugaacgcccugaucaacgaccagcucaucaugaagaaccaccuccgggacaucaugugcauccccuacugcaacuacuccaaguacugguaccugaaccacacggugaccggcaagaccagccugccccgcugcuggcuggucuccaacgggagcuaccugaacgagacccacuucuccgacgacaucgagcagcaggccgacaacaugaucacggagaugcuccagaaggaguacauggaccggcagggcaagaccccgcugggccugguggaccuguucguguucagcaccuccuucuaccucaucagcaucuuccugcaccuggucaagauccccacccaccgccacgugaucgggaagcccugccccaagccgcaccggcucaaccacaugggcaucugcuccugcgggcuguacaagcaccccggcgugcccgucaaguggaagcgcugaggacuaguaauaaggaaacuguaugaaugucugugggcaggaagugaagagauccuucuguaaagguuuuuggaauuaugucugcugaauaauaaacuuuuuugaaauaauaaaucugguagaaaaaugagaucucaaaggcucuuuucagagccaccaaaaaaaaaaaaaaaaaaaaaaaaaaaaaaaaaaaaaaaaaaaaaaaaaaaaaaaaaaaaaaaaaaaaaaaaaaaaaaaaaaaaaaaaaaaaaaaaaaaaa

SEQ ID NO: 29143 - RNA, 1809 nt, Artificial Sequence
  mRNA product Design b-4 (hSL-A100) comprising derived and/or modified sequence from LASV(LASV237-NIG-2010;Clade II)__AIT17638__GPCmut5 (opt1)
aggagagucccgcagucggcguccagcggcucugcuuguucgugugugugucguugcaggccuuauucaagcuuaccaugggccagaucaucaccuucuuccaggaggugccccacgucaucgaggaggugaugaacaucgugcugaucgcccucagccugcuggccauccucaaggggaucuacaacgucgcgaccugcggccuguucgggcugguguccuuccuccugcugugcggccgcagcugcuccacgaccuacaaggggguguacgagcuccagacccuggagcuggacauggccagccucaacaugaccaugccgcuguccugcacgaagaacaacagccaccacuacaucauggucggcaacgagaccggccuggagcucacccugaccaacacguccaucaucaaccacaaguucugcaaccugagcgacgcccacaagaaggaccucuacgaccacgcccugauguccaucaucagcaccuuccaccuguccauccccaacuucaaccaguacgaggccaugagcugcgacuucaacgggggcaagaucuccgugcaguacaaccucagccacaccuacgcgguggacgccgccaaccacugcgggaccaucgccaacggcguccugcagacguucaugcggauggcguggggcggguccuacaucgcccuggacagcggcugcggguccugggacugcaucaugaccagcuaccaguaccucaucauccagaacaccaccugggaggaccacugccaguucucccgccccagccccaucggcuaccuggggcugcucagccagcggacgcgcgacaucuacaucucccggcgccugcugggcaccuucaccuggacccucagcgacuccgagggcaacgagacgcccgggggcuacugccugacccgguggaugcugaucgaggccgagcucaagugcuucgggaacaccgccguggccaagugcaacgagaagcacgacgaggaguucugcgacaugcugcgccuguucgacuucaacaagcaggcgauccggcgccucaagaccccggcccagaugagcauccagcugaucaacaaggccgugaacgcccugaucaacgaccagcucaucaugaagaaccaccuccgggacaucaugugcauccccuacugcaacuacuccaaguacugguaccugaaccacacggucaccggcaagaccagccugccccgcugcuggcugguguccaacgggagcuaccugaacgagacccacuucuccgacgacaucgagcagcaggccgacaacaugaucacggagcuccugcagaaggaguacauggaccggcagggcaagaccccgcugggccugguggaccucuucgucuucagcaccuccuucuaccugaucagcaucuuccugcaccucaucaagauccccacccaccgccacaucacggggaagcccugccccaagccgcaccggcugaaccacaugggcaucugcuccugcgggcuguacaagcaccccggcgugcccgugaaguggaagcgcugaggacuaguaauaaggaaacuguaugaaugucugugggcaggaagugaagagauccuucuguaaagguuuuuggaauuaugucugcugaauaauaaacuuuuuugaaauaauaaaucugguagaaaaaugagaucucaaaggcucuuuucagagccaccaaaaaaaaaaaaaaaaaaaaaaaaaaaaaaaaaaaaaaaaaaaaaaaaaaaaaaaaaaaaaaaaaaaaaaaaaaaaaaaaaaaaaaaaaaaaaaaaaaaaa

SEQ ID NO: 29144 - RNA, 1809 nt, Artificial Sequence
  mRNA product Design b-4 (hSL-A100) comprising derived and/or modified sequence from LASV(LASV253-NIG-2011;Clade II)__AIT17670__GPCmut5 (opt1)
aggagagucccgcagucggcguccagcggcucugcuuguucgugugugugucguugcaggccuuauucaagcuuaccaugggccagaucaucaccuucuuccaggaggugccccacgucaucgaggaggugaugaacaucgugcugaucgcccucagccugcuggccauccucaaggggaucuacaacgucgcgaccugcggccuguucgggcugguguccuuccuccugcugugcggccgcagcugcuccacgaccuacaaggggguguacgagcuccagacccuggagcuggacauggccagccucaacaugaccaugccgcuguccugcacgaagaacaacagccaccacuacaucauggucggcaacgagaccggccuggagcucacccugaccaacacguccaucaucaaccacaaguucugcaaccugagcgacgcccacaagaagaaccucuacgaccacgcccugauguccaucaucagcaccuuccaccuguccauccccaacuucaaccaguacgaggccaugagcugcgacuucaacgggggcaagaucuccgugcaguacaaccucagccacaccuacgcgguggacgccgccaaccacugcgggaccaucgccaacggcguccugcagacguucaugcggauggcguggggcggguccuacaucgcccuggacagcggcugcggguccugggacugcaucaugaccagcuaccaguaccucaucauccagaacaccaccugggaggaccacugccaguucucccgccccagccccaucggcuaccuggggcugcucagccagcggacgcgcgacaucuacaucucccggcgccugcugggcaccuucaccuggacccucagcgacuccgagggcaacgagacgcccgggggcuacugccugacccgguggaugcugaucgaggccgagcucaagugcuucgggaacaccgccguggccaagugcaacgagaagcacgacgaggaguucugcgacaugcugcgccuguucgacuucaacaagcaggcgauccggcgccucaaggccccggcccagaugagcauccagcugaucaacaaggccgugaacgcccugaucaacgaccagcucaucaugaagaaccaccuccgggacaucaugugcauccccuacugcaacuacuccaaguacugguaccugaaccacaccgucacgggccgcaccagccugccccggugcuggcugguguccaacgggagcuaccugaacgagacccacuucuccgacgacaucgagcagcaggcggacaacaugaucaccgagcuccugcagaaggaguacaucgaccgccagggcaagacgccgcugggccugguggaccucuucgucuucagcaccuccuucuaccugaucagcaucuuccugcaccucgugaagauccccacccaccggcacaucaucgggaagcccugccccaagccgcaccgccugaaccacaugggcaucugcuccugcgggcuguacaagcaccccggcgugcccgucaaguggaagcggugaggacuaguaauaaggaaacuguaugaaugucugugggcaggaagugaagagauccuucuguaaagguuuuuggaauuaugucugcugaauaauaaacuuuuuugaaauaauaaaucugguagaaaaaugagaucucaaaggcucuuuucagagccaccaaaaaaaaaaaaaaaaaaaaaaaaaaaaaaaaaaaaaaaaaaaaaaaaaaaaaaaaaaaaaaaaaaaaaaaaaaaaaaaaaaaaaaaaaaaaaaaaaaaaa

SEQ ID NO: 29145 - RNA, 1809 nt, Artificial Sequence
  mRNA product Design b-4 (hSL-A100) comprising derived and/or modified sequence from LASV(LASV254-NIG-2011;Clade II)__AIT17674__GPCmut5 (opt1)
aggagagucccgcagucggcguccagcggcucugcuuguucgugugugugucguugcaggccuuauucaagcuuaccaugggccagaucaucaccuucuuccaggaggugccccacgucaucgaggaggugaugaacaucgugcugaucgcccucagccugcuggccauccucaaggggaucuacaacgucgcgaccugcggccuguucgggcugguguccuuccuccugcugugcggccgcagcugcuccacgaccuacaaggggguguacgagcuccagacccuggagcuggacaugaccaaccucaacaugacgaugccgcugagcugcaccaagaacaacucccaccacuacaucauggucggcaacgagaccggccuggagcucacccugacgaacaccagcaucaucaaccacaaguucugcaaccuguccgacgcccacaagaagaaccucuacaaccacgcccugaugagcaucaucuccaccuuccaccugagcauccccaacuucaaccaguacgaggccauguccugcgacuucaacgggggcaagaucagcgugcaguacaaccucucccacagcuacgccguggacgcggccaaccacugcgggaccaucgccaacggcguccugcagacguucaugcggauggccuggggcggguccuacaucgcgcuggacagcggcugcgggaacugggacugcaucaugaccuccuaccaguaccucaucauccagaacaccaccugggaggaccacugccaguucagccgccccucccccaucggcuaccuggggcugcucagccagcggacgcgcgacaucuacaucagccggcgccugcugggcaccuucaccuggacccucuccgacagcgagggcaacgagacgcccgggggcuacugccugacccgguggaugcugaucgaggccgagcucaagugcuucgggaacaccgccguggccaagugcaacgagaagcacgacgaggaguucugcgacaugcugcgccuguucgacuucaacaagcaggccauccggcgccucaagaccccggcgcaggccaacauccagcugaucaacaaggccgugaacgcccugaucaacgaccagcucaucaugaagaaccaccuccgggacaucaugugcauccccuacugcaacuacuccaaguacugguaccugaaccacacggucaccggcaagaccagccugccccgcugcuggcugguguccaacgggagcuaccugaacgagacccacuucuccgacgacaucgagcagcaggccgacaacaugaucacggagcuccugcagaaggaguacauggaccggcagggcaagaccccgcugggccugguggaccucuucgucuucagcaccuccuucuaccugaucagcaucuuccugcaccucgugaagauccccacccaccgccacgugaucgggaagcccugccccaagccgcaccggcugaaccacaugggcaucugcuccugcgggcuguacaagcaccccggcguccccgugaaguggaagcgcugaggacuaguaauaaggaaacuguaugaaugucugugggcaggaagugaagagauccuucuguaaagguuuuuggaauuaugucugcugaauaauaaacuuuuuugaaauaauaaaucugguagaaaaaugagaucucaaaggcucuuuucagagccaccaaaaaaaaaaaaaaaaaaaaaaaaaaaaaaaaaaaaaaaaaaaaaaaaaaaaaaaaaaaaaaaaaaaaaaaaaaaaaaaaaaaaaaaaaaaaaaaaaaaaa

SEQ ID NO: 29146 - RNA, 1809 nt, Artificial Sequence
  mRNA product Design b-4 (hSL-A100) comprising derived and/or modified sequence from LASV(Nig08-A19;Clade III)__ADU56618__GPCmut5 (opt1)
aggagagucccgcagucggcguccagcggcucugcuuguucgugugugugucguugcaggccuuauucaagcuuaccaugggccagaucgugaccuucuuccaggaggucccccacgugaucgaggaggugaugaacaucguccugaucgcccucagcauccuggccauccugaaggggcucuacaacaucgcgaccugcggccugaucgggcuggugacguuccuccugcuguccggccgcagcugcuccaugaccuacaaggggguguacgagcuccagacccuggagcugaacaugaacacccucaacaugacgaugccgcugagcugcaccaagaacaacucccaccacuacaucauggucggcaacgagaccggccuggagcucacccugacgaacaccagccugcuccaccacaaguucugcaaccuguccgacgcccacaagaagaaccuguacgaccacacccucaugagcaucaucuccaccuuccaccugagcauccccaacuucaaccaguacgaggccauguccugcgacuucaacgggggcaagaucacggugcaguacaaccugagccacuccuacgccaucgacgccgcgaaccacugcgggaccguggccaacggcguccuccagaccuucaugcggauggccuggggcgggagcuacaucgcccuggacuccggcugcgggaagugggacugcaucaugaccagcuaccaguaccugaucauccagaacacgaccugggaggaccacugccaguucucccgccccagccccaucggcuaccucgggcugcugucccagcggacccgcgacaucuacaucagccggcgccuccugggcaccuucacguggacccugagcgacuccgagggcaacgagacccccgggggcuacugccucacccgguggaugcugaucgaggcggagcugaagugcuucgggaacacggccguggccaagugcaacgagaagcacgacgaggaguucugcgacaugcuccgccuguucgacuucaacaagcaggccauccggcgccugaaggccccggcgcagaugagcauccagcucaucaacaaggccgugaacgcccugaucaacgaccagcugaucaugaagaaccaccuccgggacaucaugugcauccccuacugcaacuacuccaaguacugguaccugaaccacaccagcaccggccgcaccucccugccccggugcuggcucgucagcaacggguccuaccugaacgagacgcacuucagcgacgacaucgagcagcaggccgacaacaugaucaccgagaugcugcagaaggaguaccuggaccgccagggcaagaccccgcucggccugguggaccuguucguguucuccaccagcuucuaccucaucuccaucuuccugcaccuggucaagauccccacgcaccggcacaucguggggaagcccugccccaagccgcaccgccucaaccacaugggcaucugcagcugcgggcuguacaagcagcccggcgugcccguccgguggaagcgcugaggacuaguaauaaggaaacuguaugaaugucugugggcaggaagugaagagauccuucuguaaagguuuuuggaauuaugucugcugaauaauaaacuuuuuugaaauaauaaaucugguagaaaaaugagaucucaaaggcucuuuucagagccaccaaaaaaaaaaaaaaaaaaaaaaaaaaaaaaaaaaaaaaaaaaaaaaaaaaaaaaaaaaaaaaaaaaaaaaaaaaaaaaaaaaaaaaaaaaaaaaaaaaaaa

SEQ ID NO: 29147 - RNA, 1812 nt, Artificial Sequence
  mRNA product Design b-4 (hSL-A100) comprising derived and/or modified sequence from LASV(G1180-SLE-2010;Clade IV)__AIT17168__GPCmut5 (opt1)
aggagagucccgcagucggcguccagcggcucugcuuguucgugugugugucguugcaggccuuauucaagcuuaccaugggccagaucgugaccuucuuccaggaggucccccacgugaucgaggaggugaugaacaucguccugaucgcccucagcauccuggccgugcugaaggggcucuacaacuucgcgaccugcggccugguggggcugcucacguuccugcugcucugcggccgcuccugcaccgccagccgguacaagggggucuacgagcugcagacccuggagcucaacauggagacccugaacaugacgaugccgcuguccugcaccaagaacaacagccaccacuacaucauggugggcaacgagaccggccucgagcugacccugacgaacaccuccaucaucaaccacaaguucugcaaccucagcgacgcccacaagaagaaccuguacgaccacgcccugauguccaucaucagcaccuuccaccucuccauccccaacuucaaccaguacgaggccaugagcugcgacuucaacgggggcaagaucuccgugcaguacaaccugagccacuccuacgcgggggacgccgccaaccacugcggcaccgucgccaacggggugcugcagacguucaugcgcauggcguggggcggcagcuacaucgcccucgacuccgggugcggcagcugggacugcaucaugaccuccuaccaguaccugaucauccagaacaccaccugggaggaccacugccaguucagccggcccucccccaucggguaccugggccuccugagccagcgcacgcgggacaucuacaucagccgccggcugcucggcaccuucaccuggacccuguccgacagcgaggggaaggacacgccgggcggguacugccugacccgcuggaugcucaucgaggccgagcugaagugcuucggcaacaccgccguggccaagugcaacgagaagcacgacgaggaguucugcgacaugcugcggcuguucgacuucaacaagcaggcgauccagcgccugaaggcccccgcccagauguccauccagcugaucaacaaggccgucaacgcccucaucaacgaccagcugaucaugaagaaccaccuccgggacaucaugugcauccccuacugcaacuacagcaaguacugguaccucaaccacaccacgaccgggaagaccucccugcccaagugcuggcuggugagcaacggcuccuaccucaacgagacccacuucagcgacgacaucgagcagcaggcggacaacaugaucacggagaugcugcagaaggaguacauggagcgccagggcaagaccccgcuggggcugguggaccucuucgucuucuccaccagcuucuaccugaucuccaucuuccugcaccucgugaagauccccacccaccggcacaucgugggcaagagcugccccaagccccaccgccugaaccacauggggaucugcuccugcggccuguacaagcagccggggguccccgugaaguggaagcggugaggacuaguaauaaggaaacuguaugaaugucugugggcaggaagugaagagauccuucuguaaagguuuuuggaauuaugucugcugaauaauaaacuuuuuugaaauaauaaaucugguagaaaaaugagaucucaaaggcucuuuucagagccaccaaaaaaaaaaaaaaaaaaaaaaaaaaaaaaaaaaaaaaaaaaaaaaaaaaaaaaaaaaaaaaaaaaaaaaaaaaaaaaaaaaaaaaaaaaaaaaaaaaaaa

SEQ ID NO: 29148 - RNA, 1812 nt, Artificial Sequence
  mRNA product Design b-4 (hSL-A100) comprising derived and/or modified sequence from LASV(G1442-SLE-2011;Clade IV)__AIT17180__GPCmut5 (opt1)
aggagagucccgcagucggcguccagcggcucugcuuguucgugugugugucguugcaggccuuauucaagcuuaccaugggccagaucgugaccuucuuccaggaggucccccacgugaucgaggaggugaugaacaucguccugaucgcccucagcauccuggccgugcugaaggggcucuacaacguggcgaccugcggccugaucgggcuggucacguuccuccugcugugcggccgcuccugcaccaccacccucuacaaggggguguacgagcugcagacgcuggagcucaacauggagacccugaacaugaccaugccgcugagcugcaccaagaacaacucccaccacuacauccgggugggcaacgagacgggccucgagcugacccugaccaacaccagcaucaucaaccacaaguucugcaaccucuccgacgcccacaagaagaaccuguacgaccacgcccugaugagcaucaucuccacguuccaccucagcauccccaacuucaaccaguacgaggccauguccugcgacuucaacgggggcaagaucagcguccaguacaaccugucccacagcuacgccggggacgcggccaaccacugcggcaccguggccaacggggugcugcagaccuucaugcgcauggccuggggcggcuccuacaucgcgcucgacagcgggugcggcaacugggacugcaucaugaccuccuaccaguaccugaucauccagaacacgaccugggacgaccacugccaguucagccggcccucccccaucggguaccugggccuccugagccagcgcacccgggacgucuacaucucccgccggcugcucggcaccuucacguggacccugagcgacagcgaggggaaggacaccccgggcggguacugccugacccgcuggaugcucaucgaggccgagcugaagugcuucggcaacacggccguggccaagugcaacgagaagcacgacgaggaguucugcgacaugcugcggcuguucgacuucaacaagcaggccauccagcgccugaaggcgcccgcccagauguccauccagcugaucaacaaggccgugaacgcccucaucaacgaccagcugaucaugaagaaccaccuccgggacaucaugugcauccccuacugcaacuacagcaaguacugguaccucaacaacaccgccaccgggaagaccucccugcccaagugcuggcugaucagcaacggcuccuaccucaacgagacgcacuucagcgacgacaucgagcaggaggcggacaacaugaucaccgagaugcugcagaaggaguacauggagcgccagggcaagaccccgcuggggcuggucgaccucuucguguucuccaccagcuucuaccugaucuccaucuuccugcaccucgugaagauccccacgcaccggcacaucgucggcaagagcugccccaagccccaccgccugaaccacauggggaucugcuccugcggccuguacaagcagccgggggugcccgugcgguggaagcgcugaggacuaguaauaaggaaacuguaugaaugucugugggcaggaagugaagagauccuucuguaaagguuuuuggaauuaugucugcugaauaauaaacuuuuuugaaauaauaaaucugguagaaaaaugagaucucaaaggcucuuuucagagccaccaaaaaaaaaaaaaaaaaaaaaaaaaaaaaaaaaaaaaaaaaaaaaaaaaaaaaaaaaaaaaaaaaaaaaaaaaaaaaaaaaaaaaaaaaaaaaaaaaaaaa

SEQ ID NO: 29149 - RNA, 1812 nt, Artificial Sequence
  mRNA product Design b-4 (hSL-A100) comprising derived and/or modified sequence from LASV(G3010-SLE-2013;Clade IV)__AIT17344__GPCmut5 (opt1)
aggagagucccgcagucggcguccagcggcucugcuuguucgugugugugucguugcaggccuuauucaagcuuaccaugggccagaucgugaccuucuuccaggaggucccccacgugaucgaggaggugaugaacaucguccugaucgcccucagcauccuggccgugcugaaggggcucuacaacuucgcgaccugcggccugguggggcuggucacguuccuccugcugugcggccgcuccugcaccaccagccucuacaaggggguguacgagcugcagacccuggagcucaacauggagacgcugaacaugaccaugccgcuguccugcaccaagaacaacagccaccacuacaucauggugggcaacgagaccggccucgagcugacgcugaccaacaccuccaucaucaaccacaaguucugcaaccucagcgacgcccacaagaagaaccuguacaaccacgcccugauguccaucaucagcaccuuccaccucuccauccccaacuucaaccaguacgaggccaugagcugcgacuucaacgggggcaagaucuccguccaguacaaccugagccacuccuacgccggggacgcggccagccacugcggcacgguggccaacggggugcugcagaccuucaugcggauggccuggggcggcuccuacaucgcgcucgacagcgggugcggcaagugggacugcaucaugaccuccuaccaguaccugaucauccagaacaccacgugggaggaccacugccaguucagccgccccucccccaucggguaccugggccuccugagccagcggacccgcgacaucuacaucagccggcgccugcucggcaccuucaccuggacgcuguccgacagcgaggggaaggacaccccgggcggguacugccugacccgguggaugcucaucgaggccgagcugaagugcuucggcaacaccgccgucgccaagugcaacgagaagcacgacgaggaguucugcgacaugcugcgccucuucgacuucaacaagcaggccauccagcggcugaagacgcccgcgcagauguccauccagcugaucaacaaggccgugaacgcccucaucaacgaccagcugaucaugaagaaccaccuccgcgacaucaugugcauccccuacugcaacuacagcaaguacugguaccugaaccacaccaccaccgggaagacgucccugcccaagugcuggcuggugagcaacggcuccuaccucaacgagacccacuucagcgacgacaucgagcagcaggccgacaacaugaucaccgagaugcugcagaaggaguacauggagcggcagggcaagaccccgcuggggcuggucgaccucuucguguucuccacgagcuucuaccugaucuccaucuuccugcaccucgugaagauccccacccaccgccacaucgucggcaagagcugccccaagccccaccggcugaaccacauggggaucugcuccugcggccuguacaagcagccgggggugcccgugcgcuggaagcggugaggacuaguaauaaggaaacuguaugaaugucugugggcaggaagugaagagauccuucuguaaagguuuuuggaauuaugucugcugaauaauaaacuuuuuugaaauaauaaaucugguagaaaaaugagaucucaaaggcucuuuucagagccaccaaaaaaaaaaaaaaaaaaaaaaaaaaaaaaaaaaaaaaaaaaaaaaaaaaaaaaaaaaaaaaaaaaaaaaaaaaaaaaaaaaaaaaaaaaaaaaaaaaaaa

SEQ ID NO: 29150 - RNA, 1812 nt, Artificial Sequence
  mRNA product Design b-4 (hSL-A100) comprising derived and/or modified sequence from LASV(G502-SLE-2009;Clade IV)__AIT17126__GPCmut5 (opt1)
aggagagucccgcagucggcguccagcggcucugcuuguucgugugugugucguugcaggccuuauucaagcuuaccaugggccagaucgugaccuucuuccaggaggucccccacgugaucgaggaggugaugaacaucguccugaucgcccucagcauccuggccgugcugaaggggcucuacaacuucgcgaccugcggccugguggggcugcucacguuccugcugcucugcggccgcuccugcaccaccgggcuguacaagggcgucuacgagcugcagacccucgagcugaacauggagacgcugaacaugaccaugccgcucagcugcaccaagaacaacucccaccacuacaucauggugggcaacgagaccgggcuggagcugacgcucaccaacaccagcaucaucaaccacaaguucugcaaccuguccgacgcccacaagaagaaccuguacgaccacgcccucaugagcaucaucuccaccuuccaccugagcauccccaacuucaaccaguacgaggccauguccugcgacuucaacggcgggaagaucagcgugcaguacaaccugucccacagcuacgccggcgacgcggccgaccacugcgggacggucgccaacggcgugcuccagaccuucaugcggauggccuggggcggguccuacaucgcgcuggacagcggcugcgggcgcugggacugcaucaugaccuccuaccaguaccugaucauccagaacaccacgugggaggaccacugccaguucagccggcccucccccaucggcuaccucggccugcugagccagcgcacccgggacaucuacaucucccgccggcuccuggggaccuucaccuggacgcugagcgacagcgagggcaaggacacccccgggggcuacugccucacccgcuggaugcugaucgaggccgagcugaagugcuucgggaacaccgccguggccaagugcaacgagaagcacgacgaggaguucugcgacaugcuccggcuguucgacuucaacaagcaggccauccagcgccugaaggcgccggcccagauguccauccagcucaucaacaaggccgucaacgcccugaucaacgaccagcuggugaugaagaaccaccuccgggacaucaugugcauccccuacugcaacuacagccgcuacugguaccugaaccacacgaccaccggccggaccucccugcccaagugcuggcucgugagcaacggcuccuaccugaacgagacgcacuucagcgacgacaucgagcagcaggccgacaacaugaucaccgagaugcugcagaaggaguacauggagcgccaggggaagaccccgcugggccucgucgaccuguucguguucuccaccagcuucuaccugaucuccaucuuccuccaccuggugaagauccccacgcaccggcacaucgucggcaagagcugccccaagccccaccgccugaaccacauggggaucugcuccugcgggcucuacaagcagccgggcgugcccgugaaguggaagcggugaggacuaguaauaaggaaacuguaugaaugucugugggcaggaagugaagagauccuucuguaaagguuuuuggaauuaugucugcugaauaauaaacuuuuuugaaauaauaaaucugguagaaaaaugagaucucaaaggcucuuuucagagccaccaaaaaaaaaaaaaaaaaaaaaaaaaaaaaaaaaaaaaaaaaaaaaaaaaaaaaaaaaaaaaaaaaaaaaaaaaaaaaaaaaaaaaaaaaaaaaaaaaaaaa

SEQ ID NO: 29151 - RNA, 1812 nt, Artificial Sequence
  mRNA product Design b-4 (hSL-A100) comprising derived and/or modified sequence from LASV(G733-SLE-2010;Clade IV)__AIT17154__GPCmut5 (opt1)
aggagagucccgcagucggcguccagcggcucugcuuguucgugugugugucguugcaggccuuauucaagcuuaccaugggccagaucgugaccuucuuccaggaggucccccacgugaucgaggaggugaugaacaucguccugaucgcccucagcauccuggccgugcugaaggggcucuacaacuucgcgaccugcggcaucguggggcuggucuccuuccugcuccugugcggccgcagcugcacgaccucccuguacaaggggguguacgagcuccagacccuggagcugaacauggagacccucaacaugacgaugccgcugagcugcaccaagaacaacucccaccacuacaucauggugggcaacgagaccggccuggagcucacccugacgaacaccagcaucaucaaccacaaguucugcaaccuguccgacgcccacaagaagaaccucuacgaccacgcccugaugagcaucaucuccaccuuccaccugagcauccccaacuucaaccaguacgaggccauguccugcgacuucaacgggggcaagaucagcguccaguacaaccucucccacagcuacgccggggacgcggccaaccacugcggcaccaucgccaacggggugcugcagacguucaugcggauggccuggggcggcuccuacaucgcgcuggacagcgggugcgaccgcugggacugcaucaugaccuccuaccaguaccucaucauccagaacaccaccugggaggaccacugccaguucagccggcccucccccaucggcuaccuggggcugcucagccagcgcacgcgggacaucuacaucagccgccggcugcugggcaccuucaccuggacccucuccgacagcgagggcaaggacacgcccgggggcuacugccugacccgcuggaugcugaucgaggccgagcucaagugcuucgggaacaccgccguggccaagugcaacgagaagcacgacgaggaguucugcgacaugcugcggcuguucgacuucaacaagcaggccauccagcgccucaaggcgccggcccagauguccauccagcugaucaacaaggccgucaacgcccugaucaacgaccagcucaucaugaagaaccaccuccgggacaucaugugcauccccuacugcaacuacagcaaguacugguaccugaaccacaccacgaccggcaagaccucccugcccaagugcuggcuggugagcaacggguccuaccugaacgagacccacuucagcgacgacaucgagcagcaggccgacaacaugaucacggagaugcuccagaaggaguacauggagcgccagggcaagaccccgcugggccugguggaccuguucgucuucuccaccagcuucuaccucaucuccaucuuccugcaccuggugaagauccccacccaccggcacguggucggcaagagcugccccaagccccaccgccucaaccacauggggaucugcuccugcgggcuguacggccagccgggggugcccgugaaguggaagcggugaggacuaguaauaaggaaacuguaugaaugucugugggcaggaagugaagagauccuucuguaaagguuuuuggaauuaugucugcugaauaauaaacuuuuuugaaauaauaaaucugguagaaaaaugagaucucaaaggcucuuuucagagccaccaaaaaaaaaaaaaaaaaaaaaaaaaaaaaaaaaaaaaaaaaaaaaaaaaaaaaaaaaaaaaaaaaaaaaaaaaaaaaaaaaaaaaaaaaaaaaaaaaaaaa

SEQ ID NO: 29152 - RNA, 1812 nt, Artificial Sequence
  mRNA product Design b-4 (hSL-A100) comprising derived and/or modified sequence from MOPV/LASV reassortant(IGS-1;Clade IV)__AFY05576__GPCmut5 (opt1)
aggagagucccgcagucggcguccagcggcucugcuuguucgugugugugucguugcaggccuuauucaagcuuaccaugggccagaucgugaccuucuuccaggaggucccccacgugaucgaggaggugaugaacaucguccugaucgcccucagcgugcuggccgugcugaaggggcucuacaacuucgcgaccugcggccuggucgggcuggugacguuccuccugcugugcggccgcuccugcaccaccagccucuacaaggggguguacgagcugcagacccuggagcucaacauggagacgcugaacaugaccaugccgcuguccugcaccaagaacaacagccaccacuacaucauggucggcaacgagaccggccucgagcugacgcugaccaacaccuccaucaucaaccacaaguucugcaaccucagcgacgcccacaagaagaaccuguacgaccacgcccugauguccaucaucagcaccuuccaccucuccauccccaacuucaaccaguacgaggccaugagcugcgacuucaacgggggcaagaucuccgugcaguacaaccugagccacuccuacgccggggacgcggccaaccacugcggcacgguggccaacgggguccugcagaccuucaugcggauggccuggggcggcagcuacaucgcgcucgacuccgggugcggcaacugggacugcaucaugaccagcuaccaguaccugaucauccagaacaccacgugggaggaccacugccaguucucccgccccagccccaucggguaccugggccuccugucccagcggacccgcgacaucuacaucagccggcgccugcucggcaccuucaccuggacgcugagcgacuccgagggggaggacaccccgggcggguacugccugacccgguggaugcucaucgaggccgagcugaagugcuucggcaacaccgccguggccaagugcaacgagaagcacgacgaggaguucugcgacaugcugcgccucuucgacuucaacaagcaggccauccagcggcugaaggcgcccgcccagaugagcauccagcugaucaacaaggccgugaacgcccucaucaacgaccagcugaucaugaagaaccaccuccgcgacaucaugugcauccccuacugcaacuacuccaaguacugguaccugaaccacacgaccaccgggcggaccagccugcccaagugcuggcuggucuccaacggcagcuaccucaacgagacgcacuucuccgacgacaucgagcagcaggccgacaacaugaucaccgagaugcugcagaaggaguacauggagcgccagggcaagaccccgcuggggcugguggaccucuucguguucagcaccuccuucuaccugaucagcaucuuccugcaccucgucaagauccccacgcaccggcacaucgugggcaaguccugccccaagccccaccgccugaaccacauggggaucugcagcugcggccuguacaagcagccgggggugcccgucaaguggaagcggugaggacuaguaauaaggaaacuguaugaaugucugugggcaggaagugaagagauccuucuguaaagguuuuuggaauuaugucugcugaauaauaaacuuuuuugaaauaauaaaucugguagaaaaaugagaucucaaaggcucuuuucagagccaccaaaaaaaaaaaaaaaaaaaaaaaaaaaaaaaaaaaaaaaaaaaaaaaaaaaaaaaaaaaaaaaaaaaaaaaaaaaaaaaaaaaaaaaaaaaaaaaaaaaaa

SEQ ID NO: 29153 - RNA, 1812 nt, Artificial Sequence
  mRNA product Design b-4 (hSL-A100) comprising derived and/or modified sequence from LASV(LM765-SLE-2012;Clade IV)__AIT17814__GPCmut5 (opt1)
aggagagucccgcagucggcguccagcggcucugcuuguucgugugugugucguugcaggccuuauucaagcuuaccaugggccagaucgugaccuucuuccaggaggucccccacgugaucgaggaggugaugaacaucguccugaucgcccucagcauccuggccgugcugaaggggcucuacaacuucgcgaccugcggccugguggggcuggucacguuccuccugcugugcggccgcuccugcaccaccagccucuacaaggggguguacgagcugcagacccuggagcucaacauggagacgcugaacaugaccaugccgcuguccugcaccaagaacaacagccaccacuacaucauggugggcaacgagaccggccucgagcugacgcugaccaacaccuccaucaucgaccacaaguucugcaaccucagcgacgcccaccggaagaaccuguacgaccacgcccugauguccaucaucagcaccuuccaccucuccauccccaacuucaaccaguacgaggccaugagcugcgacuucaacgggggcaagaucuccguccaguacaaccugagccacuccuacgccaaggacgcggccgaccacugcgggacgguggccaacggcgugcugcagaccuucaugcgcauggccuggggcgggagcuacaucgcgcucgacuccggcugcgggcggugggacugcaucaugaccagcuaccaguaccugaucauccagaacaccacgugggaggaccacugccaguucucccgccccagccccaucggcuaccuggggcuccugucccagcggacccgcgacaucuacaucagccggcgccugcucggcaccuucaccuggacgcugagcgacuccgagggcaaggacacccccgggggcuacugccugacccgguggaugcucaucgaggccgagcugaagugcuucgggaacaccgccgucgccaagugcaacgagaagcacgacgaggaguucugcgacaugcugcgccucuucgacuucaacaagcaggccauccagcggcugaaggcgccggcccagaugagcauccagcugaucaacaaggccgugaacgcccucaucaacgaccagcugaucaugaagaaccaccuccgcgacaucaugugcauccccuacugcaacuacuccaaguacugguaccugaaccacacgaccaccggcaagaccagccugcccaagugcuggcugguguccaacgggagcuaccucaacgagacgcacuucuccgacgacaucgagcagcaggccgacaacaugaucaccgagaugcugcagaaggaguacauggagcggcagggcaagaccccgcugggccuggucgaccucuucguguucagcaccuccuucuaccugaucagcaucuuccugcaccucgugaagauccccacgcaccgccacaucgucgggaagcccugccccaagccgcaccggcugaaccacaugggcaucugcuccugcgggcuguacaagcagcccggcgugcccgugaaguggaagcgcugaggacuaguaauaaggaaacuguaugaaugucugugggcaggaagugaagagauccuucuguaaagguuuuuggaauuaugucugcugaauaauaaacuuuuuugaaauaauaaaucugguagaaaaaugagaucucaaaggcucuuuucagagccaccaaaaaaaaaaaaaaaaaaaaaaaaaaaaaaaaaaaaaaaaaaaaaaaaaaaaaaaaaaaaaaaaaaaaaaaaaaaaaaaaaaaaaaaaaaaaaaaaaaaaa

SEQ ID NO: 29154 - RNA, 1812 nt, Artificial Sequence
  mRNA product Design b-4 (hSL-A100) comprising derived and/or modified sequence from LASV(LM776-SLE-2012;Clade IV)__AIT17824__GPCmut5 (opt1)
aggagagucccgcagucggcguccagcggcucugcuuguucgugugugugucguugcaggccuuauucaagcuuaccaugggccagaucgugaccuucuuccaggaggucccccacgugaucgaggaggugaugaacaucguccugaucgcccucagcauccuggccgugcugaaggggcucuacaacuucgcgaccugcggccugguggggcuggucacguuccuccugcugugcggccgcuccugcaccaccagcguguacaaggggguguacgagcuccagacccuggagcugaacauggagacgcucaacaugaccaugccgcuguccugcaccaagaacaacagccaccacuacaucauggucggcaacgagaccggccuggagcucacgcugaccaacaccuccaucaucaaccacaaguucugcaaccugagcgacgcccacaagaagaaccucuacgaccacgcccugauguccaucaucagcaccuuccaccuguccauccccaacuucaaccaguacgaggccaugagcugcgacuucaacgggggcaagaucuccgugcaguacaaccucagccacuccuacgccggggacgcggccaaccacugcggcacgguggccaacgggguccugcagaccuucaugcggauggccuggggcggcagcuacaucgcgcuggacuccgggugcggcaagugggacugcaucaugaccagcuaccaguaccucaucauccagaacaccacgugggaggaccacugccaguucucccgccccagccccaucggguaccugggccugcucucccagcggacccgcgacaucuacaucagccggcgccugcugggcaccuucaccuggacgcucagcgacuccgaggggaaggacaccccgggcggguacugccugacccgguggaugcugaucgaggccgagcucaagugcuucggcaacaccgccguggccaagugcaacgagaagcacgacgaggaguucugcgacaugcugcgccuguucgacuucaacaagcaggccauccagcggcucaaggcgcccgcccagaugagcauccagcugaucaacaaggccgugaacgcccugaucaacgaccagcucaucaugaagaaccaccuccgcgacaucaugugcauccccuacugcaacuacuccaaguacugguaccugaaccacacgaccaccgggaagaccagccugcccaagugcuggcuggucuccaacggcagcuaccugaacgagacgcacuucuccgacgacaucgagcagcaggccgacaacaugaucaccgagaugcuccagaaggaguacauggagcggcagggcaagaccccgcuggggcugguggaccuguucguguucagcaccuccuucuaccucaucagcaucuuccugcaccuggucaagauccccacgcaccgccacaucgugggcaaguccugccccaagccccaccggcucaaccacauggggaucugcagcugcggccuguacaagcagccgggggugcccguccgcuggaagcggugaggacuaguaauaaggaaacuguaugaaugucugugggcaggaagugaagagauccuucuguaaagguuuuuggaauuaugucugcugaauaauaaacuuuuuugaaauaauaaaucugguagaaaaaugagaucucaaaggcucuuuucagagccaccaaaaaaaaaaaaaaaaaaaaaaaaaaaaaaaaaaaaaaaaaaaaaaaaaaaaaaaaaaaaaaaaaaaaaaaaaaaaaaaaaaaaaaaaaaaaaaaaaaaaa

SEQ ID NO: 29155 - RNA, 1812 nt, Artificial Sequence
  mRNA product Design b-4 (hSL-A100) comprising derived and/or modified sequence from LASV(Mad39;Clade IV)__ANH09722__GPCmut5 (opt1)
aggagagucccgcagucggcguccagcggcucugcuuguucgugugugugucguugcaggccuuauucaagcuuaccaugggccagaucgugaccuucuuccaggaggucccccacgugaucgaggaggugaugaacaucguccugaucgcccucagcauccuggccgugcugaaggggcucuacaacguggcgaccugcggccugaucgggcuggucacguuccuccugcugugcggccgcuccugcaccaccacccucuacaaggggguguacgagcugcaggcccuggagcucaacauggagacgcugaacaugaccaugccgcugagcugcaccaagaacaacucccaccacuacauccgggugggcaacgagaccggccucgagcugacgcugaccaacaccagccucaucaaccacaaguucugcaaccuguccgacgcccacaagaagaaccuguacgaccacgcccucaugagcaucaucuccaccuuccaccugagcauccccaacuucaaccaguacgaggccauguccugcgacuucaacgacgggaagaucagcguccaguacaaccugucccacacguacgcgggcgacaccgccaaccacugcgggaccguggccaacggcgugcuccagaccuucaugcgcauggccuggggcgggagcuacaucgcgcuggacuccggcugcgggggcugggacugcaucaugacgagcuaccaguaccugaucauccagaacaccaccugggaggaccacugccaguucucccggcccagccccaucggguaccucggccugcugucccagcgcacccgggacaucuacaucagccgccggcuccugggcacguucaccuggacccuguccgacagcgaggggaaggacaccccgggcggguacugccucacgcgcuggaugcugaucgaggccgagcugaagugcuucggcaacaccgccgucgccaagugcaacgagaagcacgacgaggaguucugcgacaugcuccggcuguucgacuucaacaagcaggccauccagcgccugaaggcgcccgcccagaugagcauccagcucaucaacaaggccgugaacgcccugaucaacgaccagcugaucaugaagaaccaccuccgggacaucaugugcauccccuacugcaacuacuccaaguacugguaccugaaccacaccgugaccgggaagacgagccugcccaagugcuggcucgucuccaacggcagcuaccugaacgagacccacuucuccgacgacaucgagcagcaggccgacaacaugaucaccgagaugcugcagaaggaguacauggagcgccagggcaagaccccgcuggggcucguggaccuguucguguucagcacguccuucuaccugaucagcaucuuccuccaccuggucaagauccccacccaccggcacguggugggcaagcccugccccaagccgcaccgccugaaccacauggggaucugcuccugcggcuucuacaagcagcccgggguccccgugcgguggaagcgcugaggacuaguaauaaggaaacuguaugaaugucugugggcaggaagugaagagauccuucuguaaagguuuuuggaauuaugucugcugaauaauaaacuuuuuugaaauaauaaaucugguagaaaaaugagaucucaaaggcucuuuucagagccaccaaaaaaaaaaaaaaaaaaaaaaaaaaaaaaaaaaaaaaaaaaaaaaaaaaaaaaaaaaaaaaaaaaaaaaaaaaaaaaaaaaaaaaaaaaaaaaaaaaaaa

SEQ ID NO: 29156 - RNA, 1812 nt, Artificial Sequence
  mRNA product Design b-4 (hSL-A100) comprising derived and/or modified sequence from LASV(Z0947-SLE-2011;Clade IV)__AIT17840__GPCmut5 (opt1)
aggagagucccgcagucggcguccagcggcucugcuuguucgugugugugucguugcaggccuuauucaagcuuaccaugggccagaucgugaccuucuuccaggaggucccccacgugaucgaggaggugaugaacaucguccugaucgcccucagcauccuggccgugcugaaggggcucuacaacuucgcgaccugcggccugguggggcuggucacguuccuccugcugugcggccgcuccugcaccaucagccucuacaaggggguguacgagcugcagacccuggagcucaacauggagacccugaacaugacgaugccgcuguccugcaccaagaacaacagccaccacuacaucauggugggcaacgagaccggccucgagcugacccugacgaacaccuccaucaucaaccacaaguucugcaaccucagcgacgcccacaagaagaaccuguacgaccacgcccugauguccaucaucagcaccuuccaccucuccauccccaacuucaaccaguacgaggccaugagcugcgacuucaacgggggcaagaucuccguccaguacaaccugagccacuccuacgccggggacgcggccaaccacugcggcaccguggccaacggggugcugcagacguucaugcggauggccuggggcggcagcuacaucgcgcucgacuccgggugcgaccgcugggacugcaucaugaccagcuaccaguaccugaucauccagaacaccaccugggaggaccacugccaguucucccggcccagccccaucggcuaccuggggcuccugucccagcgcacgcgggacaucuacaucagccgccggcugcucggcaccuucaccuggacccugagcgacuccgagggcaaggacacgcccgggggcuacugccugacccgcuggaugcucaucgaggccgagcugaagugcuucgggaacaccgccgucgccaagugcaacgagaagcacgacgaggaguucugcgacaugcugcggcuguucgacuucaacaagcaggccauccagcgccugaaggcgccggcccagaugagcauccagcugaucaacaaggccgugaacgcccucaucaacgaccagcugaucaugaagaaccaccuccgggacaucaugugcauccccuacugcaacuacuccaaguacugguaccucaaccacaccacgaccggcaagaccagccugcccaagugcuggcugguguccaacgggagcuaccucaacgagacccacuucuccgacgacaucgagcagcaggccgacaacaugaucacggagaugcugcagaaggaguacauggagcgccagggcaagaccccgcugggccuggucgaccucuucguguucagcaccuccuucuaccugaucagcaucuuccugcaccucgugaagauccccacccaccggcacaucgucgggaagcccugccccaagccgcaccgccugaaccacaugggcaucugcuccugcgggcuguacaagcagcccggcgugcccgugaaguggaagcggugaggacuaguaauaaggaaacuguaugaaugucugugggcaggaagugaagagauccuucuguaaagguuuuuggaauuaugucugcugaauaauaaacuuuuuugaaauaauaaaucugguagaaaaaugagaucucaaaggcucuuuucagagccaccaaaaaaaaaaaaaaaaaaaaaaaaaaaaaaaaaaaaaaaaaaaaaaaaaaaaaaaaaaaaaaaaaaaaaaaaaaaaaaaaaaaaaaaaaaaaaaaaaaaaa

SEQ ID NO: 29157 - RNA, 1812 nt, Artificial Sequence
  mRNA product Design b-4 (hSL-A100) comprising derived and/or modified sequence from LASV(Josiah;Clade IV)__NP_694870__GPCmut5 (opt4)
aggagagucccgcagucggcguccagcggcucugcuuguucgugugugugucguugcaggccuuauucaagcuuaccaugggccagaucgugaccuucuuccaggaggugccccacgugaucgaggaggugaugaacaucgugcugaucgcccugagcgugcuggccgugcugaagggccuguacaacuucgccaccugcggccuggugggccuggugaccuuccugcugcugugcggcagaagcugcaccaccagccuguacaagggcguguacgagcugcagacccuggagcugaacauggagacccugaacaugaccaugccccugagcugcaccaagaacaacagccaccacuacaucauggugggcaacgagaccggccuggagcugacccugaccaacaccagcaucaucaaccacaaguucugcaaccugagcgacgcccacaagaagaaccuguacgaccacgcccugaugagcaucaucagcaccuuccaccugagcauccccaacuucaaccaguacgaggccaugagcugcgacuucaacggcggcaagaucagcgugcaguacaaccugagccacagcuacgccggcgacgccgccaaccacugcggcaccguggccaacggcgugcugcagaccuucaugagaauggccuggggcggcagcuacaucgcccuggacagcggcugcggcaacugggacugcaucaugaccagcuaccaguaccugaucauccagaacaccaccugggaggaccacugccaguucagcagacccagccccaucggcuaccugggccugcugagccagagaaccagagacaucuacaucagcagaagacugcugggcaccuucaccuggacccugagcgacagcgagggcaaggacacccccggcggcuacugccugaccagauggaugcugaucgaggccgagcugaagugcuucggcaacaccgccguggccaagugcaacgagaagcacgacgaggaguucugcgacaugcugagacuguucgacuucaacaagcaggccauccagagacugaaggcccccgcccagaugagcauccagcugaucaacaaggccgugaacgcccugaucaacgaccagcugaucaugaagaaccaccugagagacaucaugugcauccccuacugcaacuacagcaaguacugguaccugaaccacaccaccaccggcagaaccagccugcccaagugcuggcuggugagcaacggcagcuaccugaacgagacccacuucagcgacgacaucgagcagcaggccgacaacaugaucaccgagaugcugcagaaggaguacauggagagacagggcaagaccccccugggccugguggaccuguucguguucagcaccagcuucuaccugaucagcaucuuccugcaccuggugaagauccccacccacagacacaucgugggcaagagcugccccaagccccacagacugaaccacaugggcaucugcagcugcggccuguacaagcagcccggcgugcccgugaaguggaagagaugaggacuaguaauaaggaaacuguaugaaugucugugggcaggaagugaagagauccuucuguaaagguuuuuggaauuaugucugcugaauaauaaacuuuuuugaaauaauaaaucugguagaaaaaugagaucucaaaggcucuuuucagagccaccaaaaaaaaaaaaaaaaaaaaaaaaaaaaaaaaaaaaaaaaaaaaaaaaaaaaaaaaaaaaaaaaaaaaaaaaaaaaaaaaaaaaaaaaaaaaaaaaaaaaa

SEQ ID NO: 29158 - RNA, 1809 nt, Artificial Sequence
  mRNA product Design b-4 (hSL-A100) comprising derived and/or modified sequence from LASV(LP;Clade I)__AAF86701__GPCmut5 (opt4)
aggagagucccgcagucggcguccagcggcucugcuuguucgugugugugucguugcaggccuuauucaagcuuaccaugggccagaucaucaccuucuuccaggaggugccccacgugaucgaggaggugaugaacaucgugcugaucgcccugagccugcuggccauccugaagggccuguacaacaucgccaccugcggcaucaucggccugguggccuuccuguuccugugcggcaagagcugcagccugacccugaagggcggcuacgagcugcagacccuggagcugaacauggagacccugaacaugaccaugccccugagcugcaccaagaacagcagccaccacuacaucagagugggcaacgagaccggccuggagcugacccugaccaacaccagcaucaucaaccacaaguucugcaaccugagcgacgcccacaagaagaaccuguacgaccacgcccugaugagcaucaucagcaccuuccaccugagcauccccaacuucaaccaguacgaggccaugagcugcgacuucaacggcggcaagaucagcgugcaguacaaccugagccacagcuacgccggcgacgccgccgagcacugcggcaccguggccaacggcgugcugcagaccuucaugagaauggccuggggcggcagauacaucgcccuggacagcggcugcggcaacugggacugcaucaugaccagcuaccaguaccugaucauccagaacaccaccugggaggaccacugccaguucagcagacccagccccaucggcuaccugggccugcugagccagagaaccagagacaucuacaucagcagaagacugcugggcaccuucaccuggacccugagcgacagcgagggcaacgagacccccggcggcuacugccugaccagauggaugcugaucgaggccgagcugaagugcuucggcaacaccgccguggccaagugcaacgagaagcacgacgaggaguucugcgacaugcugagacuguucgacuucaacaagcaggccaucagaagacugaaggcccccgcccagaugagcauccagcugaucaacaaggccgugaacgcccugaucaacgaccagcugaucaugaagaaccaccugagagacaucaugugcauccccuacugcaacuacagcaaguacugguaccugaaccacaccagcagcggcagaaccagccugcccaagugcuggcugaucagcaacggcagcuaccugaacgagacccaguucagcgacgacaucgagcagcaggccgacaacaugaucaccgagaugcugcagaaggaguacaucgagagacagggcaagaccccccugggccugguggacaucuucaucuucagcaccagcuucuaccugaucagcaucuuccugcaccugaucaagauccccacccacagacacaucgugggcaagcccugccccaagccccacagacugaaccacaugggcgugugcagcugcggccuguacaagcaccccggcgugcccaccaaguggaagagaugaggacuaguaauaaggaaacuguaugaaugucugugggcaggaagugaagagauccuucuguaaagguuuuuggaauuaugucugcugaauaauaaacuuuuuugaaauaauaaaucugguagaaaaaugagaucucaaaggcucuuuucagagccaccaaaaaaaaaaaaaaaaaaaaaaaaaaaaaaaaaaaaaaaaaaaaaaaaaaaaaaaaaaaaaaaaaaaaaaaaaaaaaaaaaaaaaaaaaaaaaaaaaaaaa

SEQ ID NO: 29159 - RNA, 1809 nt, Artificial Sequence
  mRNA product Design b-4 (hSL-A100) comprising derived and/or modified sequence from LASV(803213;Clade II)__AAF86703__GPCmut5 (opt4)
aggagagucccgcagucggcguccagcggcucugcuuguucgugugugugucguugcaggccuuauucaagcuuaccaugggccagaucaucaccuucuuccaggaggugccccacgugaucgaggaggugaugaacaucgugcugaucgcccugagccugcuggccauccugaagggcaucuacaacguggccaccugcggccuguucggccugaucagcuuccugcugcugugcggcagaagcugcagcgugaccuacaagggcguguacgagcugcagacccuggagcugaacauggccaaccugaacaugaccaugccccugagcugcaccaagaacaacagccaccacuacaucauggugggcaacgagaccggccuggagcugacccugaccaacaccagcaucaucaaccacaaguucugcaaccugagcgacgcccacaagaagaaccuguacgaccacgcccugaugagcaucaucagcaccuuccaccugagcauccccaacuucaaccaguacgaggccaugagcugcgacuucaacggcggcaagaucagcgugcaguacaaccugagccacagcuucgccguggacgccgccaaccacugcggcaccaucgccaacggcgugcugcagaccuucaugagaauggccuggggcggcagcuacaucgcccuggacagcggcugcggcaacugggacugcaucaugaccagcuaccaguaccugaucauccagaacaccaccugggaggaccacugccaguucagcagacccagccccaucggcuaccugggccugcugagccagagaaccagagacaucuacaucagcagaagacugcugggcaccuucaccuggacccugagcgacagcgagggcaacgaggcccccggcggcuacugccugaccagauggaugcugaucgaggccgagcugaagugcuucggcaacaccgccguggccaagugcaacgagaagcacgacgaggaguucugcgacaugcugagacuguucgacuucaacaagcaggccaucaagagacugaagacccccgcccagaugagcauccagcugaucaacaaggccgugaacgcccugaucaacgaccagcugaucaugaagaaccaccugagagacaucaugugcauccccuacugcaacuacagcagauacugguaccugaaccacaccgugaccggcaagaccagccugcccagaugcuggcuggugagcaacggcagcuaccugaacgagacccacuucagcgacgacaucgagcagcaggccgacaacaugaucaccgagaugcugcagaaggaguacauggacagacagggcaagaccccccugggccugguggaccuguucguguucagcaccagcuucuaccugaucagcaucuuccugcaccuggugaagauccccacccacagacacaucgugggcaagcccugccccaagccccacagacugaaccacaugggcaucugcagcugcggccuguacaagcaccccggcgugcccgugaaguggaagagaugaggacuaguaauaaggaaacuguaugaaugucugugggcaggaagugaagagauccuucuguaaagguuuuuggaauuaugucugcugaauaauaaacuuuuuugaaauaauaaaucugguagaaaaaugagaucucaaaggcucuuuucagagccaccaaaaaaaaaaaaaaaaaaaaaaaaaaaaaaaaaaaaaaaaaaaaaaaaaaaaaaaaaaaaaaaaaaaaaaaaaaaaaaaaaaaaaaaaaaaaaaaaaaaaa

SEQ ID NO: 29160 - RNA, 1809 nt, Artificial Sequence
  mRNA product Design b-4 (hSL-A100) comprising derived and/or modified sequence from LASV(GA391;Clade III)__CAA36645__GPCmut5 (opt4)
aggagagucccgcagucggcguccagcggcucugcuuguucgugugugugucguugcaggccuuauucaagcuuaccaugggccagaucgugaccuucuuccaggaggugccccacgugaucgaggaggugaugaacaucgugcugaucgcccugagcauccuggccauccugaagggccuguacaacguggccaccugcggccugaucggccuggugaccuuccugcugcugagcggcagaagcugcagccugaucuacaagggcaccuacgagcugcagacccuggagcugaacauggagacccugaacaugaccaugccccugagcugcaccaagaacaacagccaccacuacaucagagugggcaacgagaccggccuggagcugacccugaccaacaccagcauccugaaccacaaguucugcaaccugagcgacgcccacaagagaaaccuguacgaccacagccugaugagcaucaucagcaccuuccaccugagcauccccaacuucaaccaguacgaggccaugagcugcgacuucaacggcggcaagaucaccgugcaguacaaccugagccacagcuucgccguggacgccgccggccacugcggcacccuggccaacggcgugcugcagaccuucaugagaauggccuggggcggcagcuacaucgcccuggacagcggcugcggcaacugggacugcaucaugaccagcuaccaguaccugaucauccagaacaccaccugggacgaccacugccaguucagcagacccagccccaucggcuaccugggccugcugagccagagaaccagagacaucuacaucagcagaagacugcugggcaccuucaccuggacccugagcgacagcgagggcaacgagacccccggcggcuacugccugaccagauggaugcugaucgaggccgagcugaagugcuucggcaacaccgccguggccaagugcaacgagaagcacgacgaggaguucugcgacaugcugagacuguucgacuucaacaagcaggccaucagaagacugaagacccccgcccagaugagcauccagcugaucaacaaggccgugaacgcccugaucaacgaccagcugaucaugaagaaccaccugagagacaucaugugcauccccuacugcaacuacagcagauacugguaccugaaccacaccagcaccggcaagaccagccugcccagaugcuggcugaucagcaacggcagcuaccugaacgagaccaaguucagcgacgacaucgagcagcaggccgacaacaugaucaccgagaugcugcagaaggaguacaucgacagacagggcaagaccccccugggccugguggaccuguucguguucagcaccagcuucuaccugaucagcaucuuccugcaccuggugaagauccccacccacagacacaucgugggcaagcccugccccaagccccacagacugaaccacaugggcaucugcagcugcggccuguacaagcagcccggcgugcccgugagauggaagagaugaggacuaguaauaaggaaacuguaugaaugucugugggcaggaagugaagagauccuucuguaaagguuuuuggaauuaugucugcugaauaauaaacuuuuuugaaauaauaaaucugguagaaaaaugagaucucaaaggcucuuuucagagccaccaaaaaaaaaaaaaaaaaaaaaaaaaaaaaaaaaaaaaaaaaaaaaaaaaaaaaaaaaaaaaaaaaaaaaaaaaaaaaaaaaaaaaaaaaaaaaaaaaaaaa

SEQ ID NO: 29161 - RNA, 1812 nt, Artificial Sequence
  mRNA product Design b-4 (hSL-A100) comprising derived and/or modified sequence from LASV(AV;Clade V)__CCA30314__GPCmut5 (opt4)
aggagagucccgcagucggcguccagcggcucugcuuguucgugugugugucguugcaggccuuauucaagcuuaccaugggccagaucgugaccuucuuccaggaggugccccacgugaucgaggaggugaugaacaucgugcugaucgcccugagcauccuggccgugcugaagggccuguacaacaucgccaccugcggccugaucggccugaucaccuuccugcugcugugcggcagaagcugcagcagcaaccuguacaagggcguguacgagcugcagagccuggaccugaacauggagacccugaacaugaccaugccccugagcugcaccaagaacaacagccaccacuacaucagagugggcaacgacaccggccuggagcugacccugaccaacaccagcauccugaaccacaaguucugcaaccugagcgacgcccacaagaaggaccuguacgaccacgcccugaugagcaucaucagcaccuuccaccugagcauccccaacuucaaccaguacgaggccaugagcugcgacuucaacggcggcaagaucagcgugcaguacaaccugagccacagcuacgccaucgacgccgccaaccacugcggcaccguggccaacggcauccugcagaccuucaugagaauggccuggggcggcagcuacaucgcccuggacagcggcugcggcaacugggacugcaucaugaccagcuaccaguaccugaucauccagaacaccaccugggagaaccacugccaguucagcagacccagccccaucggcuaccugggccugcugagccagagaaccagagacaucuacaucagcagaagacugcugggcaccuucaccuggacccugagcgacagcgagggcaacgccacccccggcggcuacugccugaccagauggaugcugaucgaggccgagcugaagugcuucggcaacaccgccguggccaagugcaacgagaagcacgacgaggaguucugcgacaugcugagacuguucgacuucaacaagcaggccaucagcagacugaagagccccgcccagaugagcauccagcugaucaacaaggccgugaacgcccugaucaacgaccagcugaucaugaagaaccaccugagagacaucaugugcauccccuacugcaacuacagcaaguacugguaccugaaccacaccaucaccggcaagaccagccugcccaagugcuggcuggugagcaacggcagcuaccugaacgagacccacuucagcgacgacaucgagcagcaggccgacaacaugaucaccgagaugcugcagaaggaguacauggagagacagggcaagaccccccugggccugguggaccuguucguguucagcaccagcuucuaccugaucagcaucuuccugagacuggugaagauccccacccacagacacaucgugggcaagcccugccccaagccccacagacugaaccacaugggcaucugcagcugcggccuguacaagcagcccggcgugcccgugagauggaagagaugaggacuaguaauaaggaaacuguaugaaugucugugggcaggaagugaagagauccuucuguaaagguuuuuggaauuaugucugcugaauaauaaacuuuuuugaaauaauaaaucugguagaaaaaugagaucucaaaggcucuuuucagagccaccaaaaaaaaaaaaaaaaaaaaaaaaaaaaaaaaaaaaaaaaaaaaaaaaaaaaaaaaaaaaaaaaaaaaaaaaaaaaaaaaaaaaaaaaaaaaaaaaaaaaa

SEQ ID NO: 29162 - RNA, 1809 nt, Artificial Sequence
  mRNA product Design b-4 (hSL-A100) comprising derived and/or modified sequence from LASV(Togo/2016/7082;Clade VI)__AMR44577__GPCmut5 (opt4)
aggagagucccgcagucggcguccagcggcucugcuuguucgugugugugucguugcaggccuuauucaagcuuaccaugggccagaucaucaccuucuuccaggaggugccccacgugaucgaggaggugaugaacaucgugcugaucgcccugagccugcuggccauccugaagggcguguacaacguggccaccugcggcaucaucggccuggugaccuuccuguuccugugcggcagaagcugcagccugaucuacaagggcagcuacgagcugcagacccuggagcugaacauggagacccugaacaugaccaugccccugagcugcaccaagaacagcagccaccacuacaucagagugggcaacgagaccggccuggagcugacccugaccaacaccagcaucaucaaccacaaguucugcaaccugagcgacgcccacaagagaaaccuguacgaccacgcccugaugagcauccugagcaccuuccaccugagcauccccaacuucaaccaguacgaggccaugagcugcgacuucaacggcggcaagaucagcgugcaguacaaccugagccacgccuacgccguggacgccgccgagcacugcggcaccguggccaacggcgugcugcagaccuucaugagaauggccuggggcggcagcuacaucgcccuggacagcggcugcggcaacugggacugcaucaugaccagcuaccaguaccugaucauccagaacaccaccugggaggaccacugccaguucagcagacccagccccaucggcuaccugggccugcugagccagagaaccagagacaucuacaucagcagaagacugcugggcaccuucaccuggacccugagcgacagcgagggcaacgagacccccggcggcuacugccugaccagauggaugcugaucgaggccgagcugaagugcuucggcaacaccgccguggccaagugcaacgagaagcacgacgaggaguucugcgacaugcugagacuguucgacuucaacaagcaggccauccagagacugaagagccccgcccagaugagcauccagcugaucaacaaggccgugaacgcccugaucaacgaccagcugaucaugaagaaccaccugagagacaugaugugcauccccuacugcaacuacagcaaguacugguaccugaaccacaccagcagcggcagaaccagccugcccaagugcuggcuggugagcaacggcagcuaccugaacgagacccacuucagcgacgacaucgagcagcaggccgacaacaugaucaccgagaugcugcagaaggaguacaucgacagacagggcaagaccccccugggccugguggaccuguucguguucagcaccagcuucuaccugaucagcaucuuccugcaccugaucaagauccccacccacagacacaucgugggcaagcccugccccaagccccacagacugaaccacaugggcaucugcagcugcggccuguacaagcagcccggcgugcccaccagauggaagagaugaggacuaguaauaaggaaacuguaugaaugucugugggcaggaagugaagagauccuucuguaaagguuuuuggaauuaugucugcugaauaauaaacuuuuuugaaauaauaaaucugguagaaaaaugagaucucaaaggcucuuuucagagccaccaaaaaaaaaaaaaaaaaaaaaaaaaaaaaaaaaaaaaaaaaaaaaaaaaaaaaaaaaaaaaaaaaaaaaaaaaaaaaaaaaaaaaaaaaaaaaaaaaaaaa

SEQ ID NO: 29163 - RNA, 1809 nt, Artificial Sequence
  mRNA product Design b-4 (hSL-A100) comprising derived and/or modified sequence from LASV(KAK-428;Clade n.d. (VII))__ANH09740__GPCmut5 (opt4)
aggagagucccgcagucggcguccagcggcucugcuuguucgugugugugucguugcaggccuuauucaagcuuaccaugggccagaucgugaccuucuuccaggaggugccccacgugaucgaggaggugaugaacaucgugcugaucgcccugagccugcuggccauccugaagggccuguacaacuucgccaccugcggcgugaucggccugaucaccuuccugcugcugugcggcagaagcugcagcgccaccuacaagggccaguacgagcugcagacccuggagcugaacauggagagccugaacaugaccaugccccugagcugcaccaagaacaacagccaccacuacaucagagccggcaacaacaccggccuggagcugacccugaccaacaccagcaucaucagccacaaguucugcaaccugagcgacgcccacaagaagaaccuguacgaccacacccugaugagcaucaucaccaccuuccaccugagcauccccaacuucaaccaguacgaggccaugagcugcgacuucaacggcggcaagaucagcauccaguacaaccugagccacagcuacgccggcgacgccgcccagcacugcggcaccguggccaacggcgugcugcagaccuucaugagaauggccuggggcggcagcuaccuggcccuggacagcggcugcagaggcugggacugcaucaucagcagcuaccaguaccugaucauccagaacaccaccugggacgaccacugccaguucagcagacccagccccaucggcuaccugggcuucgugagccagaagaccagagacaucuacaucagcagaagacugcugggcaccuucaccuggacccugagcgacagcgagggccacgacaugcccggcggcuacugccugaccagauggaugcugaucgaggccgaccugaagugcuucggcaacaccgccguggccaagugcaacgagaagcacgacgaggaguucugcgacauguggagacuguucgacuucaacaagcaggccauccagagacugaaggcccccgcccagaugaacauccagcugaucaacaaggccgugaacgcccugaucaacgaccagcugaugaugaagaaccaccugagagacaucaugugcauccccuacugcaacuacagcaaguucugguaccugaacaacaccaccaccggcagaaccagccugcccagaugcuggcugaucagcaacggcagcuaccugaacgagacccacuucagcgacgacaucgagcagcaggccgacaacaugaucaccgagaugcugcagaaggaguacauggacagacagggcaagaccccccugggccugguggaccuguucguguucagcaccagcuucuaccugaucaccaucuuccugcaccuggugaagauccccacccacagacacaucgugggcaagcccugccccaagccccacagacugaaccacaugggcaucugcagcugcggccuguacaagcagcccggcgugcccgugagauggaagagaugaggacuaguaauaaggaaacuguaugaaugucugugggcaggaagugaagagauccuucuguaaagguuuuuggaauuaugucugcugaauaauaaacuuuuuugaaauaauaaaucugguagaaaaaugagaucucaaaggcucuuuucagagccaccaaaaaaaaaaaaaaaaaaaaaaaaaaaaaaaaaaaaaaaaaaaaaaaaaaaaaaaaaaaaaaaaaaaaaaaaaaaaaaaaaaaaaaaaaaaaaaaaaaaaa

SEQ ID NO: 29164 - RNA, 1809 nt, Artificial Sequence; identical to SEQ ID NO: 29158
  mRNA product Design b-4 (hSL-A100) comprising derived and/or modified sequence from LASV(Pinneo-NIG-1969;Clade I)__AIT17836__GPCmut5 (opt4)

SEQ ID NO: 29165 - RNA, 1809 nt, Artificial Sequence
  mRNA product Design b-4 (hSL-A100) comprising derived and/or modified sequence from LASV(ISTH0009-NIG-2011;Clade II)__AIT17404__GPCmut5 (opt4)
aggagagucccgcagucggcguccagcggcucugcuuguucgugugugugucguugcaggccuuauucaagcuuaccaugggccagaucaucaccuucuuccaggaggugccccacgugaucgaggaggugaugaacaucgugcugaucgcccugagccugcuggccauccugaagggcaucuacaacguggccaccugcggccuguucggccuggugagcuuccugcugcugugcggcagaagcugcagcaccaccuacaagggcguguacgagcugcagacccuggagcuggacauggccagccugaacaugaccaugccccugagcugcaccaagaacaacagccaccacuacaucauggugggcaacgagaccggccuggagcugacccugaccaacaccagcaucaucaaccacaaguucugcaaccugagcgacgcccacaagaagaaccuguacgaccacgcccugaugagcaucaucagcaccuuccaccugagcauccccaacuucaaccaguacgaggccaugagcugcgacuucaacggcggcaagaucagcgugcaguacaaccugagccacgccuacgccguggacgccgccaaccacugcggcaccaucgccaacggcgugcugcagaccuucaugagaauggccuggggcggcagcuacaucgcccuggacagcggcugcggcagcugggacugcaucaugaccagcuaccaguaccugaucauccagaacaccaccugggaggaccacugccaguucagcagacccagccccaucggcuaccugggccugcugagccagagaaccagagacaucuacaucagcagaagacugcugggcaccuucaccuggacccugagcgacagcgagggcaacgagacccccggcggcuacugccugaccagauggaugcugaucgaggccgagcugaagugcuucggcaacaccgccguggccaagugcaacgagaagcacgacgaggaguucugcgacaugcugagacuguucgacuucaacaagcaggccaucagaagacugaagacccccgcccagaugagcauccagcugaucaacaaggccgugaacgcccugaucaacgaccagcugaucaugaagaaccaccugagagacaucaugugcauccccuacugcaacuacagcaaguacugguaccugaaccacaccgugaccggcaagaccagccugcccagaugcuggcuggugagcaacggcagcuaccugaacgagacccacuucagcgacgacaucgagcagcaggccgacaacaugaucaccgagcugcugcagaaggaguacauggacagacagggcaagaccccccugggccugguggaccuguucguguucagcaccagcuucuaccugaucagcaucuuccugcaccugaucaagauccccacccacagacacaucaccggcaagcccugccccaagccccacagacugaaccacaugggcaucugcagcugcggccuguacaagcaccccggcgugcccgugaaguggaagagaugaggacuaguaauaaggaaacuguaugaaugucugugggcaggaagugaagagauccuucuguaaagguuuuuggaauuaugucugcugaauaauaaacuuuuuugaaauaauaaaucugguagaaaaaugagaucucaaaggcucuuuucagagccaccaaaaaaaaaaaaaaaaaaaaaaaaaaaaaaaaaaaaaaaaaaaaaaaaaaaaaaaaaaaaaaaaaaaaaaaaaaaaaaaaaaaaaaaaaaaaaaaaaaaaa

SEQ ID NO: 29166 - RNA, 1809 nt, Artificial Sequence
  mRNA product Design b-4 (hSL-A100) comprising derived and/or modified sequence from LASV(ISTH2010-NIG-2012;Clade II)__AIT17482__GPCmut5 (opt4)
aggagagucccgcagucggcguccagcggcucugcuuguucgugugugugucguugcaggccuuauucaagcuuaccaugggccagaucaucaccuucuuccaggaggugccccacgugaucgaggaggugaugaacaucgugcugaucgcccugagccugcuggccauccugaagggcaucuacaacguggccaccugcggccuguucggccuggugagcuuccugcugcugugcggcagaagcugcagcaccaccuacaagggcguguacgagcugcagacccuggagcuggacauggccagccugaacaugaccaugccccugagcugcaccaagaacaacagccaccacuacaucauggugggcaacgagaccggccuggagcugacccugaccaacaccagcaucaucaaccacaaguucugcaaccugagcgacgcccacaagaagaaccuguacgaccacgcccugaugagcaucaucagcaccuuccaccugagcauccccaacuucaaccaguacgaggccaugagcugcgacuucaacggcggcaagaucagcgugcaguacaaccugagccacgccuacgccguggacgccgccaaccacugcggcaccaucgccaacggcgugcugcagaccuucaugagaauggccuggggcggcagcuacaucgcccuggacagcggcugcggcagcugggacugcaucaugaccagcuaccaguaccugaucauccagaacaucaccugggaggaccacugccaguucagcagacccagccccaucggcuaccugggccugcugagccagagaaccagagacaucuacaucagcagaagacugcugggcaccuucaccuggacccugagcgacagcgagggcaacgagacccccggcggcuacugccugaccagauggaugcugaucgaggccgagcugaagugcuucggcaacaccgccguggccaagugcaacgagaagcacgacgaggaguucugcgacaugcugagacuguucgacuucaacaagcaggccaucagaagacugaagacccccgcccagaugagcauccagcugaucaacaaggccgugaacgcccugaucaacgaccagcugaucaugaagaaccaccugagagacaucaugugcauccccuacugcaacuacagcaaguacugguaccugaaccacaccgugaccggcaagaccagccugcccagaugcuggcuggugagcaacggcagcuaccugaacgagacccacuucagcgacgacaucgagcagcaggccgacaacaugaucaccgagcugcugcagaaggaguacaucgacagacagggcaagaccccccugggccugguggaccuguucguguucagcaccagcuucuaccugaucagcaucuuccugcaccuggugaagauccccacccacagacacguggugggcaagcccugccccaagccccacagacugaaccacaugggcaucugcagcugcggccuguacaagcaccccggcgugcccgugaaguggaagagaugaggacuaguaauaaggaaacuguaugaaugucugugggcaggaagugaagagauccuucuguaaagguuuuuggaauuaugucugcugaauaauaaacuuuuuugaaauaauaaaucugguagaaaaaugagaucucaaaggcucuuuucagagccaccaaaaaaaaaaaaaaaaaaaaaaaaaaaaaaaaaaaaaaaaaaaaaaaaaaaaaaaaaaaaaaaaaaaaaaaaaaaaaaaaaaaaaaaaaaaaaaaaaaaaa

SEQ ID NO: 29167 - RNA, 1809 nt, Artificial Sequence
  mRNA product Design b-4 (hSL-A100) comprising derived and/or modified sequence from LASV(Lassa virus/H.sapiens-wt/NGA/2015/ISTH_0543;Clade II)__AVO03639__GPCmut5 (opt4)
aggagagucccgcagucggcguccagcggcucugcuuguucgugugugugucguugcaggccuuauucaagcuuaccaugggccagaucaucaccuucuuccaggaggugccccacgugaucgaggaggugaugaacaucgugcugaucgcccugagccugcuggccauccugaagggcaucuacaacguggccaccugcggccuguucggccuggugagcuuccugcugcugugcggcagaagcugcagcaccaccuacaagggcguguacgagcugcagacccuggagcuggacauggccaaccugaacaugaccaugccccugagcugcaccaagaacaacagccaccacuacaucauggugggcaacgagaccggccuggagcugacccugaccaacaccagcaucaucaaccacaaguucugcaaccugagcgacgcccacaagaagaaccuguacgaccacgcccugaugagcaucaucagcaccuuccaccugagcauccccaacuucaaccaguacgaggccaugagcugcgacuucaacggcggcaagaucagcgugcaguacaaccugagccacaccuacgccguggacgccgccaaccacugcggcaccaucgccaacggcgugcugcagaccuucaugagaauggccuggggcggcagcuacaucgcccuggacagcggcugcggcagcugggacugcaucaugaccagcuaccaguaccuggugauccagaacaccaccugggaggaccacugccaguucagcagacccagccccaucggcuaccugggccugcugagccagagaaccagagacaucuacaucagcagaagacugcugggcaccuucaccuggacccugagcgacagcgagggcaacgagacccccggcggcuacugccugaccagauggaugcugaucgaggccgagcugaagugcuucggcaacaccgccguggccaagugcaacgagaagcacgacgaggaguucugcgacaugcugagacuguucgacuucaacaagcaggccaucagaagacugaagacccccgcccagaugagcauccagcugaucaacaaggccgugaacgcccugaucaacgaccagcugaucaugaagaaccaccugagagacaucaugugcauccccuacugcaacuacagcaaguacugguaccugaaccacaccgugaccggcaagaccagccugcccagaugcuggcuggugagcaacggcagcuaccugaacgagacccacuucagcgacgacaucgagcagcaggccgacaacaugaucaccgagcugcugcagaaggaguacaucgacagacagggcaagaccccccugggccugguggaccuguucguguucagcaccagcuucuaccugaucagcaucuuccugcaccuggugaagauccccacccacagacacaucaccggcaagcccugccccaagccccacagacugaaccacaugggcaucugcagcugcggccuguacaagcaccccggcgugcccgugaaguggaagagaugaggacuaguaauaaggaaacuguaugaaugucugugggcaggaagugaagagauccuucuguaaagguuuuuggaauuaugucugcugaauaauaaacuuuuuugaaauaauaaaucugguagaaaaaugagaucucaaaggcucuuuucagagccaccaaaaaaaaaaaaaaaaaaaaaaaaaaaaaaaaaaaaaaaaaaaaaaaaaaaaaaaaaaaaaaaaaaaaaaaaaaaaaaaaaaaaaaaaaaaaaaaaaaaaa

SEQ ID NO: 29168 - RNA, 1809 nt, Artificial Sequence
  mRNA product Design b-4 (hSL-A100) comprising derived and/or modified sequence from LASV(Lassa virus/H.sapiens-wt/NGA/2016/ISTH_0009;Clade II)__AVO03571__GPCmut5 (opt4)
aggagagucccgcagucggcguccagcggcucugcuuguucgugugugugucguugcaggccuuauucaagcuuaccaugggccagaucaucaccuucuuccaggaggugccccacgugaucgaggaggugaugaacaucgugcugaucgcccugagccugcuggccauccugaagggcaucuacaacguggccaccugcggccugcugggccuggugagcuuccugcugcugugcggcagaagcugcagcaccaccuacaagggcguguacgagcugcagacccuggagcuggacauggccagccugaacaugaccaugccccugagcugcaccaagaacaacagccaccacuacaucauggugggcaacgagaccggccuggagcugacccugaccaacaccagcaucaucaaccacaaguucugcaaccugagcgacgcccacaagaagaaccuguacgaccacgcccugaugagcaucaucagcaccuuccaccugagcauccccaacuucaaccaguacgaggccaugagcugcgacuucaacggcggcagaaucagcgugcaguacaaccugagccacagcuacgccguggacgccgccaaccacugcggcaccaucgccaacggcgugcugcagaccuucaugagaauggccuggggcggcagcuacaucgcccuggacagcggcugcggcagcugggacugcaucaugaccagcuaccaguaccugaucauccagaacaccaccugggaggaccacugccaguucagcagacccagccccaucggcuaccugggccugcugagccagagaaccagagacaucuacaucagcagaagacugcugggcaccuucaccuggacccugagcgacagcgagggcaacgagacccccggcggcuacugccugaccagauggaugcugaucgaggccgagcugaagugcuucggcaacaccgccguggccaagugcaacgagaagcacgacgaggaguucugcgacaugcugagacuguucgacuucaacaagcaggccaucagaagacugaagacccccgcccagaugagcauccagcugaucaacaaggccgugaacgcccugaucaacgaccagcugaucaugaagaaccaccugagagacaucaugugcauccccuacugcaacuacagcaaguacugguaccugaaccacaccgugaccggcaagaccagccugcccagaugcuggcuggugagcaacggcagcuaccugaacgagacccacuucagcgacgacaucgagcagcaggccgacaacaugaucaccgagcugcugcagaaggaguacaucgacagacagggcaagaccccccugggccugguggaccuguucguguucagcaccagcuucuaccugaucagcaucuuccugcaccuggugaagauccccacccacagacacaucaccggcaagcccugccccaagccccacagacugaaccacaugggcaucugcagcugcggccuguacaaccaccccggcgugcccgugaaguggaagagaugaggacuaguaauaaggaaacuguaugaaugucugugggcaggaagugaagagauccuucuguaaagguuuuuggaauuaugucugcugaauaauaaacuuuuuugaaauaauaaaucugguagaaaaaugagaucucaaaggcucuuuucagagccaccaaaaaaaaaaaaaaaaaaaaaaaaaaaaaaaaaaaaaaaaaaaaaaaaaaaaaaaaaaaaaaaaaaaaaaaaaaaaaaaaaaaaaaaaaaaaaaaaaaaaa

SEQ ID NO: 29169 - RNA, 1809 nt, Artificial Sequence
  mRNA product Design b-4 (hSL-A100) comprising derived and/or modified sequence from LASV(Lassa virus/H.sapiens-wt/NGA/2016/ISTH_0017;Clade II)__AVO03567__GPCmut5 (opt4)
aggagagucccgcagucggcguccagcggcucugcuuguucgugugugugucguugcaggccuuauucaagcuuaccaugggccagaucaucaccuucuuccaggaggugccccacgugaucgaggaggugaugaacaucgugcugaucgcccugagccugcuggccauccugaagggcaucuacaacguggccaccugcggccuguucggccuggugagcuuccugcugcugugcggcagaagcugcagcaccaccuacaagggcguguacgagcugcagacccuggagcuggacauggccagccugaacaugaccaugccccugagcugcaccaagaacaacagccaccacuacaucauggugggcaacgagaccggccuggagcugacccugaccaacaccagcaucaucaaccacaaguucugcaaccugagcgacgcccacaagaagaaccuguacgaccacgcccugaugagcaucaucagcaccuuccaccugagcauccccaacuucaaccaguacgaggccaugagcugcgacuucaacggcggcaagaucagcgugcaguacaaccugagccacaccuacgccaucgacgccgccaaccacugcggcaccaucgccaacggcgugcugcagaccuucaugagaauggccuggggcggcagcuacaucgcccuggacagcggcugcggcagcugggacugcaucaugaccagcuaccaguaccugaucauccagaacaccaccugggaggaccacugccaguucagcagacccagccccaucggcuaccugggccugcugagccagagaaccagagacaucuacaucagcagaagacugcugggcaccuucaccuggacccugagcgacagcgagggcaacgagacccccggcggcuacugccugaccagauggaugcugaucgaggccgagcugaagugcuucggcaacaccgccguggccaagugcaacgagaagcacgacgaggaguucugcgacaugcugagacuguucgacuucaacaagcaggccaucagaagacugaagacccccgcccagaugagcauccagcugaucaacaaggccgugaacgcccugaucaacgaccagcugaucaugaagaaccaccugagagacaucaugugcauccccuacugcaacuacagcaaguacugguaccugaaccacaccgugaccggcaagaccagccugcccagaugcuggcuggugagcaacggcagcuaccugaacgagacccacuucagcgacgacaucgagcagcaggccgacaacaugaucaccgagcugcugcagaaggaguacauggacagacagggcaagaccccccugggccugguggaccuguucguguucagcaccagcuucuaccugaucagcaucuuccugcaccuggugagaauccccacccacagacacgugaucggcaagcccugccccaagccccacagacugaaccacaugggcaucugcagcugcggccuguacaagcaccccggcgugcccgugaaguggaagagaugaggacuaguaauaaggaaacuguaugaaugucugugggcaggaagugaagagauccuucuguaaagguuuuuggaauuaugucugcugaauaauaaacuuuuuugaaauaauaaaucugguagaaaaaugagaucucaaaggcucuuuucagagccaccaaaaaaaaaaaaaaaaaaaaaaaaaaaaaaaaaaaaaaaaaaaaaaaaaaaaaaaaaaaaaaaaaaaaaaaaaaaaaaaaaaaaaaaaaaaaaaaaaaaaa

SEQ ID NO: 29170 - RNA, 1809 nt, Artificial Sequence
  mRNA product Design b-4 (hSL-A100) comprising derived and/or modified sequence from LASV(Lassa virus/H.sapiens-wt/NGA/2018/ISTH_0959;Clade II)__AVV65099__GPCmut5 (opt4)
aggagagucccgcagucggcguccagcggcucugcuuguucgugugugugucguugcaggccuuauucaagcuuaccaugggccagaucaucaccuucuuccaggaggugccccacgugaucgaggaggugaugaacaucgugcugaucgcccugagccugcuggccauccugaagggcaucuacaacguggugaccugcggccuguucggccuggugagcuuccugcugcugugcggcagaagcugcagcaccaccuacaagggcguguacgagcugcagacccuggagcuggacauggccagccugaacaugaccaugccccugagcugcaccaagaacaacagccaccacuacaucauggugggcaacgagaccggccuggagcugacccugaccaacaccagcaucaucaaccacaaguucugcaaccugagcgacgcccacaagaagaaccuguacgaccacgcccugaugagcaucaucagcaccuuccaccugagcauccccaacuucaaccaguacgaggccaugagcugcgacuucaacggcggcaagaucagcgugcaguacaaccugagccacgccuacgccaucgacgccgccaaccacugcggcaccaucgccaacggcgugcugcagaccuucaugagaauggccuggggcggcagcuacaucgcccuggacagcggcugcggcagcugggacugcaucaugaccagcuaccaguaccugaucauccagaacaccaccugggaggaccacugccaguucagcagacccagccccaucggcuaccugggccugcugagccagagaaccagagacaucuacaucagcagaagacugcugggcaccuucaccuggacccugagcgacagcgagggcaacgagacccccggcggcuacugccugaccagauggaugcugaucgaggccgagcugaagugcuucggcaacaccgccguggccaagugcaacgagaagcacgacgaggaguucugcgacaugcugagacuguucgacuucaacaagcaggccaucagaagacugaagacccccgcccagaugagcauccagcugaucaacaaggccgugaacgcccugaucaacgaccagcugaucaugaagaaccaccugagagacaucaugugcauccccuacugcaacuacagcaaguacugguaccugaaccacaccgugaccggcaagaccagccugcccagaugcuggcuggugagcaacggcagcuaccugaacgagacccacuucagcgacgacaucgagcagcaggccgacaacaugaucaccgagcugcugcagaaggaguacaucgacagacagggcaagaccccccugggccugguggaccuguucguguucagcaccagcuucuaccugaucagcaucuuccugcaccuggugaagauccccacccacagacacgugaucggcaagcccugccccaagccccacagacugaaccacaugggcaucugcagcugcggccuguacaagcaccccggcgugcccgugaaguggaagagaugaggacuaguaauaaggaaacuguaugaaugucugugggcaggaagugaagagauccuucuguaaagguuuuuggaauuaugucugcugaauaauaaacuuuuuugaaauaauaaaucugguagaaaaaugagaucucaaaggcucuuuucagagccaccaaaaaaaaaaaaaaaaaaaaaaaaaaaaaaaaaaaaaaaaaaaaaaaaaaaaaaaaaaaaaaaaaaaaaaaaaaaaaaaaaaaaaaaaaaaaaaaaaaaaa

SEQ ID NO: 29171 - RNA, 1809 nt, Artificial Sequence
  mRNA product Design b-4 (hSL-A100) comprising derived and/or modified sequence from LASV(LASV003-NIG-2008;Clade II)__AIT17580__GPCmut5 (opt4)
aggagagucccgcagucggcguccagcggcucugcuuguucgugugugugucguugcaggccuuauucaagcuuaccaugggccagaucaucaccuucuuccaggaggugccccacgugaucgaggaggugaugaacaucgugcugaucgcccugagccugcuggccauccugaagggcaucuacaacguggccaccugcggccuguucggccuggugagcuuccugcugcugugcggcagaagcugcagcaccaccuacaagggcguguacgagcugcagacccuggagcuggacauggccagccugaacaugaccaugccccugagcugcaccaagaacaacagccaccacuacaucauggugggcaacgagaccggccuggagcugacccugaccaacaccagcaucaucaaccacaaguucugcaaccugagcgacgcccacaagaagaaccuguacgaccacgcccugaugagcaucaucagcaccuuccaccugagcauccccaacuucaaccaguacgaggccaugagcugcgacuucaacggcggcaagaucagcgugcaguacaaccugagccacaccuacgccguggacgccgccaaccacugcggcaccaucgccaacggcgugcugcagaccuucaugagaauggccuggggcggcagcuacaucgcccuggacagcggcugcggcagcugggacugcaucaugaccagcuaccaguaccugaucauccagaacaccaccugggaggaccacugccaguucagcagacccagccccaucggcuaccugggccugcugagccagagaaccagagacaucuacaucagcagaagacugcugggcaccuucaccuggacccugagcgacagcgagagcaacgagacccccggcggcuacugccugaccagauggaugcugaucgaggccgagcugaagugcuucggcaacaccgccguggccaagugcaacgagaagcacgacgaggaguucugcgacaugcugagacuguucgacuucaacaagcaggccaucagaagacugaaggcccccgcccagaugagcauccagcugaucaacaaggccgugaacgcccugaucaacgaccagcugaucaugaagaaccaccugagagacaucaugugcauccccuacugcaacuacagcaaguacugguaccugaaccacaccgugaccggcagaaccagccugcccagaugcuggcuggugagcaacggcagcuaccugaacgagacccacuucagcgacgacaucgagcagcaggccgacaacaugaucaccgagcugcugcagaaggaguacauggacagacagggcaagaccccccugggccugguggaccuguucguguucagcaccagcuucuaccugaucagcaucuuccugcaccuggugaagauccccacccacagacacgugaucggcaagcccugccccaagccccacagacugaaccacaugggcaucugcagcugcggccuguacaagcaccccggcgugcccgugaaguggaagagaugaggacuaguaauaaggaaacuguaugaaugucugugggcaggaagugaagagauccuucuguaaagguuuuuggaauuaugucugcugaauaauaaacuuuuuugaaauaauaaaucugguagaaaaaugagaucucaaaggcucuuuucagagccaccaaaaaaaaaaaaaaaaaaaaaaaaaaaaaaaaaaaaaaaaaaaaaaaaaaaaaaaaaaaaaaaaaaaaaaaaaaaaaaaaaaaaaaaaaaaaaaaaaaaaa

SEQ ID NO: 29172 - RNA, 1809 nt, Artificial Sequence
  mRNA product Design b-4 (hSL-A100) comprising derived and/or modified sequence from LASV(LASV035-NIG-2009;Clade II)__AIT17588__GPCmut5 (opt4)
aggagagucccgcagucggcguccagcggcucugcuuguucgugugugugucguugcaggccuuauucaagcuuaccaugggccagaucaucaccuucuuccaggaggugccccacgugaucgaggaggugaugaacaucgugcugaucgcccugagccugcuggccauccugaagggcaucuacaacguggccaccugcggccuguucggccuggugagcuuccugcugcugugcggcagaagcugcagcaccaccuacaagggcguguacgagcugcagacccuggagcuggacauggccagccugaacaugaccaugccccugagcugcaccaagaacaacagccaccacuacaucauggugggcaacgagaccggccuggagcugacccugaccaacaccagcaucaucaaccacaaguucugcaaccugagcgacgcccacaagaagaaccuguacgaccacgcccugaugagcaucaucagcaccuuccaccugagcauccccaacuucaaccaguacgaggccaugagcugcgacuucaacggcggcaagaucagcgugcaguacaaccugagccacgccuacgccguggacgccgccaaccacugcggcaccaucgccaacggcgugcugcagaccuucaugagaauggccuggggcggcagcuacaucgcccuggacagcggcugcggcagcugggacugcaucaugaccagcuaccaguaccugaucauccagaacaccaccugggaggaccacugccaguucagcagacccagccccaucggcuaccugggccugcugagccagagaaccagagacaucuacaucagcagaagacugcugggcaccuucaccuggacccugagcgacagcgagggcaacgagacccccggcggcuacugccugaccagauggaugcugaucgaggccgagcugaagugcuucggcaacaccgccguggccaagugcaacgagaagcacgacgaggaguucugcgacaugcugagacuguucgacuucaacaagcaggccaucagaagacugaaggcccccgcccagaugagcauccagcugaucaacaaggccgugaacgcccugaucaacgaccagcugaucaugaagaaccaccugagagacaucaugugcauccccuacugcaacuacagcaaguacugguaccugaaccacaccgugaccggcaagaccagccugcccagaugcuggcuggugagcaacggcagcuaccugaacgagacccacuucagcgacgacaucgagcagcaggccgacaacaugaucaccgagcugcugcagaaggaguacaucgacagacagggcaagaccccccugggccugguggaccuguucguguucagcaccagcuucuaccugaucagcaucuuccugcaccuggugaagauccccacccacagacacgugaucggcaagcccugccccaagccccacagacugaaccacaugggcaucugcagcugcggccuguacaagcaccccggcgugcccgugaaguggaagagaugaggacuaguaauaaggaaacuguaugaaugucugugggcaggaagugaagagauccuucuguaaagguuuuuggaauuaugucugcugaauaauaaacuuuuuugaaauaauaaaucugguagaaaaaugagaucucaaaggcucuuuucagagccaccaaaaaaaaaaaaaaaaaaaaaaaaaaaaaaaaaaaaaaaaaaaaaaaaaaaaaaaaaaaaaaaaaaaaaaaaaaaaaaaaaaaaaaaaaaaaaaaaaaaaa

SEQ ID NO: 29173 - RNA, 1809 nt, Artificial Sequence
  mRNA product Design b-4 (hSL-A100) comprising derived and/or modified sequence from LASV(LASV1000-NIG-2009;Clade II)__AIT17782__GPCmut5 (opt4)
aggagagucccgcagucggcguccagcggcucugcuuguucgugugugugucguugcaggccuuauucaagcuuaccaugggccagaucaucaccuucuuccaggaggugccccacgugaucgaggaggugaugaacaucgugcugaucgcccugagccugcuggccauccugaagggcaucuacaacguggccaccugcggccuguucggccuggugagcuuccugcugcugugcggcagaagcugcagcaccaccuacaagggcguguacgagcugcagacccuggagcuggacauggccagccugaacaugaccaugccccugagcugcaccaagaacaacagccaccacuacaucauggugggcaacgagaccggccuggagcugacccugaccaacaccagcaucaucaaccacaaguucugcaaccugagcgacgcccacaagaagaaccuguacgaccacgcccugaugagcaucaucagcaccuuccaccugagcauccccaacuucaaccaguacgaggccaugagcugcgacuucaacggcggcaagaucagcgugcaguacaaccugagccacaccuacgccguggacgccgccaaccacugcggcaccaucgccaacggcgugcugcagaccuucaugagaauggccuggggcggcagcuacaucgcccuggacagcggcugcggcagcugggacugcaucaugaccagcuaccaguaccugaucauccagaacaccaccugggaggaccacugccaguucagcagacccagccccaucggcuaccugggccugcugagccagagaaccagagacaucuacaucagcagaagacugcugggcaccuucaccuggacccugagcgacagcgagggcaacgagacccccggcggcuacugccugaccagauggaugcugaucgaggccgagcugaagugcuucggcaacaccgccguggccaagugcaacgagaagcacgacgaggaguucugcgacaugcugagacuguucgacuucaacaagcaggccaucaagagacugaagacccccgcccagaugagcauccagcugaucaacaaggccgugaacgcccugaucaacgaccagcugaucaugaagaaccaccugagagacaucaugugcauccccuacugcaacuacagcaaguacugguaccugaaccacaccgugaccggcaagaccagccugcccagaugcuggcuggugagcaacggcagcuaccugaacgagacccacuucagcgacgacaucgagcagcaggccgacaacaugaucaccgagcugcugcagaaggaguacaucgacagacagggcaagaccccccugggccugguggaccuguucguguucagcaccagcuucuaccugaucagcaucuuccugcaccuggugaagauccccacccacagacacguggugggcaagcccugccccaagccccacagacugaaccacaugggcaucugcagcugcggccuguacaagcaccccggcgugcccgugaaguggaagagaugaggacuaguaauaaggaaacuguaugaaugucugugggcaggaagugaagagauccuucuguaaagguuuuuggaauuaugucugcugaauaauaaacuuuuuugaaauaauaaaucugguagaaaaaugagaucucaaaggcucuuuucagagccaccaaaaaaaaaaaaaaaaaaaaaaaaaaaaaaaaaaaaaaaaaaaaaaaaaaaaaaaaaaaaaaaaaaaaaaaaaaaaaaaaaaaaaaaaaaaaaaaaaaaaa

SEQ ID NO: 29174 - RNA, 1809 nt, Artificial Sequence
  mRNA product Design b-4 (hSL-A100) comprising derived and/or modified sequence from LASV(LASV221-NIG-2010;Clade II)__AIT17624__GPCmut5 (opt4)
aggagagucccgcagucggcguccagcggcucugcuuguucgugugugugucguugcaggccuuauucaagcuuaccaugggccagaucaucaccuucuuccaggaggugccccacgugaucgaggaggugaugaacaucgugcugaucgcccugagccugcuggccauccugaagggcaucuacaacguggccaccugcggccuguucggccuggugagcuuccugcugcugugcggcagaagcugcagcaccaccuacaagggcguguacgagcugcagacccuggagcuggacauggccagccugaacaugaccaugccccugagcugcaccaagaacaacagccaccacuacaucauggugggcaacgagaccggccuggagcugacccugaccaacaccagcaucaucaaccacaaguucugcaaccugagcgacgcccacaagaagaaccuguacgaccacgcccugaugagcaucaucagcaccuuccaccugagcauccccaacuucaaccaguacgaggccaugagcugcgacuucaacggcggcaagaucagcgugcaguacaaccugagccacaccuacgccaucgacgccgccaaccacugcggcaccaucgccaacggcgugcugcagaccuucaugagaauggccuggggcggcagcuacaucgcccuggacagcggcugcggcagcugggacugcaucaugaccagcuaccaguaccugaucauccagaacaccaccugggaggaccacugccaguucagcagacccagccccaucggcuaccugggccugcugagccagagaaccagagacaucuacaucagcagaagacugcugggcaccuucaccuggacccugagcgacagcgagggcaacgagacccccggcggcuacugccugaccagauggaugcugaucgaggccgagcugaagugcuucggcaacaccgccguggccaagugcaacgagaagcacgacgaggaguucugcgacaugcugagacuguucgacuucaacaagcaggccaucagaagacugaagacccccgcccagaugagcauccagcugaucaacaaggccgugaacgcccugaucaacgaccagcugaucaugaagaaccaccugagagacaucaugugcauccccuacugcaacuacagcaaguacugguaccugaaccacaccgugaccggcaagaccagccugcccagaugcuggcuggugagcaacggcagcuaccugaacgagacccacuucagcgacgacaucgagcagcaggccgacaacaugaucaccgagaugcugcagaaggaguacauggacagacagggcaagaccccccugggccugguggaccuguucguguucagcaccagcuucuaccugaucagcaucuuccugcaccuggugaagauccccacccacagacacgugaucggcaagcccugccccaagccccacagacugaaccacaugggcaucugcagcugcggccuguacaagcaccccggcgugcccgugaaguggaagagaugaggacuaguaauaaggaaacuguaugaaugucugugggcaggaagugaagagauccuucuguaaagguuuuuggaauuaugucugcugaauaauaaacuuuuuugaaauaauaaaucugguagaaaaaugagaucucaaaggcucuuuucagagccaccaaaaaaaaaaaaaaaaaaaaaaaaaaaaaaaaaaaaaaaaaaaaaaaaaaaaaaaaaaaaaaaaaaaaaaaaaaaaaaaaaaaaaaaaaaaaaaaaaaaaa

SEQ ID NO: 29175 - RNA, 1809 nt, Artificial Sequence
  mRNA product Design b-4 (hSL-A100) comprising derived and/or modified sequence from LASV(LASV237-NIG-2010;Clade II)__AIT17638__GPCmut5 (opt4)
aggagagucccgcagucggcguccagcggcucugcuuguucgugugugugucguugcaggccuuauucaagcuuaccaugggccagaucaucaccuucuuccaggaggugccccacgugaucgaggaggugaugaacaucgugcugaucgcccugagccugcuggccauccugaagggcaucuacaacguggccaccugcggccuguucggccuggugagcuuccugcugcugugcggcagaagcugcagcaccaccuacaagggcguguacgagcugcagacccuggagcuggacauggccagccugaacaugaccaugccccugagcugcaccaagaacaacagccaccacuacaucauggugggcaacgagaccggccuggagcugacccugaccaacaccagcaucaucaaccacaaguucugcaaccugagcgacgcccacaagaaggaccuguacgaccacgcccugaugagcaucaucagcaccuuccaccugagcauccccaacuucaaccaguacgaggccaugagcugcgacuucaacggcggcaagaucagcgugcaguacaaccugagccacaccuacgccguggacgccgccaaccacugcggcaccaucgccaacggcgugcugcagaccuucaugagaauggccuggggcggcagcuacaucgcccuggacagcggcugcggcagcugggacugcaucaugaccagcuaccaguaccugaucauccagaacaccaccugggaggaccacugccaguucagcagacccagccccaucggcuaccugggccugcugagccagagaaccagagacaucuacaucagcagaagacugcugggcaccuucaccuggacccugagcgacagcgagggcaacgagacccccggcggcuacugccugaccagauggaugcugaucgaggccgagcugaagugcuucggcaacaccgccguggccaagugcaacgagaagcacgacgaggaguucugcgacaugcugagacuguucgacuucaacaagcaggccaucagaagacugaagacccccgcccagaugagcauccagcugaucaacaaggccgugaacgcccugaucaacgaccagcugaucaugaagaaccaccugagagacaucaugugcauccccuacugcaacuacagcaaguacugguaccugaaccacaccgugaccggcaagaccagccugcccagaugcuggcuggugagcaacggcagcuaccugaacgagacccacuucagcgacgacaucgagcagcaggccgacaacaugaucaccgagcugcugcagaaggaguacauggacagacagggcaagaccccccugggccugguggaccuguucguguucagcaccagcuucuaccugaucagcaucuuccugcaccugaucaagauccccacccacagacacaucaccggcaagcccugccccaagccccacagacugaaccacaugggcaucugcagcugcggccuguacaagcaccccggcgugcccgugaaguggaagagaugaggacuaguaauaaggaaacuguaugaaugucugugggcaggaagugaagagauccuucuguaaagguuuuuggaauuaugucugcugaauaauaaacuuuuuugaaauaauaaaucugguagaaaaaugagaucucaaaggcucuuuucagagccaccaaaaaaaaaaaaaaaaaaaaaaaaaaaaaaaaaaaaaaaaaaaaaaaaaaaaaaaaaaaaaaaaaaaaaaaaaaaaaaaaaaaaaaaaaaaaaaaaaaaaa

SEQ ID NO: 29176 - RNA, 1809 nt, Artificial Sequence
  mRNA product Design b-4 (hSL-A100) comprising derived and/or modified sequence from LASV(LASV253-NIG-2011;Clade II)__AIT17670__GPCmut5 (opt4)
aggagagucccgcagucggcguccagcggcucugcuuguucgugugugugucguugcaggccuuauucaagcuuaccaugggccagaucaucaccuucuuccaggaggugccccacgugaucgaggaggugaugaacaucgugcugaucgcccugagccugcuggccauccugaagggcaucuacaacguggccaccugcggccuguucggccuggugagcuuccugcugcugugcggcagaagcugcagcaccaccuacaagggcguguacgagcugcagacccuggagcuggacauggccagccugaacaugaccaugccccugagcugcaccaagaacaacagccaccacuacaucauggugggcaacgagaccggccuggagcugacccugaccaacaccagcaucaucaaccacaaguucugcaaccugagcgacgcccacaagaagaaccuguacgaccacgcccugaugagcaucaucagcaccuuccaccugagcauccccaacuucaaccaguacgaggccaugagcugcgacuucaacggcggcaagaucagcgugcaguacaaccugagccacaccuacgccguggacgccgccaaccacugcggcaccaucgccaacggcgugcugcagaccuucaugagaauggccuggggcggcagcuacaucgcccuggacagcggcugcggcagcugggacugcaucaugaccagcuaccaguaccugaucauccagaacaccaccugggaggaccacugccaguucagcagacccagccccaucggcuaccugggccugcugagccagagaaccagagacaucuacaucagcagaagacugcugggcaccuucaccuggacccugagcgacagcgagggcaacgagacccccggcggcuacugccugaccagauggaugcugaucgaggccgagcugaagugcuucggcaacaccgccguggccaagugcaacgagaagcacgacgaggaguucugcgacaugcugagacuguucgacuucaacaagcaggccaucagaagacugaaggcccccgcccagaugagcauccagcugaucaacaaggccgugaacgcccugaucaacgaccagcugaucaugaagaaccaccugagagacaucaugugcauccccuacugcaacuacagcaaguacugguaccugaaccacaccgugaccggcagaaccagccugcccagaugcuggcuggugagcaacggcagcuaccugaacgagacccacuucagcgacgacaucgagcagcaggccgacaacaugaucaccgagcugcugcagaaggaguacaucgacagacagggcaagaccccccugggccugguggaccuguucguguucagcaccagcuucuaccugaucagcaucuuccugcaccuggugaagauccccacccacagacacaucaucggcaagcccugccccaagccccacagacugaaccacaugggcaucugcagcugcggccuguacaagcaccccggcgugcccgugaaguggaagagaugaggacuaguaauaaggaaacuguaugaaugucugugggcaggaagugaagagauccuucuguaaagguuuuuggaauuaugucugcugaauaauaaacuuuuuugaaauaauaaaucugguagaaaaaugagaucucaaaggcucuuuucagagccaccaaaaaaaaaaaaaaaaaaaaaaaaaaaaaaaaaaaaaaaaaaaaaaaaaaaaaaaaaaaaaaaaaaaaaaaaaaaaaaaaaaaaaaaaaaaaaaaaaaaaa

SEQ ID NO: 29177 - RNA, 1809 nt, Artificial Sequence
  mRNA product Design b-4 (hSL-A100) comprising derived and/or modified sequence from LASV(LASV254-NIG-2011;Clade II)__AIT17674__GPCmut5 (opt4)
aggagagucccgcagucggcguccagcggcucugcuuguucgugugugugucguugcaggccuuauucaagcuuaccaugggccagaucaucaccuucuuccaggaggugccccacgugaucgaggaggugaugaacaucgugcugaucgcccugagccugcuggccauccugaagggcaucuacaacguggccaccugcggccuguucggccuggugagcuuccugcugcugugcggcagaagcugcagcaccaccuacaagggcguguacgagcugcagacccuggagcuggacaugaccaaccugaacaugaccaugccccugagcugcaccaagaacaacagccaccacuacaucauggugggcaacgagaccggccuggagcugacccugaccaacaccagcaucaucaaccacaaguucugcaaccugagcgacgcccacaagaagaaccuguacaaccacgcccugaugagcaucaucagcaccuuccaccugagcauccccaacuucaaccaguacgaggccaugagcugcgacuucaacggcggcaagaucagcgugcaguacaaccugagccacagcuacgccguggacgccgccaaccacugcggcaccaucgccaacggcgugcugcagaccuucaugagaauggccuggggcggcagcuacaucgcccuggacagcggcugcggcaacugggacugcaucaugaccagcuaccaguaccugaucauccagaacaccaccugggaggaccacugccaguucagcagacccagccccaucggcuaccugggccugcugagccagagaaccagagacaucuacaucagcagaagacugcugggcaccuucaccuggacccugagcgacagcgagggcaacgagacccccggcggcuacugccugaccagauggaugcugaucgaggccgagcugaagugcuucggcaacaccgccguggccaagugcaacgagaagcacgacgaggaguucugcgacaugcugagacuguucgacuucaacaagcaggccaucagaagacugaagacccccgcccaggccaacauccagcugaucaacaaggccgugaacgcccugaucaacgaccagcugaucaugaagaaccaccugagagacaucaugugcauccccuacugcaacuacagcaaguacugguaccugaaccacaccgugaccggcaagaccagccugcccagaugcuggcuggugagcaacggcagcuaccugaacgagacccacuucagcgacgacaucgagcagcaggccgacaacaugaucaccgagcugcugcagaaggaguacauggacagacagggcaagaccccccugggccugguggaccuguucguguucagcaccagcuucuaccugaucagcaucuuccugcaccuggugaagauccccacccacagacacgugaucggcaagcccugccccaagccccacagacugaaccacaugggcaucugcagcugcggccuguacaagcaccccggcgugcccgugaaguggaagagaugaggacuaguaauaaggaaacuguaugaaugucugugggcaggaagugaagagauccuucuguaaagguuuuuggaauuaugucugcugaauaauaaacuuuuuugaaauaauaaaucugguagaaaaaugagaucucaaaggcucuuuucagagccaccaaaaaaaaaaaaaaaaaaaaaaaaaaaaaaaaaaaaaaaaaaaaaaaaaaaaaaaaaaaaaaaaaaaaaaaaaaaaaaaaaaaaaaaaaaaaaaaaaaaaa

SEQ ID NO: 29178 - RNA, 1809 nt, Artificial Sequence
  mRNA product Design b-4 (hSL-A100) comprising derived and/or modified sequence from LASV(Nig08-A19;Clade III)__ADU56618__GPCmut5 (opt4)
aggagagucccgcagucggcguccagcggcucugcuuguucgugugugugucguugcaggccuuauucaagcuuaccaugggccagaucgugaccuucuuccaggaggugccccacgugaucgaggaggugaugaacaucgugcugaucgcccugagcauccuggccauccugaagggccuguacaacaucgccaccugcggccugaucggccuggugaccuuccugcugcugagcggcagaagcugcagcaugaccuacaagggcguguacgagcugcagacccuggagcugaacaugaacacccugaacaugaccaugccccugagcugcaccaagaacaacagccaccacuacaucauggugggcaacgagaccggccuggagcugacccugaccaacaccagccugcugcaccacaaguucugcaaccugagcgacgcccacaagaagaaccuguacgaccacacccugaugagcaucaucagcaccuuccaccugagcauccccaacuucaaccaguacgaggccaugagcugcgacuucaacggcggcaagaucaccgugcaguacaaccugagccacagcuacgccaucgacgccgccaaccacugcggcaccguggccaacggcgugcugcagaccuucaugagaauggccuggggcggcagcuacaucgcccuggacagcggcugcggcaagugggacugcaucaugaccagcuaccaguaccugaucauccagaacaccaccugggaggaccacugccaguucagcagacccagccccaucggcuaccugggccugcugagccagagaaccagagacaucuacaucagcagaagacugcugggcaccuucaccuggacccugagcgacagcgagggcaacgagacccccggcggcuacugccugaccagauggaugcugaucgaggccgagcugaagugcuucggcaacaccgccguggccaagugcaacgagaagcacgacgaggaguucugcgacaugcugagacuguucgacuucaacaagcaggccaucagaagacugaaggcccccgcccagaugagcauccagcugaucaacaaggccgugaacgcccugaucaacgaccagcugaucaugaagaaccaccugagagacaucaugugcauccccuacugcaacuacagcaaguacugguaccugaaccacaccagcaccggcagaaccagccugcccagaugcuggcuggugagcaacggcagcuaccugaacgagacccacuucagcgacgacaucgagcagcaggccgacaacaugaucaccgagaugcugcagaaggaguaccuggacagacagggcaagaccccccugggccugguggaccuguucguguucagcaccagcuucuaccugaucagcaucuuccugcaccuggugaagauccccacccacagacacaucgugggcaagcccugccccaagccccacagacugaaccacaugggcaucugcagcugcggccuguacaagcagcccggcgugcccgugagauggaagagaugaggacuaguaauaaggaaacuguaugaaugucugugggcaggaagugaagagauccuucuguaaagguuuuuggaauuaugucugcugaauaauaaacuuuuuugaaauaauaaaucugguagaaaaaugagaucucaaaggcucuuuucagagccaccaaaaaaaaaaaaaaaaaaaaaaaaaaaaaaaaaaaaaaaaaaaaaaaaaaaaaaaaaaaaaaaaaaaaaaaaaaaaaaaaaaaaaaaaaaaaaaaaaaaaa

SEQ ID NO: 29179 - RNA, 1812 nt, Artificial Sequence
  mRNA product Design b-4 (hSL-A100) comprising derived and/or modified sequence from LASV(G1180-SLE-2010;Clade IV)__AIT17168__GPCmut5 (opt4)
aggagagucccgcagucggcguccagcggcucugcuuguucgugugugugucguugcaggccuuauucaagcuuaccaugggccagaucgugaccuucuuccaggaggugccccacgugaucgaggaggugaugaacaucgugcugaucgcccugagcauccuggccgugcugaagggccuguacaacuucgccaccugcggccuggugggccugcugaccuuccugcugcugugcggcagaagcugcaccgccagcagauacaagggcguguacgagcugcagacccuggagcugaacauggagacccugaacaugaccaugccccugagcugcaccaagaacaacagccaccacuacaucauggugggcaacgagaccggccuggagcugacccugaccaacaccagcaucaucaaccacaaguucugcaaccugagcgacgcccacaagaagaaccuguacgaccacgcccugaugagcaucaucagcaccuuccaccugagcauccccaacuucaaccaguacgaggccaugagcugcgacuucaacggcggcaagaucagcgugcaguacaaccugagccacagcuacgccggcgacgccgccaaccacugcggcaccguggccaacggcgugcugcagaccuucaugagaauggccuggggcggcagcuacaucgcccuggacagcggcugcggcagcugggacugcaucaugaccagcuaccaguaccugaucauccagaacaccaccugggaggaccacugccaguucagcagacccagccccaucggcuaccugggccugcugagccagagaaccagagacaucuacaucagcagaagacugcugggcaccuucaccuggacccugagcgacagcgagggcaaggacacccccggcggcuacugccugaccagauggaugcugaucgaggccgagcugaagugcuucggcaacaccgccguggccaagugcaacgagaagcacgacgaggaguucugcgacaugcugagacuguucgacuucaacaagcaggccauccagagacugaaggcccccgcccagaugagcauccagcugaucaacaaggccgugaacgcccugaucaacgaccagcugaucaugaagaaccaccugagagacaucaugugcauccccuacugcaacuacagcaaguacugguaccugaaccacaccaccaccggcaagaccagccugcccaagugcuggcuggugagcaacggcagcuaccugaacgagacccacuucagcgacgacaucgagcagcaggccgacaacaugaucaccgagaugcugcagaaggaguacauggagagacagggcaagaccccccugggccugguggaccuguucguguucagcaccagcuucuaccugaucagcaucuuccugcaccuggugaagauccccacccacagacacaucgugggcaagagcugccccaagccccacagacugaaccacaugggcaucugcagcugcggccuguacaagcagcccggcgugcccgugaaguggaagagaugaggacuaguaauaaggaaacuguaugaaugucugugggcaggaagugaagagauccuucuguaaagguuuuuggaauuaugucugcugaauaauaaacuuuuuugaaauaauaaaucugguagaaaaaugagaucucaaaggcucuuuucagagccaccaaaaaaaaaaaaaaaaaaaaaaaaaaaaaaaaaaaaaaaaaaaaaaaaaaaaaaaaaaaaaaaaaaaaaaaaaaaaaaaaaaaaaaaaaaaaaaaaaaaaa

SEQ ID NO: 29180 - RNA, 1812 nt, Artificial Sequence
  mRNA product Design b-4 (hSL-A100) comprising derived and/or modified sequence from LASV(G1442-SLE-2011;Clade IV)__AIT17180__GPCmut5 (opt4)
aggagagucccgcagucggcguccagcggcucugcuuguucgugugugugucguugcaggccuuauucaagcuuaccaugggccagaucgugaccuucuuccaggaggugccccacgugaucgaggaggugaugaacaucgugcugaucgcccugagcauccuggccgugcugaagggccuguacaacguggccaccugcggccugaucggccuggugaccuuccugcugcugugcggcagaagcugcaccaccacccuguacaagggcguguacgagcugcagacccuggagcugaacauggagacccugaacaugaccaugccccugagcugcaccaagaacaacagccaccacuacaucagagugggcaacgagaccggccuggagcugacccugaccaacaccagcaucaucaaccacaaguucugcaaccugagcgacgcccacaagaagaaccuguacgaccacgcccugaugagcaucaucagcaccuuccaccugagcauccccaacuucaaccaguacgaggccaugagcugcgacuucaacggcggcaagaucagcgugcaguacaaccugagccacagcuacgccggcgacgccgccaaccacugcggcaccguggccaacggcgugcugcagaccuucaugagaauggccuggggcggcagcuacaucgcccuggacagcggcugcggcaacugggacugcaucaugaccagcuaccaguaccugaucauccagaacaccaccugggacgaccacugccaguucagcagacccagccccaucggcuaccugggccugcugagccagagaaccagagacguguacaucagcagaagacugcugggcaccuucaccuggacccugagcgacagcgagggcaaggacacccccggcggcuacugccugaccagauggaugcugaucgaggccgagcugaagugcuucggcaacaccgccguggccaagugcaacgagaagcacgacgaggaguucugcgacaugcugagacuguucgacuucaacaagcaggccauccagagacugaaggcccccgcccagaugagcauccagcugaucaacaaggccgugaacgcccugaucaacgaccagcugaucaugaagaaccaccugagagacaucaugugcauccccuacugcaacuacagcaaguacugguaccugaacaacaccgccaccggcaagaccagccugcccaagugcuggcugaucagcaacggcagcuaccugaacgagacccacuucagcgacgacaucgagcaggaggccgacaacaugaucaccgagaugcugcagaaggaguacauggagagacagggcaagaccccccugggccugguggaccuguucguguucagcaccagcuucuaccugaucagcaucuuccugcaccuggugaagauccccacccacagacacaucgugggcaagagcugccccaagccccacagacugaaccacaugggcaucugcagcugcggccuguacaagcagcccggcgugcccgugagauggaagagaugaggacuaguaauaaggaaacuguaugaaugucugugggcaggaagugaagagauccuucuguaaagguuuuuggaauuaugucugcugaauaauaaacuuuuuugaaauaauaaaucugguagaaaaaugagaucucaaaggcucuuuucagagccaccaaaaaaaaaaaaaaaaaaaaaaaaaaaaaaaaaaaaaaaaaaaaaaaaaaaaaaaaaaaaaaaaaaaaaaaaaaaaaaaaaaaaaaaaaaaaaaaaaaaaa

SEQ ID NO: 29181 - RNA, 1812 nt, Artificial Sequence
  mRNA product Design b-4 (hSL-A100) comprising derived and/or modified sequence from LASV(G3010-SLE-2013;Clade IV)__AIT17344__GPCmut5 (opt4)
aggagagucccgcagucggcguccagcggcucugcuuguucgugugugugucguugcaggccuuauucaagcuuaccaugggccagaucgugaccuucuuccaggaggugccccacgugaucgaggaggugaugaacaucgugcugaucgcccugagcauccuggccgugcugaagggccuguacaacuucgccaccugcggccuggugggccuggugaccuuccugcugcugugcggcagaagcugcaccaccagccuguacaagggcguguacgagcugcagacccuggagcugaacauggagacccugaacaugaccaugccccugagcugcaccaagaacaacagccaccacuacaucauggugggcaacgagaccggccuggagcugacccugaccaacaccagcaucaucaaccacaaguucugcaaccugagcgacgcccacaagaagaaccuguacaaccacgcccugaugagcaucaucagcaccuuccaccugagcauccccaacuucaaccaguacgaggccaugagcugcgacuucaacggcggcaagaucagcgugcaguacaaccugagccacagcuacgccggcgacgccgccagccacugcggcaccguggccaacggcgugcugcagaccuucaugagaauggccuggggcggcagcuacaucgcccuggacagcggcugcggcaagugggacugcaucaugaccagcuaccaguaccugaucauccagaacaccaccugggaggaccacugccaguucagcagacccagccccaucggcuaccugggccugcugagccagagaaccagagacaucuacaucagcagaagacugcugggcaccuucaccuggacccugagcgacagcgagggcaaggacacccccggcggcuacugccugaccagauggaugcugaucgaggccgagcugaagugcuucggcaacaccgccguggccaagugcaacgagaagcacgacgaggaguucugcgacaugcugagacuguucgacuucaacaagcaggccauccagagacugaagacccccgcccagaugagcauccagcugaucaacaaggccgugaacgcccugaucaacgaccagcugaucaugaagaaccaccugagagacaucaugugcauccccuacugcaacuacagcaaguacugguaccugaaccacaccaccaccggcaagaccagccugcccaagugcuggcuggugagcaacggcagcuaccugaacgagacccacuucagcgacgacaucgagcagcaggccgacaacaugaucaccgagaugcugcagaaggaguacauggagagacagggcaagaccccccugggccugguggaccuguucguguucagcaccagcuucuaccugaucagcaucuuccugcaccuggugaagauccccacccacagacacaucgugggcaagagcugccccaagccccacagacugaaccacaugggcaucugcagcugcggccuguacaagcagcccggcgugcccgugagauggaagagaugaggacuaguaauaaggaaacuguaugaaugucugugggcaggaagugaagagauccuucuguaaagguuuuuggaauuaugucugcugaauaauaaacuuuuuugaaauaauaaaucugguagaaaaaugagaucucaaaggcucuuuucagagccaccaaaaaaaaaaaaaaaaaaaaaaaaaaaaaaaaaaaaaaaaaaaaaaaaaaaaaaaaaaaaaaaaaaaaaaaaaaaaaaaaaaaaaaaaaaaaaaaaaaaaa

SEQ ID NO: 29182 - RNA, 1812 nt, Artificial Sequence
  mRNA product Design b-4 (hSL-A100) comprising derived and/or modified sequence from LASV(G502-SLE-2009;Clade IV)__AIT17126__GPCmut5 (opt4)
aggagagucccgcagucggcguccagcggcucugcuuguucgugugugugucguugcaggccuuauucaagcuuaccaugggccagaucgugaccuucuuccaggaggugccccacgugaucgaggaggugaugaacaucgugcugaucgcccugagcauccuggccgugcugaagggccuguacaacuucgccaccugcggccuggugggccugcugaccuuccugcugcugugcggcagaagcugcaccaccggccuguacaagggcguguacgagcugcagacccuggagcugaacauggagacccugaacaugaccaugccccugagcugcaccaagaacaacagccaccacuacaucauggugggcaacgagaccggccuggagcugacccugaccaacaccagcaucaucaaccacaaguucugcaaccugagcgacgcccacaagaagaaccuguacgaccacgcccugaugagcaucaucagcaccuuccaccugagcauccccaacuucaaccaguacgaggccaugagcugcgacuucaacggcggcaagaucagcgugcaguacaaccugagccacagcuacgccggcgacgccgccgaccacugcggcaccguggccaacggcgugcugcagaccuucaugagaauggccuggggcggcagcuacaucgcccuggacagcggcugcggcagaugggacugcaucaugaccagcuaccaguaccugaucauccagaacaccaccugggaggaccacugccaguucagcagacccagccccaucggcuaccugggccugcugagccagagaaccagagacaucuacaucagcagaagacugcugggcaccuucaccuggacccugagcgacagcgagggcaaggacacccccggcggcuacugccugaccagauggaugcugaucgaggccgagcugaagugcuucggcaacaccgccguggccaagugcaacgagaagcacgacgaggaguucugcgacaugcugagacuguucgacuucaacaagcaggccauccagagacugaaggcccccgcccagaugagcauccagcugaucaacaaggccgugaacgcccugaucaacgaccagcuggugaugaagaaccaccugagagacaucaugugcauccccuacugcaacuacagcagauacugguaccugaaccacaccaccaccggcagaaccagccugcccaagugcuggcuggugagcaacggcagcuaccugaacgagacccacuucagcgacgacaucgagcagcaggccgacaacaugaucaccgagaugcugcagaaggaguacauggagagacagggcaagaccccccugggccugguggaccuguucguguucagcaccagcuucuaccugaucagcaucuuccugcaccuggugaagauccccacccacagacacaucgugggcaagagcugccccaagccccacagacugaaccacaugggcaucugcagcugcggccuguacaagcagcccggcgugcccgugaaguggaagagaugaggacuaguaauaaggaaacuguaugaaugucugugggcaggaagugaagagauccuucuguaaagguuuuuggaauuaugucugcugaauaauaaacuuuuuugaaauaauaaaucugguagaaaaaugagaucucaaaggcucuuuucagagccaccaaaaaaaaaaaaaaaaaaaaaaaaaaaaaaaaaaaaaaaaaaaaaaaaaaaaaaaaaaaaaaaaaaaaaaaaaaaaaaaaaaaaaaaaaaaaaaaaaaaaa

SEQ ID NO: 29183 - RNA, 1812 nt, Artificial Sequence
  mRNA product Design b-4 (hSL-A100) comprising derived and/or modified sequence from LASV(G733-SLE-2010;Clade IV)__AIT17154__GPCmut5 (opt4)
aggagagucccgcagucggcguccagcggcucugcuuguucgugugugugucguugcaggccuuauucaagcuuaccaugggccagaucgugaccuucuuccaggaggugccccacgugaucgaggaggugaugaacaucgugcugaucgcccugagcauccuggccgugcugaagggccuguacaacuucgccaccugcggcaucgugggccuggugagcuuccugcugcugugcggcagaagcugcaccaccagccuguacaagggcguguacgagcugcagacccuggagcugaacauggagacccugaacaugaccaugccccugagcugcaccaagaacaacagccaccacuacaucauggugggcaacgagaccggccuggagcugacccugaccaacaccagcaucaucaaccacaaguucugcaaccugagcgacgcccacaagaagaaccuguacgaccacgcccugaugagcaucaucagcaccuuccaccugagcauccccaacuucaaccaguacgaggccaugagcugcgacuucaacggcggcaagaucagcgugcaguacaaccugagccacagcuacgccggcgacgccgccaaccacugcggcaccaucgccaacggcgugcugcagaccuucaugagaauggccuggggcggcagcuacaucgcccuggacagcggcugcgacagaugggacugcaucaugaccagcuaccaguaccugaucauccagaacaccaccugggaggaccacugccaguucagcagacccagccccaucggcuaccugggccugcugagccagagaaccagagacaucuacaucagcagaagacugcugggcaccuucaccuggacccugagcgacagcgagggcaaggacacccccggcggcuacugccugaccagauggaugcugaucgaggccgagcugaagugcuucggcaacaccgccguggccaagugcaacgagaagcacgacgaggaguucugcgacaugcugagacuguucgacuucaacaagcaggccauccagagacugaaggcccccgcccagaugagcauccagcugaucaacaaggccgugaacgcccugaucaacgaccagcugaucaugaagaaccaccugagagacaucaugugcauccccuacugcaacuacagcaaguacugguaccugaaccacaccaccaccggcaagaccagccugcccaagugcuggcuggugagcaacggcagcuaccugaacgagacccacuucagcgacgacaucgagcagcaggccgacaacaugaucaccgagaugcugcagaaggaguacauggagagacagggcaagaccccccugggccugguggaccuguucguguucagcaccagcuucuaccugaucagcaucuuccugcaccuggugaagauccccacccacagacacguggugggcaagagcugccccaagccccacagacugaaccacaugggcaucugcagcugcggccuguacggccagcccggcgugcccgugaaguggaagagaugaggacuaguaauaaggaaacuguaugaaugucugugggcaggaagugaagagauccuucuguaaagguuuuuggaauuaugucugcugaauaauaaacuuuuuugaaauaauaaaucugguagaaaaaugagaucucaaaggcucuuuucagagccaccaaaaaaaaaaaaaaaaaaaaaaaaaaaaaaaaaaaaaaaaaaaaaaaaaaaaaaaaaaaaaaaaaaaaaaaaaaaaaaaaaaaaaaaaaaaaaaaaaaaaa

SEQ ID NO: 29184 - RNA, 1812 nt, Artificial Sequence
  mRNA product Design b-4 (hSL-A100) comprising derived and/or modified sequence from MOPV/LASV reassortant(IGS-1;Clade IV)__AFY05576__GPCmut5 (opt4)
aggagagucccgcagucggcguccagcggcucugcuuguucgugugugugucguugcaggccuuauucaagcuuaccaugggccagaucgugaccuucuuccaggaggugccccacgugaucgaggaggugaugaacaucgugcugaucgcccugagcgugcuggccgugcugaagggccuguacaacuucgccaccugcggccuggugggccuggugaccuuccugcugcugugcggcagaagcugcaccaccagccuguacaagggcguguacgagcugcagacccuggagcugaacauggagacccugaacaugaccaugccccugagcugcaccaagaacaacagccaccacuacaucauggugggcaacgagaccggccuggagcugacccugaccaacaccagcaucaucaaccacaaguucugcaaccugagcgacgcccacaagaagaaccuguacgaccacgcccugaugagcaucaucagcaccuuccaccugagcauccccaacuucaaccaguacgaggccaugagcugcgacuucaacggcggcaagaucagcgugcaguacaaccugagccacagcuacgccggcgacgccgccaaccacugcggcaccguggccaacggcgugcugcagaccuucaugagaauggccuggggcggcagcuacaucgcccuggacagcggcugcggcaacugggacugcaucaugaccagcuaccaguaccugaucauccagaacaccaccugggaggaccacugccaguucagcagacccagccccaucggcuaccugggccugcugagccagagaaccagagacaucuacaucagcagaagacugcugggcaccuucaccuggacccugagcgacagcgagggcgaggacacccccggcggcuacugccugaccagauggaugcugaucgaggccgagcugaagugcuucggcaacaccgccguggccaagugcaacgagaagcacgacgaggaguucugcgacaugcugagacuguucgacuucaacaagcaggccauccagagacugaaggcccccgcccagaugagcauccagcugaucaacaaggccgugaacgcccugaucaacgaccagcugaucaugaagaaccaccugagagacaucaugugcauccccuacugcaacuacagcaaguacugguaccugaaccacaccaccaccggcagaaccagccugcccaagugcuggcuggugagcaacggcagcuaccugaacgagacccacuucagcgacgacaucgagcagcaggccgacaacaugaucaccgagaugcugcagaaggaguacauggagagacagggcaagaccccccugggccugguggaccuguucguguucagcaccagcuucuaccugaucagcaucuuccugcaccuggugaagauccccacccacagacacaucgugggcaagagcugccccaagccccacagacugaaccacaugggcaucugcagcugcggccuguacaagcagcccggcgugcccgugaaguggaagagaugaggacuaguaauaaggaaacuguaugaaugucugugggcaggaagugaagagauccuucuguaaagguuuuuggaauuaugucugcugaauaauaaacuuuuuugaaauaauaaaucugguagaaaaaugagaucucaaaggcucuuuucagagccaccaaaaaaaaaaaaaaaaaaaaaaaaaaaaaaaaaaaaaaaaaaaaaaaaaaaaaaaaaaaaaaaaaaaaaaaaaaaaaaaaaaaaaaaaaaaaaaaaaaaaa

SEQ ID NO: 29185 - RNA, 1812 nt, Artificial Sequence
  mRNA product Design b-4 (hSL-A100) comprising derived and/or modified sequence from LASV(LM765-SLE-2012;Clade IV)__AIT17814__GPCmut5 (opt4)
aggagagucccgcagucggcguccagcggcucugcuuguucgugugugugucguugcaggccuuauucaagcuuaccaugggccagaucgugaccuucuuccaggaggugccccacgugaucgaggaggugaugaacaucgugcugaucgcccugagcauccuggccgugcugaagggccuguacaacuucgccaccugcggccuggugggccuggugaccuuccugcugcugugcggcagaagcugcaccaccagccuguacaagggcguguacgagcugcagacccuggagcugaacauggagacccugaacaugaccaugccccugagcugcaccaagaacaacagccaccacuacaucauggugggcaacgagaccggccuggagcugacccugaccaacaccagcaucaucgaccacaaguucugcaaccugagcgacgcccacagaaagaaccuguacgaccacgcccugaugagcaucaucagcaccuuccaccugagcauccccaacuucaaccaguacgaggccaugagcugcgacuucaacggcggcaagaucagcgugcaguacaaccugagccacagcuacgccaaggacgccgccgaccacugcggcaccguggccaacggcgugcugcagaccuucaugagaauggccuggggcggcagcuacaucgcccuggacagcggcugcggcagaugggacugcaucaugaccagcuaccaguaccugaucauccagaacaccaccugggaggaccacugccaguucagcagacccagccccaucggcuaccugggccugcugagccagagaaccagagacaucuacaucagcagaagacugcugggcaccuucaccuggacccugagcgacagcgagggcaaggacacccccggcggcuacugccugaccagauggaugcugaucgaggccgagcugaagugcuucggcaacaccgccguggccaagugcaacgagaagcacgacgaggaguucugcgacaugcugagacuguucgacuucaacaagcaggccauccagagacugaaggcccccgcccagaugagcauccagcugaucaacaaggccgugaacgcccugaucaacgaccagcugaucaugaagaaccaccugagagacaucaugugcauccccuacugcaacuacagcaaguacugguaccugaaccacaccaccaccggcaagaccagccugcccaagugcuggcuggugagcaacggcagcuaccugaacgagacccacuucagcgacgacaucgagcagcaggccgacaacaugaucaccgagaugcugcagaaggaguacauggagagacagggcaagaccccccugggccugguggaccuguucguguucagcaccagcuucuaccugaucagcaucuuccugcaccuggugaagauccccacccacagacacaucgugggcaagcccugccccaagccccacagacugaaccacaugggcaucugcagcugcggccuguacaagcagcccggcgugcccgugaaguggaagagaugaggacuaguaauaaggaaacuguaugaaugucugugggcaggaagugaagagauccuucuguaaagguuuuuggaauuaugucugcugaauaauaaacuuuuuugaaauaauaaaucugguagaaaaaugagaucucaaaggcucuuuucagagccaccaaaaaaaaaaaaaaaaaaaaaaaaaaaaaaaaaaaaaaaaaaaaaaaaaaaaaaaaaaaaaaaaaaaaaaaaaaaaaaaaaaaaaaaaaaaaaaaaaaaaa

SEQ ID NO: 29186 - RNA, 1812 nt, Artificial Sequence
  mRNA product Design b-4 (hSL-A100) comprising derived and/or modified sequence from LASV(LM776-SLE-2012;Clade IV)__AIT17824__GPCmut5 (opt4)
aggagagucccgcagucggcguccagcggcucugcuuguucgugugugugucguugcaggccuuauucaagcuuaccaugggccagaucgugaccuucuuccaggaggugccccacgugaucgaggaggugaugaacaucgugcugaucgcccugagcauccuggccgugcugaagggccuguacaacuucgccaccugcggccuggugggccuggugaccuuccugcugcugugcggcagaagcugcaccaccagcguguacaagggcguguacgagcugcagacccuggagcugaacauggagacccugaacaugaccaugccccugagcugcaccaagaacaacagccaccacuacaucauggugggcaacgagaccggccuggagcugacccugaccaacaccagcaucaucaaccacaaguucugcaaccugagcgacgcccacaagaagaaccuguacgaccacgcccugaugagcaucaucagcaccuuccaccugagcauccccaacuucaaccaguacgaggccaugagcugcgacuucaacggcggcaagaucagcgugcaguacaaccugagccacagcuacgccggcgacgccgccaaccacugcggcaccguggccaacggcgugcugcagaccuucaugagaauggccuggggcggcagcuacaucgcccuggacagcggcugcggcaagugggacugcaucaugaccagcuaccaguaccugaucauccagaacaccaccugggaggaccacugccaguucagcagacccagccccaucggcuaccugggccugcugagccagagaaccagagacaucuacaucagcagaagacugcugggcaccuucaccuggacccugagcgacagcgagggcaaggacacccccggcggcuacugccugaccagauggaugcugaucgaggccgagcugaagugcuucggcaacaccgccguggccaagugcaacgagaagcacgacgaggaguucugcgacaugcugagacuguucgacuucaacaagcaggccauccagagacugaaggcccccgcccagaugagcauccagcugaucaacaaggccgugaacgcccugaucaacgaccagcugaucaugaagaaccaccugagagacaucaugugcauccccuacugcaacuacagcaaguacugguaccugaaccacaccaccaccggcaagaccagccugcccaagugcuggcuggugagcaacggcagcuaccugaacgagacccacuucagcgacgacaucgagcagcaggccgacaacaugaucaccgagaugcugcagaaggaguacauggagagacagggcaagaccccccugggccugguggaccuguucguguucagcaccagcuucuaccugaucagcaucuuccugcaccuggugaagauccccacccacagacacaucgugggcaagagcugccccaagccccacagacugaaccacaugggcaucugcagcugcggccuguacaagcagcccggcgugcccgugagauggaagagaugaggacuaguaauaaggaaacuguaugaaugucugugggcaggaagugaagagauccuucuguaaagguuuuuggaauuaugucugcugaauaauaaacuuuuuugaaauaauaaaucugguagaaaaaugagaucucaaaggcucuuuucagagccaccaaaaaaaaaaaaaaaaaaaaaaaaaaaaaaaaaaaaaaaaaaaaaaaaaaaaaaaaaaaaaaaaaaaaaaaaaaaaaaaaaaaaaaaaaaaaaaaaaaaaa

SEQ ID NO: 29187 - RNA, 1812 nt, Artificial Sequence
  mRNA product Design b-4 (hSL-A100) comprising derived and/or modified sequence from LASV(Mad39;Clade IV)__ANH09722__GPCmut5 (opt4)
aggagagucccgcagucggcguccagcggcucugcuuguucgugugugugucguugcaggccuuauucaagcuuaccaugggccagaucgugaccuucuuccaggaggugccccacgugaucgaggaggugaugaacaucgugcugaucgcccugagcauccuggccgugcugaagggccuguacaacguggccaccugcggccugaucggccuggugaccuuccugcugcugugcggcagaagcugcaccaccacccuguacaagggcguguacgagcugcaggcccuggagcugaacauggagacccugaacaugaccaugccccugagcugcaccaagaacaacagccaccacuacaucagagugggcaacgagaccggccuggagcugacccugaccaacaccagccugaucaaccacaaguucugcaaccugagcgacgcccacaagaagaaccuguacgaccacgcccugaugagcaucaucagcaccuuccaccugagcauccccaacuucaaccaguacgaggccaugagcugcgacuucaacgacggcaagaucagcgugcaguacaaccugagccacaccuacgccggcgacaccgccaaccacugcggcaccguggccaacggcgugcugcagaccuucaugagaauggccuggggcggcagcuacaucgcccuggacagcggcugcggcggcugggacugcaucaugaccagcuaccaguaccugaucauccagaacaccaccugggaggaccacugccaguucagcagacccagccccaucggcuaccugggccugcugagccagagaaccagagacaucuacaucagcagaagacugcugggcaccuucaccuggacccugagcgacagcgagggcaaggacacccccggcggcuacugccugaccagauggaugcugaucgaggccgagcugaagugcuucggcaacaccgccguggccaagugcaacgagaagcacgacgaggaguucugcgacaugcugagacuguucgacuucaacaagcaggccauccagagacugaaggcccccgcccagaugagcauccagcugaucaacaaggccgugaacgcccugaucaacgaccagcugaucaugaagaaccaccugagagacaucaugugcauccccuacugcaacuacagcaaguacugguaccugaaccacaccgugaccggcaagaccagccugcccaagugcuggcuggugagcaacggcagcuaccugaacgagacccacuucagcgacgacaucgagcagcaggccgacaacaugaucaccgagaugcugcagaaggaguacauggagagacagggcaagaccccccugggccugguggaccuguucguguucagcaccagcuucuaccugaucagcaucuuccugcaccuggugaagauccccacccacagacacguggugggcaagcccugccccaagccccacagacugaaccacaugggcaucugcagcugcggcuucuacaagcagcccggcgugcccgugagauggaagagaugaggacuaguaauaaggaaacuguaugaaugucugugggcaggaagugaagagauccuucuguaaagguuuuuggaauuaugucugcugaauaauaaacuuuuuugaaauaauaaaucugguagaaaaaugagaucucaaaggcucuuuucagagccaccaaaaaaaaaaaaaaaaaaaaaaaaaaaaaaaaaaaaaaaaaaaaaaaaaaaaaaaaaaaaaaaaaaaaaaaaaaaaaaaaaaaaaaaaaaaaaaaaaaaaa

SEQ ID NO: 29188 - RNA, 1812 nt, Artificial Sequence
  mRNA product Design b-4 (hSL-A100) comprising derived and/or modified sequence from LASV(Z0947-SLE-2011;Clade IV)__AIT17840__GPCmut5 (opt4)
aggagagucccgcagucggcguccagcggcucugcuuguucgugugugugucguugcaggccuuauucaagcuuaccaugggccagaucgugaccuucuuccaggaggugccccacgugaucgaggaggugaugaacaucgugcugaucgcccugagcauccuggccgugcugaagggccuguacaacuucgccaccugcggccuggugggccuggugaccuuccugcugcugugcggcagaagcugcaccaucagccuguacaagggcguguacgagcugcagacccuggagcugaacauggagacccugaacaugaccaugccccugagcugcaccaagaacaacagccaccacuacaucauggugggcaacgagaccggccuggagcugacccugaccaacaccagcaucaucaaccacaaguucugcaaccugagcgacgcccacaagaagaaccuguacgaccacgcccugaugagcaucaucagcaccuuccaccugagcauccccaacuucaaccaguacgaggccaugagcugcgacuucaacggcggcaagaucagcgugcaguacaaccugagccacagcuacgccggcgacgccgccaaccacugcggcaccguggccaacggcgugcugcagaccuucaugagaauggccuggggcggcagcuacaucgcccuggacagcggcugcgacagaugggacugcaucaugaccagcuaccaguaccugaucauccagaacaccaccugggaggaccacugccaguucagcagacccagccccaucggcuaccugggccugcugagccagagaaccagagacaucuacaucagcagaagacugcugggcaccuucaccuggacccugagcgacagcgagggcaaggacacccccggcggcuacugccugaccagauggaugcugaucgaggccgagcugaagugcuucggcaacaccgccguggccaagugcaacgagaagcacgacgaggaguucugcgacaugcugagacuguucgacuucaacaagcaggccauccagagacugaaggcccccgcccagaugagcauccagcugaucaacaaggccgugaacgcccugaucaacgaccagcugaucaugaagaaccaccugagagacaucaugugcauccccuacugcaacuacagcaaguacugguaccugaaccacaccaccaccggcaagaccagccugcccaagugcuggcuggugagcaacggcagcuaccugaacgagacccacuucagcgacgacaucgagcagcaggccgacaacaugaucaccgagaugcugcagaaggaguacauggagagacagggcaagaccccccugggccugguggaccuguucguguucagcaccagcuucuaccugaucagcaucuuccugcaccuggugaagauccccacccacagacacaucgugggcaagcccugccccaagccccacagacugaaccacaugggcaucugcagcugcggccuguacaagcagcccggcgugcccgugaaguggaagagaugaggacuaguaauaaggaaacuguaugaaugucugugggcaggaagugaagagauccuucuguaaagguuuuuggaauuaugucugcugaauaauaaacuuuuuugaaauaauaaaucugguagaaaaaugagaucucaaaggcucuuuucagagccaccaaaaaaaaaaaaaaaaaaaaaaaaaaaaaaaaaaaaaaaaaaaaaaaaaaaaaaaaaaaaaaaaaaaaaaaaaaaaaaaaaaaaaaaaaaaaaaaaaaaaa

SEQ ID NO: 29189 - RNA, 1812 nt, Artificial Sequence
  mRNA product Design b-4 (hSL-A100) comprising derived and/or modified sequence from LASV(Josiah;Clade IV)__NP_694870__GPCmut5 (opt5)
aggagagucccgcagucggcguccagcggcucugcuuguucgugugugugucguugcaggccuuauucaagcuuaccaugggccagaucgugaccuucuuucaagaggucccccacguuauugaagaggugaugaacaucgugcugauugcccucagcguccuggcugugcuuaaggggcuguacaauuucgccacaugcggacucguuggccuggugacguuucuucugcucugugggagauccugcaccacaucucuguauaaaggagucuacgaacugcagacccucgagcugaacauggaaacacuuaauaugaccaugccucugagcuguacaaagaacaauucccaucacuauaucauggugggcaacgagaccgggcucgagcugacgcuuaccaauacaucuauuaucaaccauaaauucugcaaucugagcgacgcgcacaagaaaaaccucuacgaucaugcucugauguccaucauuucuaccuuucaccugagcaucccgaauuucaaccaguaugaagccauguccugugacuuuaauggaggcaagauuagcguucaguacaaccucucucacuccuaugccggcgaugcugccaaucauugcgggacaguggcuaacggaguccugcaaaccuucaugcggauggccuggggcgggagcuacaucgcgcuugacucuggauguggcaacugggauugcauuaugacguccuaccaguaucugaucauucagaauacaaccugggaggaccacugucaguuuagccgccccucuccuaucggguaccucggacugcuuucccaaagaacacgggauaucuauauuagccgcagacugcucggcaccuucaccuggacacuguccgacucugaaggcaaggauacgcccgggggauacugccugacccgguggaugcucaucgaggccgagcugaaauguuuuggcaacacagcuguggccaagugcaaugaaaaacaugacgaggaguucugcgauaugcuucgccuguuugacuucaacaagcaggcuauucagagacucaaagccccugcgcagaugagcauccaacugauuaauaaggccgugaacgcucuuaucaaugaucagcugaucaugaagaaccaccuccgggacauuauguguauccccuauugcaauuacuccaaauauugguaccugaaccacaccacaaccgggcgcacgagccugccuaaguguuggcucgucucuaauggauccuaccugaacgaaacacauuucagcgacgauauugaacagcaagccgacaauaugaucaccgagaugcuucagaaagaguauauggaaagacagggcaagaccccgcuggggcucguugaucuguuuguguucucuaccagcuuuuaccugauuuccaucuuccuucaccucgugaaaauccccacacaucggcacauugucggaaagucuugcccuaaaccccaucgccugaaccacaugggcaucuguagcugcggccuguauaagcagccuggggugcccguuaaguggaaaagaugaggacuaguaauaaggaaacuguaugaaugucugugggcaggaagugaagagauccuucuguaaagguuuuuggaauuaugucugcugaauaauaaacuuuuuugaaauaauaaaucugguagaaaaaugagaucucaaaggcucuuuucagagccaccaaaaaaaaaaaaaaaaaaaaaaaaaaaaaaaaaaaaaaaaaaaaaaaaaaaaaaaaaaaaaaaaaaaaaaaaaaaaaaaaaaaaaaaaaaaaaaaaaaaaa

SEQ ID NO: 29190 - RNA, 1809 nt, Artificial Sequence
  mRNA product Design b-4 (hSL-A100) comprising derived and/or modified sequence from LASV(LP;Clade I)__AAF86701__GPCmut5 (opt5)
aggagagucccgcagucggcguccagcggcucugcuuguucgugugugugucguugcaggccuuauucaagcuuaccaugggccagaucauuaccuucuuucaagaggugccccacgucaucgaagagguuaugaacauugugcugaucgcccucagccugcuugcuauucugaaggggcucuacaauaucgccacaugcggaaucauuggccugguggcguuccuuuuucugugugggaaauccugcucucucacgcugaagggaggcuaugaacugcagacccucgagcugaacauggaaacacuuaauaugaccaugccucugagcuguaccaaaaacuccucucaucacuacaucagagucgggaaugagacaggacucgagcugacacuuaccaacacgagcauuaucaaucauaaguucugcaaccuguccgacgcucacaaaaagaaucucuaugaucaugcccugaugucuauuaucagcaccuuucaccuguccauuccgaacuucaaucaguacgaagccaugagcugugacuuuaacggcggcaagaucucugugcaguauaaucucucccacagcuacgcuggggaugccgcugagcauugcggaacaguugccaacggcgugcugcaaaccuucaugcggauggcguggggagggcgcuauaucgcccuugacucuggcugugggaauugggauugcauuaugacauccuaccaguaccugaucauucagaacaccacgugggaagaccacugucaguuuagcagacccucuccuaucggauaucucggccugcuuucccaacggacacgcgauauuuacaucagcagacggcugcucggcaccuucacauggacccuguccgacucugaggggaacgagacccccggaggcuauugccugacacgcuggaugcucaucgaagcugagcugaaauguuuugggaauacggccgucgcuaagugcaacgaaaaacaugaugaggaguucugcgacaugcuuagacuguuugauuucaauaagcaggccauucggcgccucaaagcgccugcccagaugagcauccagcugauuaacaaggcugugaaugcccuuaucaacgaccaacugauuaugaagaaucaccucagagauaucauguguauccccuacugcaacuauuccaaauacugguaucugaaucacaccagcucuggacggacaucccugccuaaguguuggcucauuagcaacggcucuuaccugaaugaaacccaguucagcgacgacaucgagcagcaagcugauaacaugauuacagaaaugcuucagaaagaguacaucgaacgccaggggaagaccccgcugggacucguugacauuuuuaucuucuccacgucuuuuuaucugauuagcaucuuccugcaucuuaucaaaauucccacacacagacauaucgugggcaagccuugccccaaaccucaccggcucaaucauaugggcgucuguuccugcgggcuguacaagcaccccggagugccgaccaaguggaaacgcugaggacuaguaauaaggaaacuguaugaaugucugugggcaggaagugaagagauccuucuguaaagguuuuuggaauuaugucugcugaauaauaaacuuuuuugaaauaauaaaucugguagaaaaaugagaucucaaaggcucuuuucagagccaccaaaaaaaaaaaaaaaaaaaaaaaaaaaaaaaaaaaaaaaaaaaaaaaaaaaaaaaaaaaaaaaaaaaaaaaaaaaaaaaaaaaaaaaaaaaaaaaaaaaaa

SEQ ID NO: 29191 - RNA, 1809 nt, Artificial Sequence
  mRNA product Design b-4 (hSL-A100) comprising derived and/or modified sequence from LASV(803213;Clade II)__AAF86703__GPCmut5 (opt5)
aggagagucccgcagucggcguccagcggcucugcuuguucgugugugugucguugcaggccuuauucaagcuuaccaugggccagaucauuaccuucuuucaagaggugccccacgucaucgaagagguuaugaacauugugcugaucgcccucagccugcuugcuauucugaaggggaucuacaauguggccacaugcggacucuucggccugaucuccuuucuucugcucugugggagaucuugcagcgucacguauaaaggaguguacgaacugcagacccuggagcucaacauggcgaaucugaacaugacaaugccucuuuccuguaccaagaauaacucucaucacuauauuaugguuggcaaugaaacagggcuggagcucacccugacaaacaccagcaucauuaaucauaaauucugcaaccuuuccgacgcucacaagaaaaaucuguacgaucaugcccucaugucuaucauuagcacguuucaccuguccaucccgaacuucaaucaguaugaggccaugagcugugacuuuaacggaggcaagauuucugugcaguacaaucugucccacagcuucgcugucgaugccgcuaaccauugcggcaccaucgccaacggggugcuccaaacauuuaugcggauggcguggggaggcucuuauaucgcccuggacuccggguguggaaauugggauugcauuaugaccagcuaccaguaccuuaucauucagaacacaaccugggaagaccacugucaguucucucgccccuccccuaucggcuaucuggggcuccugagccaaagaacgcgggauauuuacaucucccgcagacuucugggaacauuuaccuggacacucucugacagcgagggcaaugaagcucccggcggguauugccugacccgguggaugcugaucgaggccgagcucaaguguuucggaaacaccgcuguugccaaaugcaaugaaaagcaugaugaggaauuuugcgacaugcugcgccuuuucgauuucaacaaacaggcgauuaagagacugaaaacgccugcccagauguccauccagcucauuaauaaggcugugaacgcccugaucaaugaccaacuuauuaugaagaaccaucugcgggauaucauguguauccccuacugcaauuauagccgcuacugguaucucaaccacacagucaccggcaaaacaucucugccuagauguuggcugguguccaaugggagcuaccucaacgagacccacuuuucugacgacauugaacagcaggcugauaauaugaucacagagaugcugcaaaaggaguacauggaccggcagggaaaaaccccgcuuggccugguggaucucuucgucuuuagcacguccuucuaucugauuucuaucuuucugcaccuuguuaagauucccacacaucgccacaucguggggaaaccuugccccaagccucauagacucaaccacaugggaauuuguagcugcggccuguacaaacaccccggcgugccggucaaguggaagcggugaggacuaguaauaaggaaacuguaugaaugucugugggcaggaagugaagagauccuucuguaaagguuuuuggaauuaugucugcugaauaauaaacuuuuuugaaauaauaaaucugguagaaaaaugagaucucaaaggcucuuuucagagccaccaaaaaaaaaaaaaaaaaaaaaaaaaaaaaaaaaaaaaaaaaaaaaaaaaaaaaaaaaaaaaaaaaaaaaaaaaaaaaaaaaaaaaaaaaaaaaaaaaaaaa

SEQ ID NO: 29192 - RNA, 1809 nt, Artificial Sequence
  mRNA product Design b-4 (hSL-A100) comprising derived and/or modified sequence from LASV(GA391;Clade III)__CAA36645__GPCmut5 (opt5)
aggagagucccgcagucggcguccagcggcucugcuuguucgugugugugucguugcaggccuuauucaagcuuaccaugggccagaucgugaccuucuuucaagaggucccccacguuauugaagaggugaugaacaucgugcugauugcccucagcauccuggcuauucuuaaggggcuguacaaugucgccacaugcggacucaucggccuggugacguuccuucugcucuccgggagaucuuguagccugaucuauaaaggaaccuacgaacugcagacacucgagcugaacauggaaacccuuaauaugacaaugccucuguccugcaccaagaacaauucucaucacuauauucggguuggcaacgagacagggcucgagcugacccuuacgaauaccagcauccugaaccauaaauuuuguaaucucuccgacgcgcacaagcgcaaccuguacgaucauucucugaugagcauuaucuccacauuccaccucagcauuccgaauuuuaaccaguaugaagcuaugucuugcgacuucaauggaggcaaaaucaccgugcaguacaaccugucccacagcuuugccgucgaugccgcuggccauugugggacacuugccaauggagugcugcaaaccuucaugagaauggcuuggggcgggucuuauauugcccucgacuccggaugcggcaacugggauuguaucaugacgagcuaccaguaccugaucauucagaacacaaccugggacgaucacugccaguuuucucggcccuccccuaucggguaucuuggacugcucagccaacgcacaagagacauuuacaucucccggcgccugcugggcaccuucaccuggacacucucugauagcgagggcaaugaaacgcccgggggauauugucugaccagauggaugcuuauugaggcggagcugaagugcuuuggcaacacagccguugcuaaguguaaugaaaaacaugacgaggaguucugcgauaugcuccggcuguuugacuucaacaagcaggccauccgcagacuuaaaaccccugcucagauguccauccagcugauuaauaaggccgugaacgcgcucaucaaugaucaacugauuaugaaaaaccaucugcgggacaucaugugcauucccuacuguaauuauagccgcuacugguaucucaaccacacaucuaccgggaagacgucccugccuagaugcuggcuuaucagcaauggaucuuaccugaacgaaacaaaguucagcgacgauaucgaacagcaggccgacaauaugauuaccgagaugcuccaaaaagaguacaucgaucggcagggcaagaccccgcuggggcuggucgaccuuuuuguguucuccacaucuuuuuaucucauuagcaucuuccugcaccuggugaaaauucccacccaccgccauaucgucggaaagccuugucccaaaccucacagacucaaccauaugggcauuugcuccuguggccuguacaagcagcccgggguuccggugcgguggaaaagaugaggacuaguaauaaggaaacuguaugaaugucugugggcaggaagugaagagauccuucuguaaagguuuuuggaauuaugucugcugaauaauaaacuuuuuugaaauaauaaaucugguagaaaaaugagaucucaaaggcucuuuucagagccaccaaaaaaaaaaaaaaaaaaaaaaaaaaaaaaaaaaaaaaaaaaaaaaaaaaaaaaaaaaaaaaaaaaaaaaaaaaaaaaaaaaaaaaaaaaaaaaaaaaaaa

SEQ ID NO: 29193 - RNA, 1812 nt, Artificial Sequence
  mRNA product Design b-4 (hSL-A100) comprising derived and/or modified sequence from LASV(AV;Clade V)__CCA30314__GPCmut5 (opt5)
aggagagucccgcagucggcguccagcggcucugcuuguucgugugugugucguugcaggccuuauucaagcuuaccaugggccagaucgugaccuucuuucaagaggucccccacguuauugaagaggugaugaacaucgugcugauugcccucagcauccuggcuguccuuaaggggcuguacaauauugccacaugcggacucaucggccugaucacguuccuucugcucugugggagauccugcucuagcaaccuguauaaaggaguguacgaacugcagucccucgaccugaauauggagacccuuaacaugacaaugccucugucuuguaccaagaauaacagccaucacuauauucggguuggcaaugauacagggcucgaacugacccuuacaaacaccuccauccugaaucauaaauuuugcaaccucucugacgcgcacaagaaagaucuguacgaccaugcucugaugagcauuaucuccacguuccaccucagcauuccgaauuuuaaccaguaugaggccaugucuugugauuucaauggaggcaagaucuccgugcaguacaaccugagccacucuuaugccauugacgcugccaaucauugcggcaccgucgcuaacgggauccuucaaacauuuaugcgcauggccuggggaggcuccuacaucgcgcuggauagcggguguggaaacugggacugcauuaugaccucuuaccaguaucucaucauucagaauacaaccugggagaaccacugucaguucuccagacccagcccuaucggcuaccuggggcuucugucccaacggacgcgcgauauuuauaucucuagacggcuccugggaacauuuaccuggacacugagcgacuccgaaggcaaugccacccccggcggguacugccucacccgcuggaugcugaucgaggcugaacuuaaguguuucggaaacacagccguggcuaaaugcaaugagaagcaugaugaggaauuuugcgacaugcugagacucuucgauuuuaacaaacaggccauuagccggcugaagucuccugcgcagauguccauccagcuuauuaauaaagccguuaacgcucugaucaaugaccaacucauuaugaagaaccaucugcgcgacaucauguguauccccuauugcaauuacagcaaguauugguaccugaaccacacgauuaccggcaaaacaucucucccuaaguguuggcuggugagcaauggguccuaccuuaacgagacccacuucucugaugacaucgaacagcaggccgauaauaugauuacagagaugcugcaaaaagaauauauggagagacagggaaagaccccgcucggccuggucgaccuguucguguuuagcacguccuucuaccuuaucagcauuuuucuccggcuggugaaaauccccacacaccgccauauugucgggaagccuugccccaaaccucacagacugaaccauaugggaaucuguucuugcggccucuauaagcagcccggcguuccggugcgguggaagcgcugaggacuaguaauaaggaaacuguaugaaugucugugggcaggaagugaagagauccuucuguaaagguuuuuggaauuaugucugcugaauaauaaacuuuuuugaaauaauaaaucugguagaaaaaugagaucucaaaggcucuuuucagagccaccaaaaaaaaaaaaaaaaaaaaaaaaaaaaaaaaaaaaaaaaaaaaaaaaaaaaaaaaaaaaaaaaaaaaaaaaaaaaaaaaaaaaaaaaaaaaaaaaaaaaa

SEQ ID NO: 29194 - RNA, 1809 nt, Artificial Sequence
  mRNA product Design b-4 (hSL-A100) comprising derived and/or modified sequence from LASV(Togo/2016/7082;Clade VI)__AMR44577__GPCmut5 (opt5)
aggagagucccgcagucggcguccagcggcucugcuuguucgugugugugucguugcaggccuuauucaagcuuaccaugggccagaucauuaccuucuuucaagaggugccccacgucaucgaagagguuaugaacauugugcugaucgcccucagccugcuugcuauucugaaggggguguacaaugucgccacaugcggaaucaucggccucgugacguuccuguuucuuugugggagauccugcucucugauuuauaaaggaagcuacgaacuccagacccuggagcugaacauggaaacacucaauaugaccaugccucuguccuguacaaagaacucuagccaucacuauauccggguuggcaaugagaccgggcuugagcugacacucaccaacacguccauuaucaaucauaaauucugcaaccugucugacgcgcacaagcgcaaucuuuacgaucaugcucugaugagcauucucuccaccuuucaccugagcaucccgaacuucaaucaguaugaagccaugucuugugacuuuaacggaggcaaaauuuccgugcaguacaaucugagccacgccuaugcugucgaugccgcugagcauugcggcacaguggccaacgggguucuccaaaccuucaugagaauggcguggggaggcucuuacaucgcccuggacuccggguguggaaauugggauugcaucaugacaagcuaccaguaucuuauuauccagaacaccacgugggaagaccacugucaguuuucucggcccuccccuauuggcuaccuggggcuccugagccaacgcacaagagauaucuauauuucccggcgccuucugggaaccuucacauggacccucucugacagcgagggcaacgagacccccggcggguacugccugacaagauggaugcugaucgaagcugagcucaaguguuuuggaaauacggccguggcuaagugcaacgaaaaacaugaugaggaguucugcgacaugcugcggcuuuuugauuucaauaagcaggccauccagcgccugaaauccccugcgcagaugagcauucaacucaucaacaaggccgucaaugcucugauuaacgaccagcuuaucaugaaaaaucaccugagagauaugauguguauucccuauugcaacuacucuaaguauugguaccucaaucacaccuccagcggccggacaucucugccuaaguguuggcuggugagcaacggguccuaccucaaugaaacccauuucucugacgacaucgagcagcaagccgauaacaugaucacagaaaugcugcagaaagaguauauugaccgccagggaaagaccccgcuuggccugguggaucucuuugucuucagcacguccuuuuaccugaucagcauuuuccugcaccuuaucaaaauucccacacauagacacaucguugggaagccuugccccaaaccucaucggcucaaucacaugggaauuuguucuugcggccuguauaagcagcccggcgugccgacccgcuggaaaagaugaggacuaguaauaaggaaacuguaugaaugucugugggcaggaagugaagagauccuucuguaaagguuuuuggaauuaugucugcugaauaauaaacuuuuuugaaauaauaaaucugguagaaaaaugagaucucaaaggcucuuuucagagccaccaaaaaaaaaaaaaaaaaaaaaaaaaaaaaaaaaaaaaaaaaaaaaaaaaaaaaaaaaaaaaaaaaaaaaaaaaaaaaaaaaaaaaaaaaaaaaaaaaaaaa

SEQ ID NO: 29195 - RNA, 1809 nt, Artificial Sequence
  mRNA product Design b-4 (hSL-A100) comprising derived and/or modified sequence from LASV(KAK-428;Clade n.d. (VII))__ANH09740__GPCmut5 (opt5)
aggagagucccgcagucggcguccagcggcucugcuuguucgugugugugucguugcaggccuuauucaagcuuaccaugggccagaucgugaccuucuuucaagaggucccccacguuauugaagaggugaugaacaucgugcugauugcccucagccugcuugcuauccugaaggggcucuacaauuucgccacaugcggagucauuggccugaucacguuucuucugcucugugggagauccugcucugcgaccuauaaaggacaguacgaacugcagacacuggagcucaacauggaaagccugaauaugaccaugccucuuuccuguacaaagaacaauucucaucacuauauccgggcuggcaacaauaccgggcuggagcucacacugaccaacacgagcauuaucucccauaaauucugcaaucuuucugacgcccacaagaaaaaccuguacgaucauacccucaugagcauuaucacaaccuuucaccuguccauuccgaauuucaaccaguaugaggccaugagcugugacuuuaauggaggcaagaucucuauucaauacaaccugucccacagcuaugcuggcgaugccgcucagcauugcgggacaguggccaauggaguucuccagaccuucaugcgcauggcguggggcgggucuuaccuggcccuugacuccggauguagaggcugggauugcaucaucagcucuuaccaguaucugauuauccaaaacacgacaugggacgaucacugucaguuuucccggcccagcccuauuggguaccucggauucgugucccagaagacccgcgacaucuauauuucuagacggcugcuuggcacauuuaccuggacccugagcgauuccgaaggccaugacaugcccgggggauacugccucacacgcuggaugcugaucgaggcugaucugaaauguuucggcaacacggccgucgcuaagugcaaugaaaaacacgacgaggaguuuugcgauauguggagacucuucgacuucaacaagcaggccauccaacggcugaaagcgccugcccagaugaauauucagcuuaucaacaaggcugugaaugcccugauuaacgaccaacucaugaugaagaaucaucugcgcgauaucauguguauucccuauugcaacuacagcaaauuuugguaucuuaauaacaccacaaccgggagaacaucucugccucgguguuggcucaucuccaauggaagcuaccugaacgaaacccacuucucugacgauaucgagcagcaggcugacaauaugauuacggaaaugcugcagaaggaguacauggaucgccaaggcaaaacaccgcucgggcugguugaccuuuuuguguucagcaccuccuuuuaucugaucaccauuuuccuccaccuggucaagauccccacacauagacacauugugggaaaaccuugccccaagccucaucggcugaaccacaugggcaucuguucuugcggccuuuacaaacagcccggggugccgguccgcuggaagagaugaggacuaguaauaaggaaacuguaugaaugucugugggcaggaagugaagagauccuucuguaaagguuuuuggaauuaugucugcugaauaauaaacuuuuuugaaauaauaaaucugguagaaaaaugagaucucaaaggcucuuuucagagccaccaaaaaaaaaaaaaaaaaaaaaaaaaaaaaaaaaaaaaaaaaaaaaaaaaaaaaaaaaaaaaaaaaaaaaaaaaaaaaaaaaaaaaaaaaaaaaaaaaaaaa

SEQ ID NO: 29196 - RNA, 1809 nt, Artificial Sequence; identical to SEQ ID NO: 29190
  mRNA product Design b-4 (hSL-A100) comprising derived and/or modified sequence from LASV(Pinneo-NIG-1969;Clade I)__AIT17836__GPCmut5 (opt5)

SEQ ID NO: 29197 - RNA, 1809 nt, Artificial Sequence
  mRNA product Design b-4 (hSL-A100) comprising derived and/or modified sequence from LASV(ISTH0009-NIG-2011;Clade II)__AIT17404__GPCmut5 (opt5)
aggagagucccgcagucggcguccagcggcucugcuuguucgugugugugucguugcaggccuuauucaagcuuaccaugggccagaucauuaccuucuuucaagaggugccccacgucaucgaagagguuaugaacauugugcugaucgcccucagccugcuugcuauucugaaggggaucuacaauguggccacaugcggacucuucggccuggucuccuuucuucugcucugugggagaucuugcagcacgaccuauaaaggaguguacgaacugcagacacuggagcucgacauggcgucccugaacaugaccaugccucuuucuuguacaaagaauaacagccaucacuauaucaugguuggcaaugaaaccgggcuggagcucacacugaccaacacguccauuaucaaucauaaauucugcaaccuuucugaugcucacaagaaaaaucuguacgaccaugcccucaugagcauuaucuccaccuuucaccugagcauuccgaacuucaaucaguaugaggccaugucuugugauuuuaacggaggcaagaucuccgugcaguacaaucugagccacgcuuaugccgucgacgcugccaaccauugcggcacaauugcgaauggggugcuccaaaccuucaugcggauggccuggggaggcucuuacaucgcucuggauuccggguguggaagcugggacugcaucaugacaucuuaccaguaucuuauuauccagaacaccacgugggaagaucacugucaguuuucccgccccagcccuauuggcuaccuggggcuccugucccaaagaacacgggacaucuauauuucucgcagacuucugggaaccuucacauggacccucagcgauuccgagggcaacgaaacccccggcggguacugccugacacgguggaugcugaucgaggccgagcucaaguguuuuggaaauacggcuguugccaaaugcaacgaaaagcaugacgaggaguucugcgauaugcugcgccuuuuugacuucaauaaacaggcgaucagacggcugaagaccccugcccagaugagcauucagcucaucaacaaagcugugaaugcccugauuaacgaucaacuuaucaugaagaaucaucugcgcgacauuauguguauccccuauugcaacuacucuaaguauugguaccucaaucacacagucaccggcaaaacaucccugccuagauguuggcuggugagcaacgggucuuaccucaaugaaacccacuucagcgacgauaucgaacagcaggcugacaacaugauuacggagcugcuucaaaaggaguauauggaucggcagggaaaaacaccgcugggccucguggaccuguuugucuucuccaccucuuuuuaccugaucagcauuuuccuucaccucaucaagauucccacccaucgccacaucacagggaaaccuugccccaagccucauagacugaaucacaugggaauuuguuccugcggccuguauaaacaccccggcguuccggugaaguggaagcggugaggacuaguaauaaggaaacuguaugaaugucugugggcaggaagugaagagauccuucuguaaagguuuuuggaauuaugucugcugaauaauaaacuuuuuugaaauaauaaaucugguagaaaaaugagaucucaaaggcucuuuucagagccaccaaaaaaaaaaaaaaaaaaaaaaaaaaaaaaaaaaaaaaaaaaaaaaaaaaaaaaaaaaaaaaaaaaaaaaaaaaaaaaaaaaaaaaaaaaaaaaaaaaaaa

SEQ ID NO: 29198 - RNA, 1809 nt, Artificial Sequence
  mRNA product Design b-4 (hSL-A100) comprising derived and/or modified sequence from LASV(ISTH2010-NIG-2012;Clade II)__AIT17482__GPCmut5 (opt5)
aggagagucccgcagucggcguccagcggcucugcuuguucgugugugugucguugcaggccuuauucaagcuuaccaugggccagaucauuaccuucuuucaagaggugccccacgucaucgaagagguuaugaacauugugcugaucgcccucagccugcuugcuauucugaaggggaucuacaauguggccacaugcggacucuucggccuggucuccuuucuucugcucugugggagaucuugcagcacgaccuauaaaggaguguacgaacugcagacacuggagcucgacauggcgucccugaacaugaccaugccucuuucuuguacaaagaauaacagccaucacuauaucaugguuggcaaugaaaccgggcuggagcucacacugaccaacacguccauuaucaaucauaaauucugcaaccuuucugaugcucacaagaaaaaucuguacgaccaugcccucaugagcauuaucuccaccuuucaccugagcauuccgaacuucaaucaguaugaggccaugucuugugauuuuaacggaggcaagaucuccgugcaguacaaucugagccacgcuuaugccgucgacgcugccaaccauugcggcacaauugcgaauggggugcuccaaaccuucaugcggauggccuggggaggcucuuacaucgcucuggauuccggguguggaagcugggacugcaucaugacaucuuaccaguaucuuauuauccagaacauuaccugggaagaucacugucaguuuucccgccccagcccuaucggcuaccuggggcuccugucccaaagaacgcgggacauuuauaucucucgcagacuucugggaacauucaccuggacacucagcgauuccgagggcaacgaaacccccggcggguacugccugacccgguggaugcugaucgaggccgagcucaaguguuuuggaaauacagcuguugccaaaugcaacgaaaagcaugacgaggaguucugcgauaugcugcgccuuuuugacuucaauaaacaggcgauuagacggcugaagacgccugcccagaugagcauccagcucauuaacaaagcugugaaugcccugaucaacgaucaacuuauuaugaagaaucaucugcgcgacaucauguguauccccuauugcaacuacucuaaguauugguaccucaaucacaccgucacaggcaaaaccucccugccuagauguuggcuggugagcaacgggucuuaccucaaugaaacacacuucagcgacgauauugaacagcaggcugacaacaugaucaccgagcugcuucaaaaggaguauauugaucggcagggaaaaacgccgcugggccucguggaccuguuugucuucuccacaucuuuuuaccugaucagcauuuuccuucaccucguuaagauccccacccaucgccacgugguggggaaaccuugccccaagccucauagacugaaucacaugggaauuuguuccugcggccuguauaaacaccccggcgucccggugaaguggaagcggugaggacuaguaauaaggaaacuguaugaaugucugugggcaggaagugaagagauccuucuguaaagguuuuuggaauuaugucugcugaauaauaaacuuuuuugaaauaauaaaucugguagaaaaaugagaucucaaaggcucuuuucagagccaccaaaaaaaaaaaaaaaaaaaaaaaaaaaaaaaaaaaaaaaaaaaaaaaaaaaaaaaaaaaaaaaaaaaaaaaaaaaaaaaaaaaaaaaaaaaaaaaaaaaaa

SEQ ID NO: 29199 - RNA, 1809 nt, Artificial Sequence
  mRNA product Design b-4 (hSL-A100) comprising derived and/or modified sequence from LASV(Lassa virus/H.sapiens-wt/NGA/2015/ISTH_0543;Clade II)__AVO03639__GPCmut5 (opt5)
aggagagucccgcagucggcguccagcggcucugcuuguucgugugugugucguugcaggccuuauucaagcuuaccaugggccagaucauuaccuucuuucaagaggugccccacgucaucgaagagguuaugaacauugugcugaucgcccucagccugcuugcuauucugaaggggaucuacaauguggccacaugcggacucuucggccuggucuccuuucuucugcucugugggagaucuugcagcacgaccuauaaaggaguguacgaacugcagacacuggagcucgacauggcgaaccugaauaugaccaugccucuuuccuguacaaagaacaauucucaucacuauaucaugguuggcaacgaaaccgggcuggagcucacacugaccaauacgagcauuaucaaccauaaauucugcaaucuuuccgaugcucacaagaaaaaccuguacgaccaugcccucaugucuauuaucagcaccuuucaccuguccauuccgaauuucaaccaguaugaggccaugagcugugauuuuaauggaggcaagaucucugugcaguacaaccugucccacacauaugcugucgacgccgcuaaucauugcggcaccauugccaacggggugcuccaaacauucaugcggauggcguggggaggcagcuacaucgcccuggauucuggguguggauccugggacugcaucaugaccagcuaccaguaucuuguuauucagaacacgacaugggaagaucacugucaguuuucucgccccuccccuaucggcuaccuggggcuccugagccaaagaacccgggacauuuauaucucccgcagacuucugggaacauucaccuggacccucucugauagcgagggcaaugaaacacccggcggguacugccugacgcgguggaugcugauugaggcugagcucaaguguuuuggaaacaccgccguggcuaaaugcaaugaaaagcaugacgaggaguucugcgauaugcugcgccuuuuugacuucaacaaacaggccaucagacggcugaagaccccugcgcagauguccauccagcucauuaauaaagccgucaacgcucugaucaaugaucaacuuauuaugaagaaccaucugcgcgacaucauguguauucccuauugcaauuacagcaaguauugguaccucaaccacacagugacaggcaaaaccucucugccuagauguuggcugguguccaaugggagcuaccucaacgaaacgcacuucucugacgauaucgaacagcaggccgacaauaugaucacagagcugcuucaaaaggaguauauugaucggcagggaaaaaccccgcugggccucgucgaccuguuuguuuucagcaccuccuuuuaccugaucucuauuuuccuucaccucgugaagauccccacacaucgccacauuaccgggaaaccuugccccaagccucauagacugaaccacaugggaaucuguagcugcggccuguauaaacaccccggcgugccggucaaguggaagcggugaggacuaguaauaaggaaacuguaugaaugucugugggcaggaagugaagagauccuucuguaaagguuuuuggaauuaugucugcugaauaauaaacuuuuuugaaauaauaaaucugguagaaaaaugagaucucaaaggcucuuuucagagccaccaaaaaaaaaaaaaaaaaaaaaaaaaaaaaaaaaaaaaaaaaaaaaaaaaaaaaaaaaaaaaaaaaaaaaaaaaaaaaaaaaaaaaaaaaaaaaaaaaaaaa

SEQ ID NO: 29200 - RNA, 1809 nt, Artificial Sequence
  mRNA product Design b-4 (hSL-A100) comprising derived and/or modified sequence from LASV(Lassa virus/H.sapiens-wt/NGA/2016/ISTH_0009;Clade II)__AVO03571__GPCmut5 (opt5)
aggagagucccgcagucggcguccagcggcucugcuuguucgugugugugucguugcaggccuuauucaagcuuaccaugggccagaucauuaccuucuuucaagaggugccccacgucaucgaagagguuaugaacauugugcugaucgcccucagccugcuugcuauucugaaggggaucuacaauguggccacaugcggacuccugggccuugucuccuuccugcuccugugugggagaucuugcagcacgaccuauaaaggaguguacgaacugcagacacucgagcuggacauggcgucccuuaacaugaccaugccucugucuuguacaaagaauaacagccaucacuauaucaugguuggcaaugaaaccgggcucgagcugacacuuaccaacacguccauuaucaaucauaaauuuugcaaccugucugaugcucacaagaaaaaucucuacgaccaugcccugaugagcauuaucuccaccuuccaccugagcauuccgaacuuuaaucaguaugaggccaugucuugugauuucaacggaggccggaucuccgugcaguacaaucucagccacucuuaugcugucgacgccgcuaaccauugcggcacaauugccaauggggugcugcaaaccuuuaugcgcauggcguggggaggcuccuacaucgcccuugauagcggguguggaucuugggacugcaucaugacauccuaccaguaucugauuauccagaacaccacgugggaagaucacugucaguucagcagacccuccccuauuggcuaccucgggcugcuuucucaacggacacgcgacaucuauauuagcagacggcugcucggaaccuuuacauggacccuguccgauagcgagggcaacgaaacccccggcggguacugccugacacgcuggaugcucaucgaggcugagcugaaguguuucggaaauacggccguugcuaagugcaacgaaaaacaugacgaggaauuuugcgauaugcuuagacuguucgacuuuaauaagcaggccauccggcgccucaaaaccccugcgcagaugucuauucagcugaucaacaaggccgugaaugcucuuauuaacgaucaacugaucaugaaaaaucaccucagagacauuauguguauccccuauugcaacuacuccaaguauugguaccugaaucacacagucaccggcaagacaagccugccucgguguuggcucgugucuaacgggagcuaccugaaugagacccauuucuccgacgauaucgaacagcaggccgacaacaugauuacggagcuucugcaaaaagaguauaucgaucgccagggaaagacaccgcucggccugguggaccuguucgucuuuucuaccagcuucuaccuuauuuccaucuuucuccaccugguuaaaauucccacccauagacacaucacagggaagccuugccccaaaccucaucggcugaaucacaugggaauuuguagcugcggccucuauaaccaccccggcgugccggugaaguggaaacgcugaggacuaguaauaaggaaacuguaugaaugucugugggcaggaagugaagagauccuucuguaaagguuuuuggaauuaugucugcugaauaauaaacuuuuuugaaauaauaaaucugguagaaaaaugagaucucaaaggcucuuuucagagccaccaaaaaaaaaaaaaaaaaaaaaaaaaaaaaaaaaaaaaaaaaaaaaaaaaaaaaaaaaaaaaaaaaaaaaaaaaaaaaaaaaaaaaaaaaaaaaaaaaaaaa

SEQ ID NO: 29201 - RNA, 1809 nt, Artificial Sequence
  mRNA product Design b-4 (hSL-A100) comprising derived and/or modified sequence from LASV(Lassa virus/H.sapiens-wt/NGA/2016/ISTH_0017;Clade II)__AVO03567__GPCmut5 (opt5)
aggagagucccgcagucggcguccagcggcucugcuuguucgugugugugucguugcaggccuuauucaagcuuaccaugggccagaucauuaccuucuuucaagaggugccccacgucaucgaagagguuaugaacauugugcugaucgcccucagccugcuugcuauucugaaggggaucuacaauguggccacaugcggacucuucggccuggucuccuuucuucugcucugugggagaucuugcagcacgaccuauaaaggaguguacgaacugcagacacuggagcucgacauggcgucccugaacaugaccaugccucuuucuuguacaaagaauaacagccaucacuauaucaugguuggcaaugaaaccgggcuggagcucacacugaccaacacguccauuaucaaucauaaauucugcaaccuuucugaugcucacaagaaaaaucuguacgaccaugcccucaugagcauuaucuccaccuuucaccugagcauuccgaacuucaaucaguaugaggccaugucuugugauuuuaacggaggcaagaucuccgugcaguacaaucugagccacacauaugcuauugacgccgcuaaccauugcggcaccaucgccaaugggguccuccaaacauucaugcggauggcguggggaggcucuuacaucgcccuggauuccggguguggaagcugggacugcauuaugaccucuuaccaguaucuuaucauucagaacacgacaugggaagaucacugucaguuuucccgccccagcccuaucggcuaccuggggcuccugucccaaagaacccgggacauuuauaucucucgcagacuucugggaacauucaccuggacccucagcgauuccgagggcaacgaaacacccggcggguacugccugacgcgguggaugcugaucgaggcugagcucaaguguuuuggaaauaccgccguggcuaaaugcaacgaaaagcaugacgaggaguucugcgauaugcugcgccuuuuugacuucaauaaacaggccauuagacggcugaagaccccugcgcagaugagcauccagcucauuaacaaagccguuaaugcucugaucaacgaucaacuuauuaugaagaaucaucugcgcgacaucauguguauccccuauugcaacuacucuaaguauugguaccucaaucacacagugacaggcaaaaccucccugccuagauguuggcuggucagcaacgggucuuaccucaaugaaacgcacuucagcgacgauauugaacagcaggccgacaacaugaucacagagcugcuucaaaaggaguauauggaucggcagggaaaaaccccgcugggccucguggaccuguuuguguucuccaccucuuuuuaccugauuagcaucuuccuucaccucguccgcauucccacacauagacacguuaucgggaagccuugccccaaaccucaucggcugaaucacaugggaauuuguuccugcggccuguauaagcaccccggcgugccggugaaauggaagcgcugaggacuaguaauaaggaaacuguaugaaugucugugggcaggaagugaagagauccuucuguaaagguuuuuggaauuaugucugcugaauaauaaacuuuuuugaaauaauaaaucugguagaaaaaugagaucucaaaggcucuuuucagagccaccaaaaaaaaaaaaaaaaaaaaaaaaaaaaaaaaaaaaaaaaaaaaaaaaaaaaaaaaaaaaaaaaaaaaaaaaaaaaaaaaaaaaaaaaaaaaaaaaaaaaa

SEQ ID NO: 29202 - RNA, 1809 nt, Artificial Sequence
  mRNA product Design b-4 (hSL-A100) comprising derived and/or modified sequence from LASV(Lassa virus/H.sapiens-wt/NGA/2018/ISTH_0959;Clade II)__AVV65099__GPCmut5 (opt5)
aggagagucccgcagucggcguccagcggcucugcuuguucgugugugugucguugcaggccuuauucaagcuuaccaugggccagaucauuaccuucuuucaagaggugccccacgucaucgaagagguuaugaacauugugcugaucgcccucagccugcuugcuauucugaaggggaucuacaauguggucacaugcggacucuucggccugguguccuuucuucugcucugugggagaucuugcagcacgaccuauaaaggaguuuacgaacugcagacacuggagcucgacauggccucccugaacaugaccaugccucuuucuuguacaaagaauaacagccaucacuauaucauggugggcaaugaaaccgggcuggagcucacacugaccaacacguccauuaucaaucauaaauucugcaaccuuucugaugcgcacaagaaaaaucuguacgaccaugcucucaugagcauuaucuccaccuuucaccugagcauuccgaacuucaaucaguaugaggccaugucuugugauuuuaacggaggcaagaucuccguccaguacaaucugagccacgccuaugcuauugacgccgcuaaccauugcggcacaaucgccaauggggugcuccaaaccuucaugcggauggcguggggaggcucuuacaucgcccuggauuccggguguggaagcugggacugcauuaugacaucuuaccaguaucuuaucauucagaacaccacgugggaagaucacugucaguuuucccgccccagcccuaucggcuaccuggggcuccugucccaaagaacacgggacauuuauaucucucgcagacuucugggaaccuucacauggacccucagcgauuccgagggcaacgaaacccccggcggguacugccugacacgguggaugcugaucgaggcugagcucaaguguuuuggaaauacggccguugcuaaaugcaacgaaaagcaugacgaggaguucugcgauaugcugcgccuuuuugacuucaauaaacaggccauuagacggcugaagaccccugcgcagaugagcauccagcucauuaacaaagccgugaaugcucugaucaacgaucaacuuauuaugaagaaucaucugcgcgacaucauguguauccccuauugcaacuacucuaaguauugguaccucaaucacacagucaccggcaaaacaucccugccuagauguuggcuggugagcaacgggucuuaccucaaugaaacccacuucagcgacgauauugaacagcaggccgacaacaugaucacggagcugcuucaaaaggaguauauugaucggcagggaaaaacaccgcugggccucguggaccuguuugucuucuccaccucuuuuuaccugaucagcauuuuccuucaccucguuaagauccccacccaucgccacgugauugggaaaccuugccccaagccucauagacugaaucacaugggaaucuguuccugcggccuguauaaacaccccggcgugccggucaaguggaagcggugaggacuaguaauaaggaaacuguaugaaugucugugggcaggaagugaagagauccuucuguaaagguuuuuggaauuaugucugcugaauaauaaacuuuuuugaaauaauaaaucugguagaaaaaugagaucucaaaggcucuuuucagagccaccaaaaaaaaaaaaaaaaaaaaaaaaaaaaaaaaaaaaaaaaaaaaaaaaaaaaaaaaaaaaaaaaaaaaaaaaaaaaaaaaaaaaaaaaaaaaaaaaaaaaa

SEQ ID NO: 29203 - RNA, 1809 nt, Artificial Sequence
  mRNA product Design b-4 (hSL-A100) comprising derived and/or modified sequence from LASV(LASV003-NIG-2008;Clade II)__AIT17580__GPCmut5 (opt5)
aggagagucccgcagucggcguccagcggcucugcuuguucgugugugugucguugcaggccuuauucaagcuuaccaugggccagaucauuaccuucuuucaagaggugccccacgucaucgaagagguuaugaacauugugcugaucgcccucagccugcuugcuauucugaaggggaucuacaauguggccacaugcggacucuucggccuggucuccuuucuucugcucugugggagaucuugcagcacgaccuauaaaggaguguacgaacugcagacacuggagcucgacauggcgucccugaacaugaccaugccucuuucuuguacaaagaauaacagccaucacuauaucaugguuggcaaugaaaccgggcuggagcucacacugaccaacacguccauuaucaaucauaaauucugcaaccuuucugaugcucacaagaaaaaucuguacgaccaugcccucaugagcauuaucuccaccuuucaccugagcauuccgaacuucaaucaguaugaggccaugucuugugauuuuaacggaggcaagaucuccgugcaguacaaucugagccacacauaugcugucgacgccgcuaaccauugcggcaccauugccaauggggugcuccaaacauucaugcggauggcguggggaggcucuuacaucgcccuggauuccggguguggaagcugggacugcaucaugaccucuuaccaguaucuuauuauccagaacacgacaugggaagaucacugucaguuuucccgccccagcccuauuggcuaccuggggcuccugucccaaagaacccgggacaucuauauuucucgcagacuucugggaacauucaccuggacccucagcgauuccgagagcaacgaaacacccggcggcuacugccugacgcgguggaugcugaucgaggcugagcucaaguguuuugggaauaccgccguugcuaaaugcaacgaaaagcaugacgaggaguucugcgauaugcugcgccuuuuugacuucaauaaacaggccaucagacggcugaaggcgccugcccagaugucuauucagcucaucaacaaagcugugaaugcccugauuaacgaucaacuuaucaugaagaaucaucugcgcgacauuauguguauccccuauugcaacuacuccaaguauugguaccucaaucacacagucaccggaagaacaagccugccucgguguuggcuggugucuaacggcagcuaccucaaugaaacccacuucuccgacgauaucgaacagcaggcugacaacaugauuacggagcugcuucaaaaagaguauauggaucgccaggggaagacaccgcugggacucguggaccuguuugucuucucuaccagcuuuuaccugaucuccauuuuccuucaccucguuaaaauccccacccauagacacgugauuggcaagccuugccccaaaccucaucggcugaaucacauggggaucuguagcugcggacuguauaagcaccccggcgugccggucaaauggaagcgcugaggacuaguaauaaggaaacuguaugaaugucugugggcaggaagugaagagauccuucuguaaagguuuuuggaauuaugucugcugaauaauaaacuuuuuugaaauaauaaaucugguagaaaaaugagaucucaaaggcucuuuucagagccaccaaaaaaaaaaaaaaaaaaaaaaaaaaaaaaaaaaaaaaaaaaaaaaaaaaaaaaaaaaaaaaaaaaaaaaaaaaaaaaaaaaaaaaaaaaaaaaaaaaaaa

SEQ ID NO: 29204 - RNA, 1809 nt, Artificial Sequence
  mRNA product Design b-4 (hSL-A100) comprising derived and/or modified sequence from LASV(LASV035-NIG-2009;Clade II)__AIT17588__GPCmut5 (opt5)
aggagagucccgcagucggcguccagcggcucugcuuguucgugugugugucguugcaggccuuauucaagcuuaccaugggccagaucauuaccuucuuucaagaggugccccacgucaucgaagagguuaugaacauugugcugaucgcccucagccugcuugcuauucugaaggggaucuacaauguggccacaugcggacucuucggccuggucuccuuucuucugcucugugggagaucuugcagcacgaccuauaaaggaguguacgaacugcagacacuggagcucgacauggcgucccugaacaugaccaugccucuuucuuguacaaagaauaacagccaucacuauaucaugguuggcaaugaaaccgggcuggagcucacacugaccaacacguccauuaucaaucauaaauucugcaaccuuucugaugcucacaagaaaaaucuguacgaccaugcccucaugagcauuaucuccaccuuucaccugagcauuccgaacuucaaucaguaugaggccaugucuugugauuuuaacggaggcaagaucuccgugcaguacaaucugagccacgcuuaugccgucgacgcugccaaccauugcggcacaauugcgaauggggugcuccaaaccuucaugcggauggccuggggaggcucuuacaucgcucuggauuccggguguggaagcugggacugcaucaugacaucuuaccaguaucuuauuauccagaacaccacgugggaagaucacugucaguuuucccgccccagcccuauuggcuaccuggggcuccugucccaaagaacacgggacaucuauauuucucgcagacuucugggaaccuucacauggacccucagcgauuccgagggcaacgaaacccccggcggguacugccugacacgguggaugcugaucgaggccgagcucaaguguuuuggaaauacggcuguugccaaaugcaacgaaaagcaugacgaggaguucugcgauaugcugcgccuuuuugacuucaauaaacaggcgaucagacggcugaaggccccugcucagaugagcauucagcucaucaacaaagccgugaaugcucugauuaacgaucaacuuaucaugaagaaucaucugcgcgacauuauguguauccccuauugcaacuacucuaaguauugguaccucaaucacaccgucacaggcaaaaccucccugccuagauguuggcuggugagcaacgggucuuaccucaaugaaacacacuucagcgacgauaucgaacagcaggccgacaacaugauuaccgagcugcuucaaaaggaguauaucgaucggcagggaaaaacgccgcugggccucguggaccuguuugucuucuccacaucuuuuuaccugauuagcaucuuccuucaccucguuaagauucccacccaucgccacgugaucgggaaaccuugccccaagccucauagacugaaucacaugggaauuuguuccugcggccuguauaaacaccccggcgugccggucaaguggaagcggugaggacuaguaauaaggaaacuguaugaaugucugugggcaggaagugaagagauccuucuguaaagguuuuuggaauuaugucugcugaauaauaaacuuuuuugaaauaauaaaucugguagaaaaaugagaucucaaaggcucuuuucagagccaccaaaaaaaaaaaaaaaaaaaaaaaaaaaaaaaaaaaaaaaaaaaaaaaaaaaaaaaaaaaaaaaaaaaaaaaaaaaaaaaaaaaaaaaaaaaaaaaaaaaaa

SEQ ID NO: 29205 - RNA, 1809 nt, Artificial Sequence
  mRNA product Design b-4 (hSL-A100) comprising derived and/or modified sequence from LASV(LASV1000-NIG-2009;Clade II)__AIT17782__GPCmut5 (opt5)
aggagagucccgcagucggcguccagcggcucugcuuguucgugugugugucguugcaggccuuauucaagcuuaccaugggccagaucauuaccuucuuucaagaggugccccacgucaucgaagagguuaugaacauugugcugaucgcccucagccugcuugcuauucugaaggggaucuacaauguggccacaugcggacucuucggccuggucuccuuucuucugcucugugggagaucuugcagcacgaccuauaaaggaguguacgaacugcagacacuggagcucgacauggcgucccugaacaugaccaugccucuuucuuguacaaagaauaacagccaucacuauaucaugguuggcaaugaaaccgggcuggagcucacacugaccaacacguccauuaucaaucauaaauucugcaaccuuucugaugcucacaagaaaaaucuguacgaccaugcccucaugagcauuaucuccaccuuucaccugagcauuccgaacuucaaucaguaugaggccaugucuugugauuuuaacggaggcaagaucuccgugcaguacaaucugagccacacauaugcugucgacgccgcuaaccauugcggcaccauugccaauggggugcuccaaacauucaugcggauggcguggggaggcucuuacaucgcccuggauuccggguguggaagcugggacugcaucaugaccucuuaccaguaucuuauuauccagaacacgacaugggaagaucacugucaguuuucccgccccagcccuauuggcuaccuggggcuccugucccaaagaacccgggacaucuauauuucucgcagacuucugggaacauucaccuggacccucagcgauuccgagggcaacgaaacacccggcggguacugccugacgcgguggaugcugaucgaggcugagcucaaguguuuuggaaauaccgccguugcuaaaugcaacgaaaagcaugacgaggaguucugcgauaugcugcgccuuuuugacuucaauaaacaggccaucaagagacugaaaaccccugcgcagaugagcauucagcucaucaacaaggccgugaaugcucugauuaacgaucaacuuaucaugaagaaucaucugcgggacauuauguguauccccuauugcaacuacucuaaauauugguaccucaaucacacagucacaggcaagaccucccugccucgcuguuggcuggugagcaacgggucuuaccucaaugaaacgcacuucagcgacgauaucgaacagcaggccgacaacaugauuacagagcugcuucaaaaagaguauaucgauagacagggaaagaccccgcugggccucguggaccuguuugucuucuccaccucuuuuuaccugauuagcaucuuccuucaccucguuaaaauucccacacaucggcacgugguggggaagccuugccccaaaccucaucgccugaaucacaugggaaucuguuccugcggccuguauaagcaccccggcgucccggugaaguggaaaagaugaggacuaguaauaaggaaacuguaugaaugucugugggcaggaagugaagagauccuucuguaaagguuuuuggaauuaugucugcugaauaauaaacuuuuuugaaauaauaaaucugguagaaaaaugagaucucaaaggcucuuuucagagccaccaaaaaaaaaaaaaaaaaaaaaaaaaaaaaaaaaaaaaaaaaaaaaaaaaaaaaaaaaaaaaaaaaaaaaaaaaaaaaaaaaaaaaaaaaaaaaaaaaaaaa

SEQ ID NO: 29206 - RNA, 1809 nt, Artificial Sequence
  mRNA product Design b-4 (hSL-A100) comprising derived and/or modified sequence from LASV(LASV221-NIG-2010;Clade II)__AIT17624__GPCmut5 (opt5)
aggagagucccgcagucggcguccagcggcucugcuuguucgugugugugucguugcaggccuuauucaagcuuaccaugggccagaucauuaccuucuuucaagaggugccccacgucaucgaagagguuaugaacauugugcugaucgcccucagccugcuugcuauucugaaggggaucuacaauguggccacaugcggacucuucggccuggucuccuuucuucugcucugugggagaucuugcagcacgaccuauaaaggaguguacgaacugcagacacuggagcucgacauggcgucccugaacaugaccaugccucuuucuuguacaaagaauaacagccaucacuauaucaugguuggcaaugaaaccgggcuggagcucacacugaccaacacguccauuaucaaucauaaauucugcaaccuuucugaugcucacaagaaaaaucuguacgaccaugcccucaugagcauuaucuccaccuuucaccugagcauuccgaacuucaaucaguaugaggccaugucuugugauuuuaacggaggcaagaucuccgugcaguacaaucugagccacacauaugcuauugacgccgcuaaccauugcggcaccaucgccaaugggguccuccaaacauucaugcggauggcguggggaggcucuuacaucgcccuggauuccggguguggaagcugggacugcauuaugaccucuuaccaguaucuuaucauucagaacacgacaugggaagaucacugucaguuuucccgccccagcccuaucggcuaccuggggcuccugucccaaagaacccgggacauuuauaucucucgcagacuucugggaacauucaccuggacccucagcgauuccgagggcaacgaaacacccggcggguacugccugacgcgguggaugcugaucgaggcugagcucaaguguuuuggaaauaccgccguggcuaaaugcaacgaaaagcaugacgaggaguucugcgauaugcugcgccuuuuugacuucaauaaacaggccauuagacggcugaagaccccugcgcagaugagcauccagcucauuaacaaagccguuaaugcucugaucaacgaucaacuuauuaugaagaaucaucugcgcgacaucauguguauccccuauugcaacuacucuaaguauugguaccucaaucacacagugacaggcaaaaccucccugccuagauguuggcuggucagcaacgggucuuaccucaaugaaacgcacuucagcgacgauauugaacagcaggccgacaacaugaucacagagaugcugcaaaaggaguauauggaucggcagggaaaaaccccgcuuggccugguggaccucuuuguguucuccaccucuuuuuaccugauuagcaucuuccugcaccuugucaagauucccacacaucgccacguuaucgggaaaccuugccccaagccucauagacucaaucacaugggaauuuguuccugcggccuguauaaacaccccggcgugccggugaaguggaagcggugaggacuaguaauaaggaaacuguaugaaugucugugggcaggaagugaagagauccuucuguaaagguuuuuggaauuaugucugcugaauaauaaacuuuuuugaaauaauaaaucugguagaaaaaugagaucucaaaggcucuuuucagagccaccaaaaaaaaaaaaaaaaaaaaaaaaaaaaaaaaaaaaaaaaaaaaaaaaaaaaaaaaaaaaaaaaaaaaaaaaaaaaaaaaaaaaaaaaaaaaaaaaaaaaa

SEQ ID NO: 29207 - RNA, 1809 nt, Artificial Sequence
  mRNA product Design b-4 (hSL-A100) comprising derived and/or modified sequence from LASV(LASV237-NIG-2010;Clade II)__AIT17638__GPCmut5 (opt5)
aggagagucccgcagucggcguccagcggcucugcuuguucgugugugugucguugcaggccuuauucaagcuuaccaugggccagaucauuaccuucuuucaagaggugccccacgucaucgaagagguuaugaacauugugcugaucgcccucagccugcuugcuauucugaaggggaucuacaauguggccacaugcggacucuucggccuggucuccuuucuucugcucugugggagaucuugcagcacgaccuauaaaggaguguacgaacugcagacacuggagcucgacauggcgucccugaacaugaccaugccucuuucuuguacaaagaauaacagccaucacuauaucaugguuggcaaugaaaccgggcuggagcucacacugaccaacacguccauuaucaaucauaaauucugcaaccuuucugaugcucacaagaaagaccuguacgaucaugcccucaugagcauuaucuccaccuuucaccugagcauuccgaauuucaaccaguaugaggccaugucuugugacuuuaauggaggcaagaucuccgugcaguacaaccugagccacacauaugcugucgaugccgcuaaucauugcggcaccauugccaacggggugcuccaaacauucaugcggauggcguggggaggcucuuacaucgcccuggacuccggguguggaagcugggauugcaucaugaccucuuaccaguaucuuauuauccagaauacgacaugggaagaccacugucaguuuucccgccccagcccuauuggcuaccuggggcuccugucccaaagaacccgggauaucuauauuucucgcagacuucugggaacauucaccuggacccucagcgacuccgagggcaacgaaacacccggcggguacugccugacgcgguggaugcugaucgaggcugagcucaaguguuuuggaaacaccgccguugcuaaaugcaaugaaaagcaugaugaggaguucugcgacaugcugcgccuuuuugauuucaacaaacaggccaucagacggcugaagaccccugcgcagaugagcauucagcucaucaauaaagccgugaacgcucugauuaaugaccaacuuaucaugaagaaccaucugcgcgacauuauguguauccccuauugcaauuacucuaaguauugguaccucaaccacacagucacaggcaaaaccucccugccuagauguuggcuggugagcaaugggucuuaccucaacgaaacgcacuucagcgaugacaucgaacagcaggccgauaauaugauuacagagcugcuucaaaaggaguauauggaccggcagggaaaaaccccgcugggccucguggaucuguuugucuucuccaccucuuuuuaccugaucagcauuuuccuucaccucaucaagauucccacacaucgccacaucaccgggaaaccuugccccaagccucauagacugaaccacaugggaauuuguuccugcggccuguauaaacaccccggcguuccggugaaguggaagcggugaggacuaguaauaaggaaacuguaugaaugucugugggcaggaagugaagagauccuucuguaaagguuuuuggaauuaugucugcugaauaauaaacuuuuuugaaauaauaaaucugguagaaaaaugagaucucaaaggcucuuuucagagccaccaaaaaaaaaaaaaaaaaaaaaaaaaaaaaaaaaaaaaaaaaaaaaaaaaaaaaaaaaaaaaaaaaaaaaaaaaaaaaaaaaaaaaaaaaaaaaaaaaaaaa

SEQ ID NO: 29208 - RNA, 1809 nt, Artificial Sequence
  mRNA product Design b-4 (hSL-A100) comprising derived and/or modified sequence from LASV(LASV253-NIG-2011;Clade II)__AIT17670__GPCmut5 (opt5)
aggagagucccgcagucggcguccagcggcucugcuuguucgugugugugucguugcaggccuuauucaagcuuaccaugggccagaucauuaccuucuuucaagaggugccccacgucaucgaagagguuaugaacauugugcugaucgcccucagccugcuugcuauucugaaggggaucuacaauguggccacaugcggacucuucggccuggucuccuuucuucugcucugugggagaucuugcagcacgaccuauaaaggaguguacgaacugcagacacuggagcucgacauggcgucccugaacaugaccaugccucuuucuuguacaaagaauaacagccaucacuauaucaugguuggcaaugaaaccgggcuggagcucacacugaccaacacguccauuaucaaucauaaauucugcaaccuuucugaugcucacaagaaaaaucuguacgaccaugcccucaugagcauuaucuccaccuuucaccugagcauuccgaacuucaaucaguaugaggccaugucuugugauuuuaacggaggcaagaucuccgugcaguacaaucugagccacacauaugcugucgacgccgcuaaccauugcggcaccauugccaauggggugcuccaaacauucaugcggauggcguggggaggcucuuacaucgcccuggauuccggguguggaagcugggacugcaucaugaccucuuaccaguaucuuauuauccagaacacgacaugggaagaucacugucaguuuucccgccccagcccuauuggcuaccuggggcuccugucccaaagaacccgggacaucuauauuucucgcagacuucugggaacauucaccuggacccucagcgauuccgagggcaacgaaacacccggcggguacugccugacgcgguggaugcugaucgaggcugagcucaaguguuuuggaaauaccgccguugcuaaaugcaacgaaaagcaugacgaggaguucugcgauaugcugcgccuuuuugacuucaauaaacaggccaucagacggcugaaggcgccugcccagaugagcauucagcucaucaacaaagcugugaaugcccugauuaacgaucaacuuaucaugaagaaucaucugcgcgacauuauguguauccccuauugcaacuacucuaaguauugguaccucaaucacacagucaccggcagaacaucccugccucgguguuggcuggugagcaacgggucuuaccucaaugaaacccacuucagcgacgauaucgaacagcaggcugacaacaugauuacggagcugcuucaaaaagaguauaucgaucgccagggaaagacaccgcugggccucguggaccuguuugucuucuccaccucuuuuuaccugauuagcaucuuccuucaccucguuaaaauucccacccauagacacaucauugggaagccuugccccaaaccucaucggcugaaucacaugggaaucuguuccugcggccuguauaagcaccccggcgugccggugaaauggaagcgcugaggacuaguaauaaggaaacuguaugaaugucugugggcaggaagugaagagauccuucuguaaagguuuuuggaauuaugucugcugaauaauaaacuuuuuugaaauaauaaaucugguagaaaaaugagaucucaaaggcucuuuucagagccaccaaaaaaaaaaaaaaaaaaaaaaaaaaaaaaaaaaaaaaaaaaaaaaaaaaaaaaaaaaaaaaaaaaaaaaaaaaaaaaaaaaaaaaaaaaaaaaaaaaaaa

SEQ ID NO: 29209 - RNA, 1809 nt, Artificial Sequence
  mRNA product Design b-4 (hSL-A100) comprising derived and/or modified sequence from LASV(LASV254-NIG-2011;Clade II)__AIT17674__GPCmut5 (opt5)
aggagagucccgcagucggcguccagcggcucugcuuguucgugugugugucguugcaggccuuauucaagcuuaccaugggccagaucauuaccuucuuucaagaggugccccacgucaucgaagagguuaugaacauugugcugaucgcccucagccugcuugcuauucugaaggggaucuacaauguggccacaugcggacucuucggccuggucuccuuucuucugcucugugggagaucuugcagcacgaccuauaaaggaguguacgaacugcagacacuggagcucgacaugaccaaccugaauaugacaaugccucuuuccuguaccaagaacaauucucaucacuauaucaugguuggcaacgaaacagggcuggagcucacccugacgaauaccagcauuaucaaccauaaauucugcaaucuuuccgaugcgcacaagaaaaaccuguacaaucaugcucucaugucuauuaucagcacauuucaccuguccauuccgaacuucaaucaguaugaggccaugagcugugacuuuaacggaggcaagaucucugugcaguacaaucugucccacagcuaugccgucgaugcugccaaccauugcggcaccauugcuaacggggugcuccaaacauucaugcggauggccuggggaggcucuuacaucgcgcuggacuccggguguggaaauugggauugcaucaugaccagcuaccaguaucuuauuauccagaacacgacaugggaagaccacugucaguuuucucgccccuccccuauuggcuaccuggggcuccugagccaaagaacccgggauaucuauauuucccgcagacuucugggaacauucaccuggacccucucugacagcgagggcaaugaaacacccggcggguacugccugacgcgguggaugcugaucgaggccgagcucaaguguuuuggaaacaccgcuguugccaaaugcaaugaaaagcaugaugaggaguucugcgacaugcugcgccuuuuugauuucaacaaacaggcuaucagacggcugaagaccccugcccaggcgaauauucagcucaucaacaaagccgugaaugcucugauuaacgaccaacuuaucaugaagaaucaucugcgcgauauuauguguauccccuauugcaacuacuccaaguauugguaccucaaucacacagucacaggcaaaaccagccugccuagauguuggcuggugucuaacggguccuaccucaaugaaacgcacuucagcgacgacaucgaacagcaggccgauaacaugauuacagagcugcuucaaaaggaguauauggaccggcagggaaaaaccccgcugggccucguggaucuguuugucuucucuaccagcuuuuaccugaucuccauuuuccuucaccucguuaagauccccacacaucgccacgugauugggaaaccuugccccaagccucauagacugaaccacaugggaaucuguucuugcggccuguauaaacaccccggcgugccggucaaguggaagcggugaggacuaguaauaaggaaacuguaugaaugucugugggcaggaagugaagagauccuucuguaaagguuuuuggaauuaugucugcugaauaauaaacuuuuuugaaauaauaaaucugguagaaaaaugagaucucaaaggcucuuuucagagccaccaaaaaaaaaaaaaaaaaaaaaaaaaaaaaaaaaaaaaaaaaaaaaaaaaaaaaaaaaaaaaaaaaaaaaaaaaaaaaaaaaaaaaaaaaaaaaaaaaaaaa

SEQ ID NO: 29210 - RNA, 1809 nt, Artificial Sequence
  mRNA product Design b-4 (hSL-A100) comprising derived and/or modified sequence from LASV(Nig08-A19;Clade III)__ADU56618__GPCmut5 (opt5)
aggagagucccgcagucggcguccagcggcucugcuuguucgugugugugucguugcaggccuuauucaagcuuaccaugggccagaucgugaccuucuuucaagaggucccccacguuauugaagaggugaugaacaucgugcugauugcccucagcauccuggcuauucuuaaggggcuguacaauaucgccacaugcggacucaucggccuggucacguuccuucugcucuccgggagaucuuguagcaugaccuauaaaggaguguacgaacugcagacacuggagcucaacaugaauacccugaacaugacaaugccucuuuccugcaccaagaauaacucucaucacuauauuaugguuggcaaugaaacagggcuggagcucacccugacgaacaccagccuucugcaucacaaauuuuguaaucucuccgacgcgcauaagaaaaaccuguacgaucacacacugaugucuaucauuagcaccuuccaccucuccaucccgaauuuuaaccaguaugaggcuaugagcugcgacuucaauggaggcaagauuacagugcaguacaaccugucucauuccuaugccaucgaugccgcuaaucacuguggcaccgucgccaacggggugcuucaaacguuuaugcggauggcuuggggaggcagcuacauugcccuggacucugggugcggaaagugggauuguaucaugacauccuaccaguaucucaucauucagaacaccacaugggaagaccauugccaguucagccgccccucuccuaucggcuaccuggggcuucugucccaaagaacccgggauauuuauaucagccgcagacuccugggaaccuuuacauggacgcuguccgacucugagggcaaugaaacccccggcggguacugucucacacgguggaugcugauugaggcggagcuuaaaugcuucggaaacaccgccguugcuaaguguaaugaaaaacacgaugaggaauuuugcgacaugcugcgccucuucgauuuuaacaagcaggccaucagacggcugaaagcuccugcccagaugagcauccagcuuauuaauaaggcggugaacgcccugaucaaugaccaacucauuaugaagaaccaucugcgcgauaucaugugcauucccuauuguaauuacuccaaauauugguaccugaaccacacaagcaccggcagaacgucucucccucggugcuggcuggucuccaaugggagcuaccuuaacgagacacacuucucugacgacaucgaacagcaggcugauaauaugaucaccgagaugcugcaaaaggaguaucucgaccgccagggaaaaaccccgcugggccugguggaucuuuucguguuuagcacauccuucuaccucauuucuaucuuucugcaucuggucaagauucccacccacagacauaucguugggaaaccuugucccaagccucaccggcucaaccacaugggaauuugcagcuguggccuguauaaacagcccggcgugccggugcgcuggaagagaugaggacuaguaauaaggaaacuguaugaaugucugugggcaggaagugaagagauccuucuguaaagguuuuuggaauuaugucugcugaauaauaaacuuuuuugaaauaauaaaucugguagaaaaaugagaucucaaaggcucuuuucagagccaccaaaaaaaaaaaaaaaaaaaaaaaaaaaaaaaaaaaaaaaaaaaaaaaaaaaaaaaaaaaaaaaaaaaaaaaaaaaaaaaaaaaaaaaaaaaaaaaaaaaaa

SEQ ID NO: 29211 - RNA, 1812 nt, Artificial Sequence
  mRNA product Design b-4 (hSL-A100) comprising derived and/or modified sequence from LASV(G1180-SLE-2010;Clade IV)__AIT17168__GPCmut5 (opt5)
aggagagucccgcagucggcguccagcggcucugcuuguucgugugugugucguugcaggccuuauucaagcuuaccaugggccagaucgugaccuucuuucaagaggucccccacguuauugaagaggugaugaacaucgugcugauugcccucagcauccuggcuguccuuaaggggcuguacaauuucgccacaugcggacucgugggccugcuuacguuucugcuccugugugggagauccugcaccgcgucucgguauaaaggaguuuacgaacugcagacacucgagcugaacauggaaacccuuaauaugacaaugccucugagcuguaccaagaacaauucccaucacuauauuauggugggcaacgagacagggcucgagcugacccuuacgaauaccucuaucaucaaccauaaauucugcaaucugagcgacgcucacaagaaaaaccucuacgaucaugcccugauguccauuaucucuacauuucaccugagcauuccgaauuucaaccaguaugaagccauguccugugacuuuaauggaggcaagaucagcguccaguacaaccucucucacuccuaugcuggcgaugccgcuaaucauugcgggaccguggccaacggaguucugcaaacauucaugcgcauggcguggggcgggagcuacauugcccuugacucuggauguggcuccugggauugcaucaugaccagcuaccaguaucugauuauccagaacacgacaugggaggaccacugucaguuuucuagacccuccccuaucggguaccucggacugcuuagccaacggacccgcgauauuuauaucuccagacggcugcucggcacauucaccuggacccugucugacagcgaaggcaaggauacacccgggggauacugccugacgcgcuggaugcucauugaggcugagcugaaauguuuuggcaauaccgccguggcuaagugcaacgaaaaacaugacgaggaguucugcgauaugcuuagacuguuugacuucaauaagcaggccauccagcggcucaaagcgccugcccagauguccauucaacugaucaacaaggcugucaaugcccuuaucaacgaucagcugauuaugaagaaucaccuccgcgacaucauguguauucccuauugcaacuacagcaaauauugguaccugaaucacacaaccacagggaagaccucucugccuaaauguuggcucguguccaacggaagcuaccugaaugaaacgcauuucucugacgauaucgaacagcaagcugacaacaugauuacagagaugcuucagaaggaguauauggaaagacagggcaaaaccccgcuggggcucguggaucuguuugucuucagcaccuccuuuuaccugaucucuaucuuccuucaccucguuaagauucccacacaucggcacaucgugggaaaaagcugcccuaagccccaucgccugaaucacaugggcauuuguuccugcggccuguauaagcagccuggggugcccgucaaauggaagagaugaggacuaguaauaaggaaacuguaugaaugucugugggcaggaagugaagagauccuucuguaaagguuuuuggaauuaugucugcugaauaauaaacuuuuuugaaauaauaaaucugguagaaaaaugagaucucaaaggcucuuuucagagccaccaaaaaaaaaaaaaaaaaaaaaaaaaaaaaaaaaaaaaaaaaaaaaaaaaaaaaaaaaaaaaaaaaaaaaaaaaaaaaaaaaaaaaaaaaaaaaaaaaaaaa

SEQ ID NO: 29212 - RNA, 1812 nt, Artificial Sequence
  mRNA product Design b-4 (hSL-A100) comprising derived and/or modified sequence from LASV(G1442-SLE-2011;Clade IV)__AIT17180__GPCmut5 (opt5)
aggagagucccgcagucggcguccagcggcucugcuuguucgugugugugucguugcaggccuuauucaagcuuaccaugggccagaucgugaccuucuuucaagaggucccccacguuauugaagaggugaugaacaucgugcugauugcccucagcauccuggcuguccuuaaggggcuguacaauguggccacaugcggacucauuggccugguuacguuccuucugcucugugggagauccugcaccacaacccuguauaaaggaguguacgaacugcagacacucgagcugaacauggaaacccuuaauaugacaaugccucugucuuguaccaagaacaauagccaucacuauauccgggucggcaacgagacggggcucgagcugacccuuacaaauaccuccaucauuaaccauaaauuuugcaaucugucugacgcgcacaagaaaaaccucuacgaucaugcucugaugagcaucauuuccacauuccaccugucuaucccgaauuuuaaccaguaugaagccaugagcugugacuucaauggaggcaagauuuccgugcaguacaaccucagccacucuuaugccggcgaugcugccaaucauugcgggaccguugcuaacggagugcugcaaacguuuaugcgcauggccuggggcggguccuacaucgcgcuugacagcggauguggcaacugggauugcauuaugacaucuuaccaguaucugaucauccagaauaccacaugggacgaucacugucaguucuccagacccagcccuauuggguaccucggacugcuuucucaacggacccgcgacgucuauaucuccagacggcugcucggcaccuuuacauggacgcugagcgauuccgagggcaaggacacccccgggggauacugccugacacgcuggaugcucauugaagccgagcugaaauguuucggcaacaccgcuguggccaagugcaaugagaaacaugaugaagaguuuugcgacaugcuuagacuguucgauuuuaacaagcaggcuauccagcggcucaaagccccugcgcagaugucuauucaacugaucaauaaggccgugaacgcucuuaucaaugaccagcugauuaugaagaaccaccuccgcgacaucauguguauucccuauugcaauuacagcaaauauugguaccugaacaauacagccaccgggaagacgucccugccuaaauguuggcucaucagcaacggaucuuaccugaaugaaacacacuucuccgaugacauugagcaggaagcugauaacaugaucaccgagaugcuucaaaaggaguauauggaaagacagggcaaaaccccgcuggggcucgucgaccuguucguuuuuagcacaucuuucuaccugaucagcauuuuucuucaucucgugaagauccccacccaccggcauauugugggaaaauccugcccuaagccccaccgccugaaucauaugggcaucuguucuugcggccuguauaagcagccugggguccccgugagauggaaacggugaggacuaguaauaaggaaacuguaugaaugucugugggcaggaagugaagagauccuucuguaaagguuuuuggaauuaugucugcugaauaauaaacuuuuuugaaauaauaaaucugguagaaaaaugagaucucaaaggcucuuuucagagccaccaaaaaaaaaaaaaaaaaaaaaaaaaaaaaaaaaaaaaaaaaaaaaaaaaaaaaaaaaaaaaaaaaaaaaaaaaaaaaaaaaaaaaaaaaaaaaaaaaaaaa

SEQ ID NO: 29213 - RNA, 1812 nt, Artificial Sequence
  mRNA product Design b-4 (hSL-A100) comprising derived and/or modified sequence from LASV(G3010-SLE-2013;Clade IV)__AIT17344__GPCmut5 (opt5)
aggagagucccgcagucggcguccagcggcucugcuuguucgugugugugucguugcaggccuuauucaagcuuaccaugggccagaucgugaccuucuuucaagaggucccccacguuauugaagaggugaugaacaucgugcugauugcccucagcauccuggcuguccuuaaggggcuguacaauuucgccacaugcggacucgugggccugguuacguuucuucugcucugugggagauccugcaccacaucucuguauaaaggaguguacgaacugcagacccucgagcugaacauggaaacacuuaauaugaccaugccucugagcuguacaaagaacaauucccaucacuauauuauggucggcaacgagaccgggcucgagcugacgcuuaccaauacaucuaucaucaaccauaaauucugcaaucugagcgacgcgcacaagaaaaaccucuacaaucaugcucugauguccauuaucucuaccuuucaccugagcauuccgaacuucaaucaguaugaagccauguccugugauuuuaacggaggcaagaucagcgugcaguacaaucucucucacuccuaugccggcgacgcugccagccauugcgggacaguugcuaacggagugcugcaaaccuucaugcggauggccuggggcgggucuuacauugcgcuugauuccggauguggcaagugggacugcaucaugacgagcuaccaguaucugauuauccagaacacaaccugggaggaucacugucaguuuucucgccccuccccuaucggguaccucggacugcuuagccaaagaacacgggacauuuauaucucccgcagacugcucggcaccuucaccuggacacugucugauagcgaaggcaaagacacgcccgggggauacugccugacccgguggaugcucauugaggccgagcugaaguguuuuggcaauacagcugucgccaaaugcaacgaaaagcaugaugaggaguucugcgacaugcuucgccuguuugauuucaauaaacaggcuauccagagacucaagaccccugcccagauguccauucaacugaucaacaaggcggugaaugcccuuaucaacgaccagcugauuaugaaaaaucaccuccgggauaucauguguauucccuauugcaacuacagcaaguauugguaccugaaucacacaaccacggggaaaacaucucugccuaaguguuggcucguguccaacggaagcuaccugaaugaaacccauuucucugacgacaucgaacagcaagcugauaacaugauuaccgagaugcuucagaaagaguauauggaacgccagggcaagacaccgcuggggcucgucgaccuguuuguuuucagcaccuccuuuuaccugaucucuaucuuccuucaccucgugaaaauucccacacauagacacaucgugggaaagagcugcccuaagccccaucggcugaaucacaugggcauuuguuccugcggccuguauaaacagccugggguccccgugcgcuggaagagaugaggacuaguaauaaggaaacuguaugaaugucugugggcaggaagugaagagauccuucuguaaagguuuuuggaauuaugucugcugaauaauaaacuuuuuugaaauaauaaaucugguagaaaaaugagaucucaaaggcucuuuucagagccaccaaaaaaaaaaaaaaaaaaaaaaaaaaaaaaaaaaaaaaaaaaaaaaaaaaaaaaaaaaaaaaaaaaaaaaaaaaaaaaaaaaaaaaaaaaaaaaaaaaaaa

SEQ ID NO: 29214 - RNA, 1812 nt, Artificial Sequence
  mRNA product Design b-4 (hSL-A100) comprising derived and/or modified sequence from LASV(G502-SLE-2009;Clade IV)__AIT17126__GPCmut5 (opt5)
aggagagucccgcagucggcguccagcggcucugcuuguucgugugugugucguugcaggccuuauucaagcuuaccaugggccagaucgugaccuucuuucaagaggucccccacguuauugaagaggugaugaacaucgugcugauugcccucagcauccuggcuguccuuaaggggcuguacaauuucgccacaugcggacucgugggccugcuuacguuucugcuccugugugggagauccugcaccacaggacuguauaaaggcguuuacgaacuccagacccuggagcuuaacauggaaacacugaauaugaccaugccucucucuuguacaaagaacaauagccaucacuauauuaugguggggaacgagaccggacuggagcuuacgcugaccaauacauccaucaucaaccauaaauucugcaaucucucugacgcgcacaagaaaaaccuguacgaucaugcucugaugagcauuaucuccaccuuucaccucucuauuccgaauuucaaccaguaugaagccaugagcugugacuuuaauggcggcaagaucuccguccaguacaaccugagccacucuuaugccggggaugcugccgaccauugcggaacaguggcuaauggcguucuucaaaccuucaugcggauggccuggggaggguccuacauugcgcuggauagcggcugugggcgcugggacugcaucaugacgucuuaccaguaucucauuauccagaacacaaccugggaggaucacugucaguuuuccagacccagcccuaucggauaccugggccuucugucucaacggacacgcgacauuuauaucuccagacggcuccugggcaccuucaccuggacacugagcgauuccgaagggaaggacacgcccggaggcuacugccucacccgcuggaugcugauugaggccgagcuuaaauguuuugggaacacagcuguggccaagugcaaugaaaaacaugaugaggaguucugcgacaugcugagacucuuugauuucaacaagcaggcuauccagcggcugaaagccccugcgcagaugucuauucaacuuaucaauaaggccgucaacgcucugaucaaugaccagcucgugaugaagaaccaucugcgcgacauuauguguauccccuauugcaauuacagcagauauugguaccugaaccacaccacaaccggacggacgucccucccuaaauguuggcuggugagcaauggcucuuaccuuaacgaaacacacuucuccgaugacauugaacagcaagccgauaauaugaucaccgagaugcugcagaaggaguauauggaacgccaggggaaaaccccgcucggacuggucgaccuguuuguuuucagcacaucuuuuuaccuuauuagcaucuuccuccaccuggugaagauccccacccauagacacauugugggcaaauccugcccuaagccccaucggcugaaccacaugggcaucuguucuugcgggcucuauaaacagccuggaguccccgugaaguggaagcgcugaggacuaguaauaaggaaacuguaugaaugucugugggcaggaagugaagagauccuucuguaaagguuuuuggaauuaugucugcugaauaauaaacuuuuuugaaauaauaaaucugguagaaaaaugagaucucaaaggcucuuuucagagccaccaaaaaaaaaaaaaaaaaaaaaaaaaaaaaaaaaaaaaaaaaaaaaaaaaaaaaaaaaaaaaaaaaaaaaaaaaaaaaaaaaaaaaaaaaaaaaaaaaaaaa

SEQ ID NO: 29215 - RNA, 1812 nt, Artificial Sequence
  mRNA product Design b-4 (hSL-A100) comprising derived and/or modified sequence from LASV(G733-SLE-2010;Clade IV)__AIT17154__GPCmut5 (opt5)
aggagagucccgcagucggcguccagcggcucugcuuguucgugugugugucguugcaggccuuauucaagcuuaccaugggccagaucgugaccuucuuucaagaggucccccacguuauugaagaggugaugaacaucgugcugauugcccucagcauccuggcuguccuuaaggggcuguacaauuucgccacaugcggaauugugggccucguuuccuuucugcuucugugugggagaucuugcacgaccagccucuauaaaggaguguacgaacugcagacacuggagcucaacauggaaacccugaauaugacaaugccucuuuccuguaccaagaacaauucucaucacuauaucauggucggcaacgagacagggcuggagcucacccugacgaauaccagcaucauuaaccauaaauucugcaaucuuuccgacgcgcacaagaaaaaccuguacgaucaugcucucaugucuaucauuagcacauuucaccuguccaucccgaauuucaaccaguaugaagccaugagcugugacuuuaauggaggcaagauuucugugcaguacaaccugucccacagcuaugccggcgaugcugccaaucauugcgggaccaucgcuaacggaguucuccaaacauucaugcggauggccuggggcgggucuuacauugcgcuggacuccggaugugaucgcugggacugcaucaugaccagcuaccaguaucuuaucauucagaacacgacaugggaggaucacugucaguuuucuagacccuccccuaucggcuaccuggggcuccugagccaacggacccgcgacauuuauaucuccagacggcuucugggaacauucaccuggacccucucugauagcgaaggcaaggacacacccggcggguacugccugacgcgcuggaugcugauugaggccgagcucaaauguuuuggaaauaccgcuguggccaagugcaacgaaaaacaugaugaggaguucugcgacaugcugagacuuuuugauuucaauaagcaggcuauccagcggcugaaagccccugcgcagauguccauccaacucauuaacaaggccgucaaugcucugaucaacgaccagcuuauuaugaagaaucaucugcgcgacaucauguguauucccuauugcaacuacagcaaauauugguaccucaaucacacaaccacaggcaagaccucucugccuaaauguuggcugguguccaacgggagcuaccucaaugaaacgcacuucucugaugacaucgaacagcaagccgauaacaugaucacagagaugcugcagaaggaguauauggaaagacagggaaaaaccccgcuuggccugguggaccucuuugucuucagcaccuccuuuuaccugauuucuaucuuccugcaccuuguuaagauucccacacaucggcacgugguggggaaaagcugcccuaagccccaucgccucaaucacaugggaaucuguuccugcggccuguauggccagccugggguccccgugaaguggaaaagaugaggacuaguaauaaggaaacuguaugaaugucugugggcaggaagugaagagauccuucuguaaagguuuuuggaauuaugucugcugaauaauaaacuuuuuugaaauaauaaaucugguagaaaaaugagaucucaaaggcucuuuucagagccaccaaaaaaaaaaaaaaaaaaaaaaaaaaaaaaaaaaaaaaaaaaaaaaaaaaaaaaaaaaaaaaaaaaaaaaaaaaaaaaaaaaaaaaaaaaaaaaaaaaaaa

SEQ ID NO: 29216 - RNA, 1812 nt, Artificial Sequence
  mRNA product Design b-4 (hSL-A100) comprising derived and/or modified sequence from MOPV/LASV reassortant(IGS-1;Clade IV)__AFY05576__GPCmut5 (opt5)
aggagagucccgcagucggcguccagcggcucugcuuguucgugugugugucguugcaggccuuauucaagcuuaccaugggccagaucgugaccuucuuucaagaggucccccacguuauugaagaggugaugaacaucgugcugauugcccucagcguccuggcugugcuuaaggggcuguacaauuucgccacaugcggacucguuggccuggugacguuucuucugcucugugggagauccugcaccacaucucuguauaaaggagucuacgaacugcagacccucgagcugaacauggaaacacuuaauaugaccaugccucugagcuguacaaagaacaauucccaucacuauaucauggugggcaacgagaccgggcucgagcugacgcuuaccaauacaucuauuaucaaccauaaauucugcaaucugagcgacgcgcacaagaaaaaccucuacgaucaugcucugauguccaucauuucuaccuuucaccugagcaucccgaauuucaaccaguaugaagccauguccugugacuuuaauggaggcaagauuagcguucaguacaaccucucucacuccuaugccggcgaugcugccaaucauugcgggacaguggcuaacggaguccugcaaaccuucaugcggauggccuggggcgggagcuacaucgcgcuugacucuggauguggcaacugggauugcauuaugacguccuaccaguaucugaucauucagaauacaaccugggaggaccacugucaguuuagccgccccucuccuaucggguaccucggacugcuuucccaaagaacacgggauaucuauauuagccgcagacugcucggcaccuucaccuggacacuguccgacucugaaggcgaggauacgcccgggggauacugccugacccgguggaugcucaucgaggccgaacugaaguguuuuggcaacacagcuguggccaaaugcaaugagaagcaugacgaagaguucugcgauaugcuucgccuguuugacuucaacaaacaggcuauucagagacucaaggccccugcgcagaugagcauccaacugauuaauaaagccgugaacgcucuuaucaaugaucagcugaucaugaagaaccaccuccgggacauuauguguauccccuauugcaauuacuccaaguauugguaccugaaccacaccacaaccgggcgcacgagccugccuaaauguuggcucgucucuaauggauccuaccugaacgaaacacauuucagcgacgauauugagcagcaagccgacaauaugaucaccgagaugcuucagaaggaauauauggagagacagggcaaaaccccgcuggggcucguugaucuguuuguguucucuaccagcuuuuaccugauuuccaucuuccuucaccucgugaagauccccacacaucggcacauugucggaaaaucuugcccuaagccccaucgccugaaccacaugggcaucuguagcugcggccuguauaaacagccuggggugcccguuaaguggaagagaugaggacuaguaauaaggaaacuguaugaaugucugugggcaggaagugaagagauccuucuguaaagguuuuuggaauuaugucugcugaauaauaaacuuuuuugaaauaauaaaucugguagaaaaaugagaucucaaaggcucuuuucagagccaccaaaaaaaaaaaaaaaaaaaaaaaaaaaaaaaaaaaaaaaaaaaaaaaaaaaaaaaaaaaaaaaaaaaaaaaaaaaaaaaaaaaaaaaaaaaaaaaaaaaaa

SEQ ID NO: 29217 - RNA, 1812 nt, Artificial Sequence
  mRNA product Design b-4 (hSL-A100) comprising derived and/or modified sequence from LASV(LM765-SLE-2012;Clade IV)__AIT17814__GPCmut5 (opt5)
aggagagucccgcagucggcguccagcggcucugcuuguucgugugugugucguugcaggccuuauucaagcuuaccaugggccagaucgugaccuucuuucaagaggucccccacguuauugaagaggugaugaacaucgugcugauugcccucagcauccuggcuguccuuaaggggcuguacaauuucgccacaugcggacucgugggccugguuacguuucuucugcucugugggagauccugcaccacaucucuguauaaaggaguguacgaacugcagacccucgagcugaacauggaaacacuuaauaugaccaugccucugagcuguacaaagaacaauucccaucacuauauuauggucggcaacgagaccgggcucgagcugacgcuuaccaauacaucuaucaucgaccauaaauucugcaaccugagcgaugcgcaccggaagaaucucuacgaccaugcucugauguccauuaucucuaccuuucaccugagcauuccgaacuucaaucaguaugaagccauguccugugauuuuaacggaggcaaaaucagcgugcaguacaaucucucucacuccuaugccaaggacgcugccgaucauugcggcacaguugcuaacggggugcugcaaaccuucaugcgcauggccuggggaggcagcuacauugcgcuugacucuggguguggaagaugggauugcaucaugacguccuaccaguaucugauuauccagaauacaaccugggaggaccacugucaguuuagccggcccucuccuaucggcuaccucgggcugcuuucccaacgcacaagagauauuuauaucagccggcgccugcucggaaccuucaccuggacacuguccgacucugaaggcaaggauacgcccggcggguacugccugaccagauggaugcucauugaggccgagcugaaauguuuuggaaacacagcugucgccaagugcaacgaaaaacaugacgaggaguucugcgauaugcuucggcuguuugacuucaauaagcaggcuauccagcgccucaaagccccugcgcagaugagcauucaacugaucaacaaggccgugaaugcucuuaucaacgaccagcugauuaugaagaaucaccucagagauaucauguguauucccuauugcaacuacuccaaauauugguaccugaaucacaccacaaccggcaagacgagccugccuaaauguuggcucgugucuaacggguccuaccugaaugaaacacauuucagcgacgauaucgaacagcaagccgacaacaugauuaccgagaugcuucagaaggaguauauggaacggcagggaaaaaccccgcugggccucgucgaucuguuuguuuucucuaccagcuuuuaccugaucuccaucuuccuucaccucgugaagauucccacacaucgccacaucguggggaaaccuugccccaagccucauagacugaaucacaugggaauuuguucuugcggccuguauaagcagcccggcgucccggugaaauggaagcggugaggacuaguaauaaggaaacuguaugaaugucugugggcaggaagugaagagauccuucuguaaagguuuuuggaauuaugucugcugaauaauaaacuuuuuugaaauaauaaaucugguagaaaaaugagaucucaaaggcucuuuucagagccaccaaaaaaaaaaaaaaaaaaaaaaaaaaaaaaaaaaaaaaaaaaaaaaaaaaaaaaaaaaaaaaaaaaaaaaaaaaaaaaaaaaaaaaaaaaaaaaaaaaaaa

SEQ ID NO: 29218 - RNA, 1812 nt, Artificial Sequence
  mRNA product Design b-4 (hSL-A100) comprising derived and/or modified sequence from LASV(LM776-SLE-2012;Clade IV)__AIT17824__GPCmut5 (opt5)
aggagagucccgcagucggcguccagcggcucugcuuguucgugugugugucguugcaggccuuauucaagcuuaccaugggccagaucgugaccuucuuucaagaggucccccacguuauugaagaggugaugaacaucgugcugauugcccucagcauccuggcuguccuuaaggggcuguacaauuucgccacaugcggacucgugggccugguuacguuucuucugcucugugggagauccugcaccacaucuguguauaaaggagucuacgaacugcagacccuggagcucaacauggaaacacugaauaugaccaugccucuuagcuguacaaagaacaauucccaucacuauauuauggugggcaacgagaccgggcuggagcucacgcugaccaauacaucuaucaucaaccauaaauucugcaaucuuagcgacgcgcacaagaaaaaccuguacgaucaugcucucauguccauuaucucuaccuuucaccugagcauuccgaauuucaaccaguaugaagccauguccugugacuuuaauggaggcaagaucagcguucaguacaaccugucucacuccuaugccggcgaugcugccaaucauugcgggacaguggcuaacggaguccuccaaaccuucaugcggauggccuggggcgggagcuacauugcgcuggacucuggauguggcaagugggauugcaucaugacguccuaccaguaucuuauuauccagaacacaaccugggaggaccacugucaguuuagccgccccucuccuaucggguaccugggacuccugucccaaagaacacgggauauuuauaucagccgcagacuucugggcaccuucaccuggacacucuccgacucugaaggcaaagauacgcccgggggauacugccugacccgguggaugcugauugaggccgagcucaaguguuuuggcaauacagcuguggccaaaugcaacgaaaagcaugacgaggaguucugcgauaugcugcgccuuuuugacuucaauaaacaggcuauccagagacugaaggccccugcgcagaugagcauucaacucaucaacaaggccgugaaugcucugaucaacgaucagcuuauuaugaaaaaucaucugcgggacaucauguguauucccuauugcaacuacuccaaguauugguaccucaaucacaccacaaccgggaaaacgagccugccuaaguguuggcuggucucuaacggauccuaccucaaugaaacacacuucagcgacgauaucgaacagcaagccgacaacaugauuaccgagaugcugcagaaagaguauauggaacgccagggcaagaccccgcuugggcugguugaucucuuuguguucucuaccagcuuuuaccugaucuccaucuuccugcaccuugugaaaauucccacacauagacacaucgucggaaagucuugcccuaagccccaucggcucaaucacaugggcauuuguagcugcggccuguauaaacagccuggggugcccguucgcuggaagagaugaggacuaguaauaaggaaacuguaugaaugucugugggcaggaagugaagagauccuucuguaaagguuuuuggaauuaugucugcugaauaauaaacuuuuuugaaauaauaaaucugguagaaaaaugagaucucaaaggcucuuuucagagccaccaaaaaaaaaaaaaaaaaaaaaaaaaaaaaaaaaaaaaaaaaaaaaaaaaaaaaaaaaaaaaaaaaaaaaaaaaaaaaaaaaaaaaaaaaaaaaaaaaaaaa

SEQ ID NO: 29219 - RNA, 1812 nt, Artificial Sequence
  mRNA product Design b-4 (hSL-A100) comprising derived and/or modified sequence from LASV(Mad39;Clade IV)__ANH09722__GPCmut5 (opt5)
aggagagucccgcagucggcguccagcggcucugcuuguucgugugugugucguugcaggccuuauucaagcuuaccaugggccagaucgugaccuucuuucaagaggucccccacguuauugaagaggugaugaacaucgugcugauugcccucagcauccuggcuguccuuaaggggcuguacaauguggccacaugcggacucauuggccugguuacguuccuucugcucugugggagauccugcaccacaacccuguauaaaggaguguacgaacugcaggcgcucgagcugaacauggaaacacuuaauaugaccaugccucugucuuguacaaagaacaauagccaucacuauauccgggucggcaacgagaccgggcucgagcugacgcuuaccaauacaucccugaucaaccauaaauuuugcaaucucucugacgcucacaagaaaaaccuguacgaucaugcccugaugagcauuaucuccaccuuccaccucucuauuccgaauuuuaaccaguaugaagccaugagcugugacuucaaugauggaaagaucuccgugcaguacaaccugagccacacauaugcuggcgacaccgccaaucauugcggcacgguugcuaacggggugcuucaaacauuuaugcgcauggccuggggaggcucuuacauugcgcuggauuccggguguggaggcugggacugcaucaugaccagcuaccaguaucucauuauccagaacacaaccugggaggaucacugucaguucucuagacccuccccuaucggguaccugggacuucugagccaacggacccgcgacauuuauaucucuagacggcuccugggcacauuuacguggacccuguccgauagcgaaggcaaggacacacccgggggauacugccucacccgcuggaugcugauugaggccgagcuuaaauguuucggcaauacagcugucgccaagugcaacgaaaaacaugaugaggaauuuugcgacaugcugagacucuucgauuuuaauaagcaggcuauccagcggcugaaagccccugcgcagauguccauucaacuuaucaacaaggccgugaaugcucugaucaacgaccagcucauuaugaagaaucaucugcgcgacaucauguguauucccuauugcaacuacucuaaauauugguaccugaaucacaccgugacggggaagacaagccucccuaaauguuggcuggucuccaacggaagcuaccuuaaugagacccacuucucugaugacaucgaacagcaagccgauaacaugauuaccgagaugcugcagaaggaguauauggaaagacagggcaaaacaccgcucgggcugguugaccuguucguguuuuccaccagcuucuaccuuaucucuaucuuucuccaccuggugaagauucccacacaucggcacgucgugggaaaaccuugccccaagccucaucgccugaaucacaugggcaucuguagcugcggcuucuauaagcagcccgggguuccggugagauggaaacggugaggacuaguaauaaggaaacuguaugaaugucugugggcaggaagugaagagauccuucuguaaagguuuuuggaauuaugucugcugaauaauaaacuuuuuugaaauaauaaaucugguagaaaaaugagaucucaaaggcucuuuucagagccaccaaaaaaaaaaaaaaaaaaaaaaaaaaaaaaaaaaaaaaaaaaaaaaaaaaaaaaaaaaaaaaaaaaaaaaaaaaaaaaaaaaaaaaaaaaaaaaaaaaaaa

SEQ ID NO: 29220 - RNA, 1812 nt, Artificial Sequence
  mRNA product Design b-4 (hSL-A100) comprising derived and/or modified sequence from LASV(Z0947-SLE-2011;Clade IV)__AIT17840__GPCmut5 (opt5)
aggagagucccgcagucggcguccagcggcucugcuuguucgugugugugucguugcaggccuuauucaagcuuaccaugggccagaucgugaccuucuuucaagaggucccccacguuauugaagaggugaugaacaucgugcugauugcccucagcauccuggcuguccuuaaggggcuguacaauuucgccacaugcggacucgugggccugguuacguuucuucugcucugugggagauccugcaccauuucucuguauaaaggaguguacgaacugcagacacucgagcugaacauggaaacccuuaauaugacaaugccucugagcuguaccaagaacaauucccaucacuauaucauggucggcaacgagacagggcucgagcugacccuuacgaauaccucuaucauuaaccauaaauucugcaaucugagcgacgcgcacaagaaaaaccucuacgaucaugcucugauguccaucauuucuacauuucaccugagcaucccgaauuucaaccaguaugaagccauguccugugacuuuaauggaggcaagauuagcgugcaguacaaccucucucacuccuaugccggcgaugcugccaaucauugcgggaccguugcuaacggagugcugcaaacauucaugcggauggccuggggcgggagcuacaucgcgcuugacucuggaugugaucgcugggacugcauuaugaccuccuaccaguaucugaucauccagaacacgacaugggaggaucacugucaguuuagcagacccucuccuauuggcuaccucgggcugcuuucccaacggacccgcgacaucuauauuagcagacggcugcucggaacauucaccuggacccuguccgauucugaaggcaaggacacacccggcggguacugccugacgcgcuggaugcucaucgaggccgagcugaaauguuuuggaaauaccgcugucgccaagugcaacgaaaaacaugaugaggaguucugcgacaugcuuagacuguuugauuucaauaagcaggcuauucagcggcucaaagccccugcgcagaugagcauccaacugaucaacaaggccgugaaugcucuuauuaacgaccagcugaucaugaagaaucaccuccgcgacauuauguguauccccuauugcaacuacuccaaauauugguaccugaaucacacaaccacaggcaagaccagccugccuaaauguuggcucgugucuaacggguccuaccugaaugaaacgcauuucagcgaugacauugaacagcaagccgauaacaugaucacagagaugcuucagaaggaguauauggaaagacagggaaaaaccccgcugggccucgucgaccuguuuguuuucucuaccagcuuuuaccugaucuccauuuuccuucaccucgugaagauccccacacaucggcacauuguggggaaaccuugccccaagccucaucgccugaaucacaugggaaucuguucuugcggccuguauaagcagcccggcgucccggugaaauggaagagaugaggacuaguaauaaggaaacuguaugaaugucugugggcaggaagugaagagauccuucuguaaagguuuuuggaauuaugucugcugaauaauaaacuuuuuugaaauaauaaaucugguagaaaaaugagaucucaaaggcucuuuucagagccaccaaaaaaaaaaaaaaaaaaaaaaaaaaaaaaaaaaaaaaaaaaaaaaaaaaaaaaaaaaaaaaaaaaaaaaaaaaaaaaaaaaaaaaaaaaaaaaaaaaaaa

SEQ ID NO: 29221 - RNA, 1788 nt, Artificial Sequence
  mRNA product Design b-4 (A100) comprising derived and/or modified sequence from LASV(Josiah;Clade IV)__NP_694870__GPCmut5 (opt1)
aggagagucccgcagucggcguccagcggcucugcuuguucgugugugugucguugcaggccuuauucaagcuuaccaugggccagaucgugaccuucuuccaggaggucccccacgugaucgaggaggugaugaacaucguccugaucgcccucagcgugcuggccgugcugaaggggcucuacaacuucgcgaccugcggccuggucgggcuggugacguuccuccugcugugcggccgcuccugcaccaccagccucuacaaggggguguacgagcugcagacccuggagcucaacauggagacgcugaacaugaccaugccgcuguccugcaccaagaacaacagccaccacuacaucauggucggcaacgagaccggccucgagcugacgcugaccaacaccuccaucaucaaccacaaguucugcaaccucagcgacgcccacaagaagaaccuguacgaccacgcccugauguccaucaucagcaccuuccaccucuccauccccaacuucaaccaguacgaggccaugagcugcgacuucaacgggggcaagaucuccgugcaguacaaccugagccacuccuacgccggggacgcggccaaccacugcggcacgguggccaacgggguccugcagaccuucaugcggauggccuggggcggcagcuacaucgcgcucgacuccgggugcggcaacugggacugcaucaugaccagcuaccaguaccugaucauccagaacaccacgugggaggaccacugccaguucucccggcccagccccaucggguaccugggccuccugucccagcgcacccgggacaucuacaucagccgccggcugcucggcaccuucaccuggacgcugagcgacuccgaggggaaggacaccccgggcggguacugccugacccgcuggaugcucaucgaggccgagcugaagugcuucggcaacaccgccguggccaagugcaacgagaagcacgacgaggaguucugcgacaugcugcggcuguucgacuucaacaagcaggccauccagcgccugaaggcgcccgcccagaugagcauccagcugaucaacaaggccgugaacgcccucaucaacgaccagcugaucaugaagaaccaccuccgggacaucaugugcauccccuacugcaacuacuccaaguacugguaccucaaccacacgaccaccggccgcaccagccugcccaagugcuggcuggucuccaacggcagcuaccucaacgagacgcacuucuccgacgacaucgagcagcaggccgacaacaugaucaccgagaugcugcagaaggaguacauggagcggcaggggaagacgccccugggccucguggaccuguucguguucagcaccuccuucuaccugaucagcaucuuccugcaccucgucaagaucccgacccaccgccacaucguggggaaguccugccccaagccccaccggcugaaccacaugggcaucugcagcugcgggcuguacaagcagcccggcgugccggucaaguggaagcgcugaggacuaguaauaaggaaacuguaugaaugucugugggcaggaagugaagagauccuucuguaaagguuuuuggaauuaugucugcugaauaauaaacuuuuuugaaauaauaaaucugguagaaaaaugagaucuaaaaaaaaaaaaaaaaaaaaaaaaaaaaaaaaaaaaaaaaaaaaaaaaaaaaaaaaaaaaaaaaaaaaaaaaaaaaaaaaaaaaaaaaaaaaaaaaaaaa

SEQ ID NO: 29222 - RNA, 1785 nt, Artificial Sequence
  mRNA product Design b-4 (A100) comprising derived and/or modified sequence from LASV(LP;Clade I)__AAF86701__GPCmut5 (opt1)
aggagagucccgcagucggcguccagcggcucugcuuguucgugugugugucguugcaggccuuauucaagcuuaccaugggccagaucaucaccuucuuccaggaggugccccacgucaucgaggaggugaugaacaucgugcugaucgcccucagccugcuggccauccucaaggggcuguacaacaucgcgaccugcggcaucaucgggcuggucgccuuccucuuccugugcggcaaguccugcagccugacgcucaagggcggguacgagcugcagacccuggagcucaacauggagacccugaacaugaccaugccgcuguccugcacgaagaacagcucccaccacuacauccgcgugggcaacgagaccgggcucgagcugacccugaccaacacgagcaucaucaaccacaaguucugcaaccucuccgacgcccacaagaagaaccuguacgaccacgcccugaugagcaucaucuccaccuuccaccucagcauccccaacuucaaccaguacgaggccauguccugcgacuucaacggcgggaagaucagcgugcaguacaaccugucccacagcuacgcgggcgacgccgccgagcacugcgggaccgucgccaacggcgugcugcagaccuucaugcggauggcguggggcgggcgcuacaucgcccucgacuccggcugcgggaacugggacugcaucaugacgagcuaccaguaccugaucauccagaacaccaccugggaggaccacugccaguucucccggcccagccccaucggcuaccugggccuccugucccagcgcacccgggacaucuacaucagccgccggcugcucgggacguucaccuggacccugagcgacuccgagggcaacgagacccccgggggcuacugccugacgcgcuggaugcucaucgaggccgagcugaagugcuucgggaacaccgccguggccaagugcaacgagaagcacgacgaggaguucugcgacaugcugcggcuguucgacuucaacaagcaggcgauccgccggcugaaggcccccgcccagaugagcauccagcugaucaacaaggccgucaacgcccucaucaacgaccagcugaucaugaagaaccaccuccgcgacaucaugugcauccccuacugcaacuacuccaaguacugguaccucaaccacaccagcuccggccggaccagccugcccaagugcuggcugaucuccaacgggagcuaccucaacgagacgcaguucuccgacgacaucgagcagcaggcggacaacaugaucaccgagaugcugcagaaggaguacaucgagcgccagggcaagaccccgcuggggcucguggacaucuucaucuucagcaccuccuucuaccugaucagcaucuuccugcaccugaucaagaucccgacgcaccggcacaucgugggcaagcccugccccaagccccaccgccucaaccacaugggggucugcuccugcggccuguacaagcacccgggcgugcccaccaaguggaagcggugaggacuaguaauaaggaaacuguaugaaugucugugggcaggaagugaagagauccuucuguaaagguuuuuggaauuaugucugcugaauaauaaacuuuuuugaaauaauaaaucugguagaaaaaugagaucuaaaaaaaaaaaaaaaaaaaaaaaaaaaaaaaaaaaaaaaaaaaaaaaaaaaaaaaaaaaaaaaaaaaaaaaaaaaaaaaaaaaaaaaaaaaaaaaaaaaa

SEQ ID NO: 29223 - RNA, 1785 nt, Artificial Sequence
  mRNA product Design b-4 (A100) comprising derived and/or modified sequence from LASV(803213;Clade II)__AAF86703__GPCmut5 (opt1)
aggagagucccgcagucggcguccagcggcucugcuuguucgugugugugucguugcaggccuuauucaagcuuaccaugggccagaucaucaccuucuuccaggaggugccccacgucaucgaggaggugaugaacaucgugcugaucgcccucagccugcuggccauccucaaggggaucuacaacgucgcgaccugcggccuguucgggcugaucuccuuccuccugcugugcggccgcagcugcuccgugacguacaaggggguguacgagcuccagacccuggagcugaacauggccaaccucaacaugaccaugccgcugagcugcaccaagaacaacucccaccacuacaucauggucggcaacgagacgggccuggagcucacccugaccaacaccagcaucaucaaccacaaguucugcaaccuguccgacgcccacaagaagaaccucuacgaccacgcccugaugagcaucaucuccacguuccaccugagcauccccaacuucaaccaguacgaggccauguccugcgacuucaacgggggcaagaucagcgugcaguacaaccucucccacagcuucgcgguggacgccgccaaccacugcgggaccaucgccaacggcguccugcagaccuucaugcggauggcguggggcggguccuacaucgcccuggacagcggcugcgggaacugggacugcaucaugaccuccuaccaguaccucaucauccagaacacgaccugggaggaccacugccaguucagccgccccucccccaucggcuaccuggggcugcucagccagcggacccgcgacaucuacaucagccggcgccugcugggcaccuucacguggacccucuccgacagcgagggcaacgaggcccccgggggcuacugccugacccgguggaugcugaucgaggccgagcucaagugcuucgggaacaccgccguggcgaagugcaacgagaagcacgacgaggaguucugcgacaugcugcgccuguucgacuucaacaagcaggccaucaagcggcucaagacgcccgcccagauguccauccagcugaucaacaaggccgugaacgcccugaucaacgaccagcucaucaugaagaaccaccuccgcgacaucaugugcauccccuacugcaacuacagccgguacugguaccugaaccacaccgucaccgggaagaccucccugccccgcugcuggcuggugagcaacggcuccuaccugaacgagacgcacuucagcgacgacaucgagcagcaggcggacaacaugaucaccgagaugcuccagaaggaguacauggaccggcagggcaagaccccgcuggggcugguggaccucuucgucuucuccaccagcuucuaccugaucuccaucuuccugcaccuggugaagaucccgacgcaccgccacaucgugggcaagcccugccccaagccccaccggcucaaccacauggggaucugcagcugcggccuguacaagcacccggggguccccgugaaguggaagcgcugaggacuaguaauaaggaaacuguaugaaugucugugggcaggaagugaagagauccuucuguaaagguuuuuggaauuaugucugcugaauaauaaacuuuuuugaaauaauaaaucugguagaaaaaugagaucuaaaaaaaaaaaaaaaaaaaaaaaaaaaaaaaaaaaaaaaaaaaaaaaaaaaaaaaaaaaaaaaaaaaaaaaaaaaaaaaaaaaaaaaaaaaaaaaaaaaa

SEQ ID NO: 29224 - RNA, 1785 nt, Artificial Sequence
  mRNA product Design b-4 (A100) comprising derived and/or modified sequence from LASV(GA391;Clade III)__CAA36645__GPCmut5 (opt1)
aggagagucccgcagucggcguccagcggcucugcuuguucgugugugugucguugcaggccuuauucaagcuuaccaugggccagaucgugaccuucuuccaggaggucccccacgugaucgaggaggugaugaacaucguccugaucgcccucagcauccuggccauccugaaggggcucuacaacguggcgaccugcggccugaucgggcuggugacguuccuccugcuguccggccgcagcugcucccucaucuacaaggggaccuacgagcugcagacccuggagcucaacauggagacccugaacaugacgaugccgcugagcugcaccaagaacaacucccaccacuacauccgggucggcaacgagaccggccucgagcugacccugacgaacaccagcauccucaaccacaaguucugcaaccuguccgacgcccacaagcgcaaccuguacgaccacagccucauguccaucaucagcaccuuccaccuguccauccccaacuucaaccaguacgaggccaugagcugcgacuucaacgggggcaagaucaccgugcaguacaaccugucccacagcuucgccguggacgccgcggggcacugcggcacgcucgccaacgggguccugcagaccuucaugcggauggccuggggcggcuccuacaucgcccuggacagcgggugcggcaacugggacugcaucaugaccuccuaccaguaccucaucauccagaacaccacgugggacgaccacugccaguucagccggcccucccccaucggguaccugggccugcucagccagcgcacccgggacaucuacaucagccgccggcugcugggcaccuucaccuggacgcucuccgacagcgaggggaacgagaccccgggcggguacugccugacccgcuggaugcugaucgaggcggagcucaagugcuucggcaacaccgccguggccaagugcaacgagaagcacgacgaggaguucugcgacaugcugcggcuguucgacuucaacaagcaggccauccgccggcucaagacgcccgcccagauguccauccagcugaucaacaaggcggugaacgcccugaucaacgaccagcucaucaugaagaaccaccuccgcgacaucaugugcauccccuacugcaacuacagccgguacugguaccugaaccacaccuccaccggcaagaccagccugccccgcugcuggcugaucuccaacggcagcuaccugaacgagacgaaguucuccgacgacaucgagcagcaggccgacaacaugaucaccgagaugcuccagaaggaguacaucgaccggcaggggaagacgccccugggccuggucgaccuguucguguucagcaccuccuucuaccucaucagcaucuuccugcaccuggugaagaucccgacccaccgccacaucgucgggaagcccugccccaagccccaccggcucaaccacaugggcaucugcuccugcgggcuguacaagcagccgggcgugcccgugcgcuggaagcggugaggacuaguaauaaggaaacuguaugaaugucugugggcaggaagugaagagauccuucuguaaagguuuuuggaauuaugucugcugaauaauaaacuuuuuugaaauaauaaaucugguagaaaaaugagaucuaaaaaaaaaaaaaaaaaaaaaaaaaaaaaaaaaaaaaaaaaaaaaaaaaaaaaaaaaaaaaaaaaaaaaaaaaaaaaaaaaaaaaaaaaaaaaaaaaaaa

SEQ ID NO: 29225 - RNA, 1788 nt, Artificial Sequence
  mRNA product Design b-4 (A100) comprising derived and/or modified sequence from LASV(AV;Clade V)__CCA30314__GPCmut5 (opt1)
aggagagucccgcagucggcguccagcggcucugcuuguucgugugugugucguugcaggccuuauucaagcuuaccaugggccagaucgugaccuucuuccaggaggucccccacgugaucgaggaggugaugaacaucguccugaucgcccucagcauccuggccgugcugaaggggcucuacaacaucgcgaccugcggccugaucgggcugaucacguuccuccugcugugcggccgcuccugcagcuccaaccucuacaaggggguguacgagcugcagagccuggaccucaacauggagacccugaacaugaccaugccgcuguccugcaccaagaacaacagccaccacuacauccgggucggcaacgacacgggccucgagcugacccugaccaacaccuccauccucaaccacaaguucugcaaccugagcgacgcccacaagaaggaccuguacgaccacgcccucauguccaucaucagcacguuccaccuguccauccccaacuucaaccaguacgaggccaugagcugcgacuucaacgggggcaagaucuccgugcaguacaaccugagccacuccuacgccaucgacgcggccaaccacugcgggaccguggccaacggcauccuccagaccuucaugcgcauggccuggggcgggagcuacaucgcgcuggacuccggcugcgggaacugggacugcaucaugaccagcuaccaguaccugaucauccagaacacgaccugggagaaccacugccaguucucccgccccagccccaucggcuaccucgggcugcugagccagcggacccgcgacaucuacaucucccggcgccuccugggcaccuucacguggacccugagcgacuccgagggcaacgccacccccgggggcuacugccucacccgguggaugcugaucgaggccgagcugaagugcuucgggaacacggccgucgccaagugcaacgagaagcacgacgaggaguucugcgacaugcuccgccuguucgacuucaacaagcaggcgaucagccggcugaagucccccgcccagaugagcauccagcucaucaacaaggccgugaacgcccugaucaacgaccagcugaucaugaagaaccaccuccgcgacaucaugugcauccccuacugcaacuacuccaaguacugguaccugaaccacaccaucaccgggaagaccagccugcccaagugcuggcucguguccaacggcagcuaccugaacgagacgcacuucuccgacgacaucgagcagcaggccgacaacaugaucaccgagaugcugcagaaggaguacauggagcggcagggcaagaccccgcucgggcuggucgaccuguucguguucagcaccuccuucuaccugaucagcaucuuccuccgccuggugaagaucccgacgcaccggcacaucgucggcaagcccugccccaagccccaccgccugaaccacauggggaucugcuccugcggccucuacaagcagccgggggugcccgugcgguggaagcgcugaggacuaguaauaaggaaacuguaugaaugucugugggcaggaagugaagagauccuucuguaaagguuuuuggaauuaugucugcugaauaauaaacuuuuuugaaauaauaaaucugguagaaaaaugagaucuaaaaaaaaaaaaaaaaaaaaaaaaaaaaaaaaaaaaaaaaaaaaaaaaaaaaaaaaaaaaaaaaaaaaaaaaaaaaaaaaaaaaaaaaaaaaaaaaaaaa

SEQ ID NO: 29226 - RNA, 1785 nt, Artificial Sequence
  mRNA product Design b-4 (A100) comprising derived and/or modified sequence from LASV(Togo/2016/7082;Clade VI)__AMR44577__GPCmut5 (opt1)
aggagagucccgcagucggcguccagcggcucugcuuguucgugugugugucguugcaggccuuauucaagcuuaccaugggccagaucaucaccuucuuccaggaggugccccacgucaucgaggaggugaugaacaucgugcugaucgcccucagccugcuggccauccucaagggggucuacaacguggcgaccugcggcaucaucgggcuggugacguuccuguuccucugcggccgcuccugcagccugaucuacaagggguccuacgagcugcagacccucgagcugaacauggagacccugaacaugaccaugccgcucagcugcacgaagaacuccagccaccacuacauccgggucggcaacgagaccggccuggagcugacccucaccaacacguccaucaucaaccacaaguucugcaaccugagcgacgcccacaagcgcaaccuguacgaccacgcccucauguccauccugagcaccuuccaccuguccauccccaacuucaaccaguacgaggccaugagcugcgacuucaacgggggcaagaucuccgugcaguacaaccucagccacgccuacgcgguggacgccgccgagcacugcgggaccgucgccaacggcgugcugcagaccuucaugcggauggcguggggcggguccuacaucgcccuggacagcggcugcgggaacugggacugcaucaugacguccuaccaguaccucaucauccagaacaccaccugggaggaccacugccaguucagccggcccucccccaucggcuaccuggggcugcucagccagcgcacccgggacaucuacaucagccgccggcugcugggcacguucaccuggacccucuccgacagcgagggcaacgagacccccgggggcuacugccugacgcgcuggaugcugaucgaggccgagcucaagugcuucgggaacaccgccguggccaagugcaacgagaagcacgacgaggaguucugcgacaugcugcggcuguucgacuucaacaagcaggcgauccagcgccucaagucccccgcccagaugagcauccagcugaucaacaaggccgucaacgcccugaucaacgaccagcucaucaugaagaaccaccuccgggacaugaugugcauccccuacugcaacuacuccaaguacugguaccugaaccacaccagcuccgggcgcaccagccugcccaagugcuggcugguguccaacggcagcuaccugaacgagacgcacuucuccgacgacaucgagcagcaggccgacaacaugaucaccgagaugcuccagaaggaguacaucgaccggcagggcaagaccccgcuggggcugguggaccucuucgucuucagcaccuccuucuaccugaucagcaucuuccugcaccugaucaagaucccgacgcaccgccacaucgugggcaagcccugccccaagccccaccggcucaaccacauggggaucugcuccugcggccuguacaagcagccgggggugcccacccgcuggaagcggugaggacuaguaauaaggaaacuguaugaaugucugugggcaggaagugaagagauccuucuguaaagguuuuuggaauuaugucugcugaauaauaaacuuuuuugaaauaauaaaucugguagaaaaaugagaucuaaaaaaaaaaaaaaaaaaaaaaaaaaaaaaaaaaaaaaaaaaaaaaaaaaaaaaaaaaaaaaaaaaaaaaaaaaaaaaaaaaaaaaaaaaaaaaaaaaaa

SEQ ID NO: 29227 - RNA, 1785 nt, Artificial Sequence
  mRNA product Design b-4 (A100) comprising derived and/or modified sequence from LASV(KAK-428;Clade n.d. (VII))__ANH09740__GPCmut5 (opt1)
aggagagucccgcagucggcguccagcggcucugcuuguucgugugugugucguugcaggccuuauucaagcuuaccaugggccagaucgugaccuucuuccaggaggucccccacgugaucgaggaggugaugaacaucguccugaucgcccucagccugcuggccauccucaaggggcuguacaacuucgcgaccugcggcgugaucgggcugaucacguuccuccugcugugcggccgcuccugcagcgccaccuacaaggggcaguacgagcuccagacccuggagcugaacauggagucccucaacaugaccaugccgcugagcugcacgaagaacaacucccaccacuacauccgggccggcaacaacaccggccuggagcucacccugaccaacacgagcaucaucucccacaaguucugcaaccugagcgacgcccacaagaagaaccucuacgaccacacccugauguccaucaucaccaccuuccaccugagcauccccaacuucaaccaguacgaggccauguccugcgacuucaacgggggcaagaucagcauccaguacaaccucucccacagcuacgcgggggacgccgcccagcacugcggcacgguggccaacgggguccugcagaccuucaugcgcauggcguggggcggcuccuaccuggcccucgacagcgggugccgcggcugggacugcaucaucuccagcuaccaguaccugaucauccagaacaccaccugggacgaccacugccaguucucccggcccagccccaucggguaccugggcuucgugagccagaagacgcgcgacaucuacaucucccggcgccuccugggcaccuucaccuggacccugagcgacuccgaggggcacgacaugccgggcggguacugccucacgcgguggaugcugaucgaggccgaccugaagugcuucggcaacaccgccguggccaagugcaacgagaagcacgacgaggaguucugcgacauguggcgccucuucgacuucaacaagcaggcgauccagcggcugaaggcccccgcccagaugaacauccagcugaucaacaaggccgucaacgcccucaucaacgaccagcugaugaugaagaaccaccuccgcgacaucaugugcauccccuacugcaacuacagcaaguucugguaccugaacaacaccaccacgggccggaccucccugccccgcugcuggcugaucagcaacggcuccuaccucaacgagacccacuucagcgacgacaucgagcagcaggcggacaacaugaucaccgagaugcugcagaaggaguacauggaccggcaggggaagacgccccugggccucguggaccuguucguguucuccaccagcuucuaccugaucaccaucuuccuccaccuggucaagaucccgacccaccgccacaucguggggaagcccugccccaagccccaccggcugaaccacaugggcaucugcuccugcgggcuguacaagcagccgggcgugcccguccgcuggaagcggugaggacuaguaauaaggaaacuguaugaaugucugugggcaggaagugaagagauccuucuguaaagguuuuuggaauuaugucugcugaauaauaaacuuuuuugaaauaauaaaucugguagaaaaaugagaucuaaaaaaaaaaaaaaaaaaaaaaaaaaaaaaaaaaaaaaaaaaaaaaaaaaaaaaaaaaaaaaaaaaaaaaaaaaaaaaaaaaaaaaaaaaaaaaaaaaaa

SEQ ID NO: 29228 - RNA, 1785 nt, Artificial Sequence; identical to SEQ ID NO: 29222
  mRNA product Design b-4 (A100) comprising derived and/or modified sequence from LASV(Pinneo-NIG-1969;Clade I)__AIT17836__GPCmut5 (opt1)

SEQ ID NO: 29229 - RNA, 1785 nt, Artificial Sequence
  mRNA product Design b-4 (A100) comprising derived and/or modified sequence from LASV(ISTH0009-NIG-2011;Clade II)__AIT17404__GPCmut5 (opt1)
aggagagucccgcagucggcguccagcggcucugcuuguucgugugugugucguugcaggccuuauucaagcuuaccaugggccagaucaucaccuucuuccaggaggugccccacgucaucgaggaggugaugaacaucgugcugaucgcccucagccugcuggccauccucaaggggaucuacaacgucgcgaccugcggccuguucgggcugguguccuuccuccugcugugcggccgcagcugcuccacgaccuacaaggggguguacgagcuccagacccuggagcuggacauggccagccucaacaugaccaugccgcuguccugcacgaagaacaacagccaccacuacaucauggucggcaacgagaccggccuggagcucacccugaccaacacguccaucaucaaccacaaguucugcaaccugagcgacgcccacaagaagaaccucuacgaccacgcccugauguccaucaucagcaccuuccaccuguccauccccaacuucaaccaguacgaggccaugagcugcgacuucaacgggggcaagaucuccgugcaguacaaccucagccacgcguacgccguggacgccgccaaccacugcgggaccaucgcgaacggcguccugcagaccuucaugcggauggccuggggcggguccuacaucgcccuggacagcggcugcggguccugggacugcaucaugacgagcuaccaguaccucaucauccagaacaccaccugggaggaccacugccaguucucccgccccagccccaucggcuaccuggggcugcucagccagcggacccgcgacaucuacaucucccggcgccugcugggcacguucaccuggacccucagcgacuccgagggcaacgagacccccgggggcuacugccugacgcgguggaugcugaucgaggccgagcucaagugcuucgggaacaccgccguggcgaagugcaacgagaagcacgacgaggaguucugcgacaugcugcgccuguucgacuucaacaagcaggccauccggcgccucaagacccccgcccagaugagcauccagcugaucaacaaggccgugaacgcccugaucaacgaccagcucaucaugaagaaccaccuccgggacaucaugugcaucccguacugcaacuacuccaaguacugguaccugaaccacaccgucacggggaagaccagccugccccgcugcuggcugguguccaacggcagcuaccugaacgagacccacuucuccgacgacaucgagcagcaggcggacaacaugaucaccgagcuccugcagaaggaguacauggaccggcagggcaagacgccccuggggcucguggaccuguucgucuucagcaccuccuucuaccugaucagcaucuuccugcaccucaucaagaucccgacccaccgccacaucaccggcaagcccugccccaagccccaccggcugaaccacauggggaucugcuccugcggccuguacaagcacccgggggugcccgugaaguggaagcgcugaggacuaguaauaaggaaacuguaugaaugucugugggcaggaagugaagagauccuucuguaaagguuuuuggaauuaugucugcugaauaauaaacuuuuuugaaauaauaaaucugguagaaaaaugagaucuaaaaaaaaaaaaaaaaaaaaaaaaaaaaaaaaaaaaaaaaaaaaaaaaaaaaaaaaaaaaaaaaaaaaaaaaaaaaaaaaaaaaaaaaaaaaaaaaaaaa

SEQ ID NO: 29230 - RNA, 1785 nt, Artificial Sequence
  mRNA product Design b-4 (A100) comprising derived and/or modified sequence from LASV(ISTH2010-NIG-2012;Clade II)__AIT17482__GPCmut5 (opt1)
aggagagucccgcagucggcguccagcggcucugcuuguucgugugugugucguugcaggccuuauucaagcuuaccaugggccagaucaucaccuucuuccaggaggugccccacgucaucgaggaggugaugaacaucgugcugaucgcccucagccugcuggccauccucaaggggaucuacaacgucgcgaccugcggccuguucgggcugguguccuuccuccugcugugcggccgcagcugcuccacgaccuacaaggggguguacgagcuccagacccuggagcuggacauggccagccucaacaugaccaugccgcuguccugcacgaagaacaacagccaccacuacaucauggucggcaacgagaccggccuggagcucacccugaccaacacguccaucaucaaccacaaguucugcaaccugagcgacgcccacaagaagaaccucuacgaccacgcccugauguccaucaucagcaccuuccaccuguccauccccaacuucaaccaguacgaggccaugagcugcgacuucaacgggggcaagaucuccgugcaguacaaccucagccacgcguacgccguggacgccgccaaccacugcgggaccaucgcgaacggcguccugcagaccuucaugcggauggccuggggcggguccuacaucgcccuggacagcggcugcggguccugggacugcaucaugacgagcuaccaguaccucaucauccagaacaucaccugggaggaccacugccaguucucccgccccagccccaucggcuaccuggggcugcucagccagcggacccgcgacaucuacaucucccggcgccugcugggcaccuucacguggacccucagcgacuccgagggcaacgagacccccgggggcuacugccugacccgguggaugcugaucgaggccgagcucaagugcuucgggaacacggccguggcgaagugcaacgagaagcacgacgaggaguucugcgacaugcugcgccuguucgacuucaacaagcaggccauccggcgccucaagacccccgcccagaugagcauccagcugaucaacaaggccgugaacgcccugaucaacgaccagcucaucaugaagaaccaccuccgggacaucaugugcauccccuacugcaacuacuccaaguacugguaccugaaccacaccgucaccgggaagacgagccugccccgcugcuggcugguguccaacggcagcuaccugaacgagacccacuucuccgacgacaucgagcagcaggcggacaacaugaucaccgagcuccugcagaaggaguacaucgaccggcagggcaagaccccgcuggggcucguggaccuguucgucuucagcacguccuucuaccugaucagcaucuuccugcaccucgugaagaucccgacccaccgccacguggucggcaagcccugccccaagccccaccggcugaaccacauggggaucugcuccugcggccuguacaagcacccgggggugcccgugaaguggaagcgcugaggacuaguaauaaggaaacuguaugaaugucugugggcaggaagugaagagauccuucuguaaagguuuuuggaauuaugucugcugaauaauaaacuuuuuugaaauaauaaaucugguagaaaaaugagaucuaaaaaaaaaaaaaaaaaaaaaaaaaaaaaaaaaaaaaaaaaaaaaaaaaaaaaaaaaaaaaaaaaaaaaaaaaaaaaaaaaaaaaaaaaaaaaaaaaaaa

SEQ ID NO: 29231 - RNA, 1785 nt, Artificial Sequence
  mRNA product Design b-4 (A100) comprising derived and/or modified sequence from LASV(Lassa virus/H.sapiens-wt/NGA/2015/ISTH_0543;Clade II)__AVO03639__GPCmut5 (opt1)
aggagagucccgcagucggcguccagcggcucugcuuguucgugugugugucguugcaggccuuauucaagcuuaccaugggccagaucaucaccuucuuccaggaggugccccacgucaucgaggaggugaugaacaucgugcugaucgcccucagccugcuggccauccucaaggggaucuacaacgucgcgaccugcggccuguucgggcugguguccuuccuccugcugugcggccgcagcugcuccacgaccuacaaggggguguacgagcuccagacccuggagcuggacauggccaaccucaacaugaccaugccgcugagcugcacgaagaacaacucccaccacuacaucauggucggcaacgagaccggccuggagcucacccugaccaacacgagcaucaucaaccacaaguucugcaaccuguccgacgcccacaagaagaaccucuacgaccacgcccugaugagcaucaucuccaccuuccaccugagcauccccaacuucaaccaguacgaggccauguccugcgacuucaacgggggcaagaucagcgugcaguacaaccucucccacaccuacgcgguggacgccgccaaccacugcgggaccaucgccaacggcguccugcagacguucaugcggauggcguggggcgggagcuacaucgcccuggacuccggcugcgggagcugggacugcaucaugaccuccuaccaguaccucgugauccagaacaccaccugggaggaccacugccaguucagccgccccucccccaucggcuaccuggggcugcucagccagcggacgcgcgacaucuacaucagccggcgccugcugggcaccuucaccuggacccucuccgacagcgagggcaacgagacgcccgggggcuacugccugacccgguggaugcugaucgaggccgagcucaagugcuucgggaacaccgccguggccaagugcaacgagaagcacgacgaggaguucugcgacaugcugcgccuguucgacuucaacaagcaggcgauccggcgccucaagacccccgcccagauguccauccagcugaucaacaaggccgucaacgcccugaucaacgaccagcucaucaugaagaaccaccuccgggacaucaugugcauccccuacugcaacuacagcaaguacugguaccugaaccacacggugaccgggaagaccucccugccccgcugcuggcuggugagcaacggcuccuaccugaacgagacccacuucagcgacgacaucgagcagcaggccgacaacaugaucacggagcuccugcagaaggaguacaucgaccggcagggcaagaccccgcuggggcucgucgaccuguucguguucuccaccagcuucuaccugaucuccaucuuccugcaccucgugaagaucccgacccaccgccacaucacgggcaagcccugccccaagccccaccggcugaaccacauggggaucugcagcugcggccuguacaagcacccggggguccccgugaaguggaagcgcugaggacuaguaauaaggaaacuguaugaaugucugugggcaggaagugaagagauccuucuguaaagguuuuuggaauuaugucugcugaauaauaaacuuuuuugaaauaauaaaucugguagaaaaaugagaucuaaaaaaaaaaaaaaaaaaaaaaaaaaaaaaaaaaaaaaaaaaaaaaaaaaaaaaaaaaaaaaaaaaaaaaaaaaaaaaaaaaaaaaaaaaaaaaaaaaaa

SEQ ID NO: 29232 - RNA, 1785 nt, Artificial Sequence
  mRNA product Design b-4 (A100) comprising derived and/or modified sequence from LASV(Lassa virus/H.sapiens-wt/NGA/2016/ISTH_0009;Clade II)__AVO03571__GPCmut5 (opt1)
aggagagucccgcagucggcguccagcggcucugcuuguucgugugugugucguugcaggccuuauucaagcuuaccaugggccagaucaucaccuucuuccaggaggugccccacgucaucgaggaggugaugaacaucgugcugaucgcccucagccugcuggccauccucaaggggaucuacaacgucgcgaccugcggccugcuggggcucguguccuuccugcugcucugcggccgcagcugcuccacgaccuacaaggggguguacgagcugcagacccuggagcucgacauggccagccugaacaugaccaugccgcuguccugcacgaagaacaacagccaccacuacaucauggucggcaacgagaccggccucgagcugacccugaccaacacguccaucaucaaccacaaguucugcaaccucagcgacgcccacaagaagaaccuguacgaccacgcccugauguccaucaucagcaccuuccaccucuccauccccaacuucaaccaguacgaggccaugagcugcgacuucaacgggggccggaucuccgugcaguacaaccugagccacuccuacgcgguggacgccgccaaccacugcgggaccaucgccaacggcguccugcagaccuucaugcgcauggcguggggcgggagcuacaucgcccucgacuccggcugcgggagcugggacugcaucaugacguccuaccaguaccugaucauccagaacaccaccugggaggaccacugccaguucagccggcccagccccaucggcuaccuggggcuccugucccagcgcacccgggacaucuacaucagccgccggcugcucggcacguucaccuggacccuguccgacagcgagggcaacgagacccccgggggcuacugccugacgcgcuggaugcucaucgaggccgagcugaagugcuucgggaacaccgccguggccaagugcaacgagaagcacgacgaggaguucugcgacaugcugcggcuguucgacuucaacaagcaggcgauccgccggcugaagacccccgcccagauguccauccagcugaucaacaaggccgugaacgcccucaucaacgaccagcugaucaugaagaaccaccuccgcgacaucaugugcaucccguacugcaacuacagcaaguacugguaccucaaccacaccgucacggggaagaccucccugccccggugcuggcuggugagcaacggcuccuaccucaacgagacccacuucagcgacgacaucgagcagcaggccgacaacaugaucaccgagcugcugcagaaggaguacaucgaccgccagggcaagacgccccucgggcugguggaccuguucgucuucuccaccagcuucuaccugaucuccaucuuccuccaccuggugaagaucccgacccaccggcacaucaccggcaagcccugccccaagccccaccgccugaaccacauggggaucugcagcugcggccucuacaaccacccgggggugcccgucaaguggaagcggugaggacuaguaauaaggaaacuguaugaaugucugugggcaggaagugaagagauccuucuguaaagguuuuuggaauuaugucugcugaauaauaaacuuuuuugaaauaauaaaucugguagaaaaaugagaucuaaaaaaaaaaaaaaaaaaaaaaaaaaaaaaaaaaaaaaaaaaaaaaaaaaaaaaaaaaaaaaaaaaaaaaaaaaaaaaaaaaaaaaaaaaaaaaaaaaaa

SEQ ID NO: 29233 - RNA, 1785 nt, Artificial Sequence
  mRNA product Design b-4 (A100) comprising derived and/or modified sequence from LASV(Lassa virus/H.sapiens-wt/NGA/2016/ISTH_0017;Clade II)__AVO03567__GPCmut5 (opt1)
aggagagucccgcagucggcguccagcggcucugcuuguucgugugugugucguugcaggccuuauucaagcuuaccaugggccagaucaucaccuucuuccaggaggugccccacgucaucgaggaggugaugaacaucgugcugaucgcccucagccugcuggccauccucaaggggaucuacaacgucgcgaccugcggccuguucgggcugguguccuuccuccugcugugcggccgcagcugcuccacgaccuacaaggggguguacgagcuccagacccuggagcuggacauggccagccucaacaugaccaugccgcuguccugcacgaagaacaacagccaccacuacaucauggucggcaacgagaccggccuggagcucacccugaccaacacguccaucaucaaccacaaguucugcaaccugagcgacgcccacaagaagaaccucuacgaccacgcccugauguccaucaucagcaccuuccaccuguccauccccaacuucaaccaguacgaggccaugagcugcgacuucaacgggggcaagaucuccgugcaguacaaccucagccacaccuacgcgaucgacgccgccaaccacugcgggaccaucgccaacggcgugcugcagacguucaugcggauggcguggggcggguccuacaucgcccuggacagcggcugcggguccugggacugcaucaugaccagcuaccaguaccucaucauccagaacaccaccugggaggaccacugccaguucucccgccccagccccaucggcuaccuggggcugcucagccagcggacgcgcgacaucuacaucucccggcgccugcugggcaccuucaccuggacccucagcgacuccgagggcaacgagacgcccgggggcuacugccugacccgguggaugcugaucgaggccgagcucaagugcuucgggaacaccgccgucgccaagugcaacgagaagcacgacgaggaguucugcgacaugcugcgccuguucgacuucaacaagcaggcgauccggcgccucaagacccccgcccagaugagcauccagcugaucaacaaggccgugaacgcccugaucaacgaccagcucaucaugaagaaccaccuccgggacaucaugugcauccccuacugcaacuacuccaaguacugguaccugaaccacacggugaccgggaagaccagccugccccgcugcuggcuggucuccaacggcagcuaccugaacgagacccacuucuccgacgacaucgagcagcaggccgacaacaugaucacggagcuccugcagaaggaguacauggaccggcagggcaagaccccgcuggggcucguggaccuguucguguucagcaccuccuucuaccugaucagcaucuuccugcaccucguccgcaucccgacccaccggcacgugaucggcaagcccugccccaagccccaccgccugaaccacauggggaucugcuccugcggccuguacaagcacccgggggugcccgucaaguggaagcggugaggacuaguaauaaggaaacuguaugaaugucugugggcaggaagugaagagauccuucuguaaagguuuuuggaauuaugucugcugaauaauaaacuuuuuugaaauaauaaaucugguagaaaaaugagaucuaaaaaaaaaaaaaaaaaaaaaaaaaaaaaaaaaaaaaaaaaaaaaaaaaaaaaaaaaaaaaaaaaaaaaaaaaaaaaaaaaaaaaaaaaaaaaaaaaaaa

SEQ ID NO: 29234 - RNA, 1785 nt, Artificial Sequence
  mRNA product Design b-4 (A100) comprising derived and/or modified sequence from LASV(Lassa virus/H.sapiens-wt/NGA/2018/ISTH_0959;Clade II)__AVV65099__GPCmut5 (opt1)
aggagagucccgcagucggcguccagcggcucugcuuguucgugugugugucguugcaggccuuauucaagcuuaccaugggccagaucaucaccuucuuccaggaggugccccacgucaucgaggaggugaugaacaucgugcugaucgcccucagccugcuggccauccucaaggggaucuacaacgucgugaccugcggccuguucgggcugguguccuuccuccugcugugcggccgcagcugcuccacgaccuacaagggggucuacgagcuccagacccuggagcuggacauggcgagccucaacaugaccaugccgcuguccugcacgaagaacaacagccaccacuacaucauggugggcaacgagaccggccuggagcucacccugaccaacacguccaucaucaaccacaaguucugcaaccugagcgacgcccacaagaagaaccucuacgaccacgcccugauguccaucaucagcaccuuccaccuguccauccccaacuucaaccaguacgaggccaugagcugcgacuucaacgggggcaagaucuccgugcaguacaaccucagccacgccuacgcgaucgacgccgccaaccacugcgggaccaucgccaacggcguccugcagaccuucaugcggauggcguggggcggguccuacaucgcccuggacagcggcugcggguccugggacugcaucaugacgagcuaccaguaccucaucauccagaacaccaccugggaggaccacugccaguucucccgccccagccccaucggcuaccuggggcugcucagccagcggacccgcgacaucuacaucucccggcgccugcugggcacguucaccuggacccucagcgacuccgagggcaacgagacccccgggggcuacugccugacgcgguggaugcugaucgaggccgagcucaagugcuucgggaacaccgccguggccaagugcaacgagaagcacgacgaggaguucugcgacaugcugcgccuguucgacuucaacaagcaggcgauccggcgccucaagacccccgcccagaugagcauccagcugaucaacaaggccgugaacgcccugaucaacgaccagcucaucaugaagaaccaccuccgggacaucaugugcaucccguacugcaacuacuccaaguacugguaccugaaccacaccgucacggggaagaccagccugccccgcugcuggcugguguccaacggcagcuaccugaacgagacccacuucuccgacgacaucgagcagcaggccgacaacaugaucaccgagcuccugcagaaggaguacaucgaccggcagggcaagacgccccuggggcucguggaccuguucgucuucagcaccuccuucuaccugaucagcaucuuccugcaccucgugaagaucccgacccaccgccacgugaucggcaagcccugccccaagccccaccggcugaaccacauggggaucugcuccugcggccuguacaagcacccggggguccccgugaaguggaagcgcugaggacuaguaauaaggaaacuguaugaaugucugugggcaggaagugaagagauccuucuguaaagguuuuuggaauuaugucugcugaauaauaaacuuuuuugaaauaauaaaucugguagaaaaaugagaucuaaaaaaaaaaaaaaaaaaaaaaaaaaaaaaaaaaaaaaaaaaaaaaaaaaaaaaaaaaaaaaaaaaaaaaaaaaaaaaaaaaaaaaaaaaaaaaaaaaaa

SEQ ID NO: 29235 - RNA, 1785 nt, Artificial Sequence
  mRNA product Design b-4 (A100) comprising derived and/or modified sequence from LASV(LASV003-NIG-2008;Clade II)__AIT17580__GPCmut5 (opt1)
aggagagucccgcagucggcguccagcggcucugcuuguucgugugugugucguugcaggccuuauucaagcuuaccaugggccagaucaucaccuucuuccaggaggugccccacgucaucgaggaggugaugaacaucgugcugaucgcccucagccugcuggccauccucaaggggaucuacaacgucgcgaccugcggccuguucgggcugguguccuuccuccugcugugcggccgcagcugcuccacgaccuacaaggggguguacgagcuccagacccuggagcuggacauggccagccucaacaugaccaugccgcuguccugcacgaagaacaacagccaccacuacaucauggucggcaacgagaccggccuggagcucacccugaccaacacguccaucaucaaccacaaguucugcaaccugagcgacgcccacaagaagaaccucuacgaccacgcccugauguccaucaucagcaccuuccaccuguccauccccaacuucaaccaguacgaggccaugagcugcgacuucaacgggggcaagaucuccgugcaguacaaccucagccacaccuacgcgguggacgccgccaaccacugcgggaccaucgccaacggcguccugcagacguucaugcggauggcguggggcggguccuacaucgcccuggacagcggcugcggguccugggacugcaucaugaccagcuaccaguaccucaucauccagaacaccaccugggaggaccacugccaguucucccgccccagccccaucggcuaccuggggcugcucagccagcggacgcgcgacaucuacaucucccggcgccugcugggcaccuucaccuggacccucagcgacuccgagagcaacgagacgccgggcggguacugccugacccgguggaugcugaucgaggccgagcucaagugcuucggcaacaccgccguggccaagugcaacgagaagcacgacgaggaguucugcgacaugcugcgccuguucgacuucaacaagcaggcgauccggcgccucaaggcccccgcccagauguccauccagcugaucaacaaggccgugaacgcccugaucaacgaccagcucaucaugaagaaccaccuccgggacaucaugugcauccccuacugcaacuacagcaaguacugguaccugaaccacaccgucacgggccgcaccucccugccccggugcuggcuggugagcaacggguccuaccugaacgagacccacuucagcgacgacaucgagcagcaggcggacaacaugaucaccgagcuccugcagaaggaguacauggaccgccagggcaagacgccccugggccucguggaccuguucgucuucuccaccagcuucuaccugaucuccaucuuccugcaccucgugaagaucccgacccaccggcacgugaucgggaagcccugccccaagccccaccgccugaaccacaugggcaucugcagcugcgggcuguacaagcacccgggcguccccgugaaguggaagcggugaggacuaguaauaaggaaacuguaugaaugucugugggcaggaagugaagagauccuucuguaaagguuuuuggaauuaugucugcugaauaauaaacuuuuuugaaauaauaaaucugguagaaaaaugagaucuaaaaaaaaaaaaaaaaaaaaaaaaaaaaaaaaaaaaaaaaaaaaaaaaaaaaaaaaaaaaaaaaaaaaaaaaaaaaaaaaaaaaaaaaaaaaaaaaaaaa

SEQ ID NO: 29236 - RNA, 1785 nt, Artificial Sequence
  mRNA product Design b-4 (A100) comprising derived and/or modified sequence from LASV(LASV035-NIG-2009;Clade II)__AIT17588__GPCmut5 (opt1)
aggagagucccgcagucggcguccagcggcucugcuuguucgugugugugucguugcaggccuuauucaagcuuaccaugggccagaucaucaccuucuuccaggaggugccccacgucaucgaggaggugaugaacaucgugcugaucgcccucagccugcuggccauccucaaggggaucuacaacgucgcgaccugcggccuguucgggcugguguccuuccuccugcugugcggccgcagcugcuccacgaccuacaaggggguguacgagcuccagacccuggagcuggacauggccagccucaacaugaccaugccgcuguccugcacgaagaacaacagccaccacuacaucauggucggcaacgagaccggccuggagcucacccugaccaacacguccaucaucaaccacaaguucugcaaccugagcgacgcccacaagaagaaccucuacgaccacgcccugauguccaucaucagcaccuuccaccuguccauccccaacuucaaccaguacgaggccaugagcugcgacuucaacgggggcaagaucuccgugcaguacaaccucagccacgcguacgccguggacgccgccaaccacugcgggaccaucgcgaacggcguccugcagaccuucaugcggauggccuggggcggguccuacaucgcccuggacagcggcugcggguccugggacugcaucaugacgagcuaccaguaccucaucauccagaacaccaccugggaggaccacugccaguucucccgccccagccccaucggcuaccuggggcugcucagccagcggacccgcgacaucuacaucucccggcgccugcugggcacguucaccuggacccucagcgacuccgagggcaacgagacccccgggggcuacugccugacgcgguggaugcugaucgaggccgagcucaagugcuucgggaacaccgccguggcgaagugcaacgagaagcacgacgaggaguucugcgacaugcugcgccuguucgacuucaacaagcaggccauccggcgccucaaggcccccgcccagaugagcauccagcugaucaacaaggccgugaacgcgcugaucaacgaccagcucaucaugaagaaccaccuccgggacaucaugugcauccccuacugcaacuacuccaaguacugguaccugaaccacaccgucaccgggaagacgagccugccccgcugcuggcugguguccaacggcagcuaccugaacgagacccacuucuccgacgacaucgagcagcaggccgacaacaugaucaccgagcuccugcagaaggaguacaucgaccggcagggcaagaccccgcuggggcucguggaccuguucgucuucagcacguccuucuaccugaucagcaucuuccugcaccucgugaagaucccgacccaccgccacgugaucggcaagcccugccccaagccccaccggcugaaccacauggggaucugcuccugcggccuguacaagcacccggggguccccgugaaguggaagcgcugaggacuaguaauaaggaaacuguaugaaugucugugggcaggaagugaagagauccuucuguaaagguuuuuggaauuaugucugcugaauaauaaacuuuuuugaaauaauaaaucugguagaaaaaugagaucuaaaaaaaaaaaaaaaaaaaaaaaaaaaaaaaaaaaaaaaaaaaaaaaaaaaaaaaaaaaaaaaaaaaaaaaaaaaaaaaaaaaaaaaaaaaaaaaaaaaa

SEQ ID NO: 29237 - RNA, 1785 nt, Artificial Sequence
  mRNA product Design b-4 (A100) comprising derived and/or modified sequence from LASV(LASV1000-NIG-2009;Clade II)__AIT17782__GPCmut5 (opt1)
aggagagucccgcagucggcguccagcggcucugcuuguucgugugugugucguugcaggccuuauucaagcuuaccaugggccagaucaucaccuucuuccaggaggugccccacgucaucgaggaggugaugaacaucgugcugaucgcccucagccugcuggccauccucaaggggaucuacaacgucgcgaccugcggccuguucgggcugguguccuuccuccugcugugcggccgcagcugcuccacgaccuacaaggggguguacgagcuccagacccuggagcuggacauggccagccucaacaugaccaugccgcuguccugcacgaagaacaacagccaccacuacaucauggucggcaacgagaccggccuggagcucacccugaccaacacguccaucaucaaccacaaguucugcaaccugagcgacgcccacaagaagaaccucuacgaccacgcccugauguccaucaucagcaccuuccaccuguccauccccaacuucaaccaguacgaggccaugagcugcgacuucaacgggggcaagaucuccgugcaguacaaccucagccacaccuacgcgguggacgccgccaaccacugcgggaccaucgccaacggcguccugcagacguucaugcggauggcguggggcggguccuacaucgcccuggacagcggcugcggguccugggacugcaucaugaccagcuaccaguaccucaucauccagaacaccaccugggaggaccacugccaguucucccgccccagccccaucggcuaccuggggcugcucagccagcggacgcgcgacaucuacaucucccggcgccugcugggcaccuucaccuggacccucagcgacuccgagggcaacgagacgcccgggggcuacugccugacccgguggaugcugaucgaggccgagcucaagugcuucgggaacaccgccguggccaagugcaacgagaagcacgacgaggaguucugcgacaugcugcgccuguucgacuucaacaagcaggcgaucaagcggcucaagacccccgcccagaugagcauccagcugaucaacaaggccgugaacgcccugaucaacgaccagcucaucaugaagaaccaccuccgcgacaucaugugcauccccuacugcaacuacuccaaguacugguaccugaaccacacggucaccgggaagaccagccugccccggugcuggcugguguccaacggcagcuaccugaacgagacccacuucuccgacgacaucgagcagcaggccgacaacaugaucacggagcuccugcagaaggaguacaucgaccgccagggcaagaccccgcuggggcucguggaccuguucgucuucagcaccuccuucuaccugaucagcaucuuccugcaccucgugaagaucccgacccaccggcacguggucggcaagcccugccccaagccccaccgccugaaccacauggggaucugcuccugcggccuguacaagcacccgggggugcccgugaaguggaagcggugaggacuaguaauaaggaaacuguaugaaugucugugggcaggaagugaagagauccuucuguaaagguuuuuggaauuaugucugcugaauaauaaacuuuuuugaaauaauaaaucugguagaaaaaugagaucuaaaaaaaaaaaaaaaaaaaaaaaaaaaaaaaaaaaaaaaaaaaaaaaaaaaaaaaaaaaaaaaaaaaaaaaaaaaaaaaaaaaaaaaaaaaaaaaaaaaa

SEQ ID NO: 29238 - RNA, 1785 nt, Artificial Sequence
  mRNA product Design b-4 (A100) comprising derived and/or modified sequence from LASV(LASV221-NIG-2010;Clade II)__AIT17624__GPCmut5 (opt1)
aggagagucccgcagucggcguccagcggcucugcuuguucgugugugugucguugcaggccuuauucaagcuuaccaugggccagaucaucaccuucuuccaggaggugccccacgucaucgaggaggugaugaacaucgugcugaucgcccucagccugcuggccauccucaaggggaucuacaacgucgcgaccugcggccuguucgggcugguguccuuccuccugcugugcggccgcagcugcuccacgaccuacaaggggguguacgagcuccagacccuggagcuggacauggccagccucaacaugaccaugccgcuguccugcacgaagaacaacagccaccacuacaucauggucggcaacgagaccggccuggagcucacccugaccaacacguccaucaucaaccacaaguucugcaaccugagcgacgcccacaagaagaaccucuacgaccacgcccugauguccaucaucagcaccuuccaccuguccauccccaacuucaaccaguacgaggccaugagcugcgacuucaacgggggcaagaucuccgugcaguacaaccucagccacaccuacgcgaucgacgccgccaaccacugcgggaccaucgccaacggcgugcugcagacguucaugcggauggcguggggcggguccuacaucgcccuggacagcggcugcggguccugggacugcaucaugaccagcuaccaguaccucaucauccagaacaccaccugggaggaccacugccaguucucccgccccagccccaucggcuaccuggggcugcucagccagcggacgcgcgacaucuacaucucccggcgccugcugggcaccuucaccuggacccucagcgacuccgagggcaacgagacgcccgggggcuacugccugacccgguggaugcugaucgaggccgagcucaagugcuucgggaacaccgccgucgccaagugcaacgagaagcacgacgaggaguucugcgacaugcugcgccuguucgacuucaacaagcaggcgauccggcgccucaagacccccgcccagaugagcauccagcugaucaacaaggccgugaacgcccugaucaacgaccagcucaucaugaagaaccaccuccgggacaucaugugcauccccuacugcaacuacuccaaguacugguaccugaaccacacggugaccgggaagaccagccugccccgcugcuggcuggucuccaacggcagcuaccugaacgagacccacuucuccgacgacaucgagcagcaggccgacaacaugaucacggagaugcuccagaaggaguacauggaccggcagggcaagaccccgcuggggcugguggaccucuucguguucagcaccuccuucuaccugaucagcaucuuccugcaccuggucaagaucccgacccaccgccacgugaucggcaagcccugccccaagccccaccggcucaaccacauggggaucugcuccugcggccuguacaagcacccgggggugcccgucaaguggaagcgcugaggacuaguaauaaggaaacuguaugaaugucugugggcaggaagugaagagauccuucuguaaagguuuuuggaauuaugucugcugaauaauaaacuuuuuugaaauaauaaaucugguagaaaaaugagaucuaaaaaaaaaaaaaaaaaaaaaaaaaaaaaaaaaaaaaaaaaaaaaaaaaaaaaaaaaaaaaaaaaaaaaaaaaaaaaaaaaaaaaaaaaaaaaaaaaaaa

SEQ ID NO: 29239 - RNA, 1785 nt, Artificial Sequence
  mRNA product Design b-4 (A100) comprising derived and/or modified sequence from LASV(LASV237-NIG-2010;Clade II)__AIT17638__GPCmut5 (opt1)
aggagagucccgcagucggcguccagcggcucugcuuguucgugugugugucguugcaggccuuauucaagcuuaccaugggccagaucaucaccuucuuccaggaggugccccacgucaucgaggaggugaugaacaucgugcugaucgcccucagccugcuggccauccucaaggggaucuacaacgucgcgaccugcggccuguucgggcugguguccuuccuccugcugugcggccgcagcugcuccacgaccuacaaggggguguacgagcuccagacccuggagcuggacauggccagccucaacaugaccaugccgcuguccugcacgaagaacaacagccaccacuacaucauggucggcaacgagaccggccuggagcucacccugaccaacacguccaucaucaaccacaaguucugcaaccugagcgacgcccacaagaaggaccucuacgaccacgcccugauguccaucaucagcaccuuccaccuguccauccccaacuucaaccaguacgaggccaugagcugcgacuucaacgggggcaagaucuccgugcaguacaaccucagccacaccuacgcgguggacgccgccaaccacugcgggaccaucgccaacggcguccugcagacguucaugcggauggcguggggcggguccuacaucgcccuggacagcggcugcggguccugggacugcaucaugaccagcuaccaguaccucaucauccagaacaccaccugggaggaccacugccaguucucccgccccagccccaucggcuaccuggggcugcucagccagcggacgcgcgacaucuacaucucccggcgccugcugggcaccuucaccuggacccucagcgacuccgagggcaacgagacgcccgggggcuacugccugacccgguggaugcugaucgaggccgagcucaagugcuucgggaacaccgccguggccaagugcaacgagaagcacgacgaggaguucugcgacaugcugcgccuguucgacuucaacaagcaggcgauccggcgccucaagacccccgcccagaugagcauccagcugaucaacaaggccgugaacgcccugaucaacgaccagcucaucaugaagaaccaccuccgggacaucaugugcauccccuacugcaacuacuccaaguacugguaccugaaccacacggucaccgggaagaccagccugccccgcugcuggcugguguccaacggcagcuaccugaacgagacccacuucuccgacgacaucgagcagcaggccgacaacaugaucacggagcuccugcagaaggaguacauggaccggcagggcaagaccccgcuggggcucguggaccuguucgucuucagcaccuccuucuaccugaucagcaucuuccugcaccucaucaagaucccgacccaccgccacaucacgggcaagcccugccccaagccccaccggcugaaccacauggggaucugcuccugcggccuguacaagcacccgggggugcccgugaaguggaagcgcugaggacuaguaauaaggaaacuguaugaaugucugugggcaggaagugaagagauccuucuguaaagguuuuuggaauuaugucugcugaauaauaaacuuuuuugaaauaauaaaucugguagaaaaaugagaucuaaaaaaaaaaaaaaaaaaaaaaaaaaaaaaaaaaaaaaaaaaaaaaaaaaaaaaaaaaaaaaaaaaaaaaaaaaaaaaaaaaaaaaaaaaaaaaaaaaaa

SEQ ID NO: 29240 - RNA, 1785 nt, Artificial Sequence
  mRNA product Design b-4 (A100) comprising derived and/or modified sequence from LASV(LASV253-NIG-2011;Clade II)__AIT17670__GPCmut5 (opt1)
aggagagucccgcagucggcguccagcggcucugcuuguucgugugugugucguugcaggccuuauucaagcuuaccaugggccagaucaucaccuucuuccaggaggugccccacgucaucgaggaggugaugaacaucgugcugaucgcccucagccugcuggccauccucaaggggaucuacaacgucgcgaccugcggccuguucgggcugguguccuuccuccugcugugcggccgcagcugcuccacgaccuacaaggggguguacgagcuccagacccuggagcuggacauggccagccucaacaugaccaugccgcuguccugcacgaagaacaacagccaccacuacaucauggucggcaacgagaccggccuggagcucacccugaccaacacguccaucaucaaccacaaguucugcaaccugagcgacgcccacaagaagaaccucuacgaccacgcccugauguccaucaucagcaccuuccaccuguccauccccaacuucaaccaguacgaggccaugagcugcgacuucaacgggggcaagaucuccgugcaguacaaccucagccacaccuacgcgguggacgccgccaaccacugcgggaccaucgccaacggcguccugcagacguucaugcggauggcguggggcggguccuacaucgcccuggacagcggcugcggguccugggacugcaucaugaccagcuaccaguaccucaucauccagaacaccaccugggaggaccacugccaguucucccgccccagccccaucggcuaccuggggcugcucagccagcggacgcgcgacaucuacaucucccggcgccugcugggcaccuucaccuggacccucagcgacuccgagggcaacgagacgcccgggggcuacugccugacccgguggaugcugaucgaggccgagcucaagugcuucgggaacaccgccguggccaagugcaacgagaagcacgacgaggaguucugcgacaugcugcgccuguucgacuucaacaagcaggcgauccggcgccucaaggcccccgcccagaugagcauccagcugaucaacaaggccgugaacgcccugaucaacgaccagcucaucaugaagaaccaccuccgggacaucaugugcaucccguacugcaacuacuccaaguacugguaccugaaccacaccgucacggggcgcaccagccugccccggugcuggcugguguccaacggcagcuaccugaacgagacccacuucuccgacgacaucgagcagcaggcggacaacaugaucaccgagcuccugcagaaggaguacaucgaccgccagggcaagacgccccuggggcucguggaccuguucgucuucagcaccuccuucuaccugaucagcaucuuccugcaccucgugaagaucccgacccaccggcacaucaucggcaagcccugccccaagccccaccgccugaaccacauggggaucugcuccugcggccuguacaagcacccgggggugcccgucaaguggaagcggugaggacuaguaauaaggaaacuguaugaaugucugugggcaggaagugaagagauccuucuguaaagguuuuuggaauuaugucugcugaauaauaaacuuuuuugaaauaauaaaucugguagaaaaaugagaucuaaaaaaaaaaaaaaaaaaaaaaaaaaaaaaaaaaaaaaaaaaaaaaaaaaaaaaaaaaaaaaaaaaaaaaaaaaaaaaaaaaaaaaaaaaaaaaaaaaaa

SEQ ID NO: 29241 - RNA, 1785 nt, Artificial Sequence
  mRNA product Design b-4 (A100) comprising derived and/or modified sequence from LASV(LASV254-NIG-2011;Clade II)__AIT17674__GPCmut5 (opt1)
aggagagucccgcagucggcguccagcggcucugcuuguucgugugugugucguugcaggccuuauucaagcuuaccaugggccagaucaucaccuucuuccaggaggugccccacgucaucgaggaggugaugaacaucgugcugaucgcccucagccugcuggccauccucaaggggaucuacaacgucgcgaccugcggccuguucgggcugguguccuuccuccugcugugcggccgcagcugcuccacgaccuacaaggggguguacgagcuccagacccuggagcuggacaugaccaaccucaacaugacgaugccgcugagcugcaccaagaacaacucccaccacuacaucauggucggcaacgagaccggccuggagcucacccugacgaacaccagcaucaucaaccacaaguucugcaaccuguccgacgcccacaagaagaaccucuacaaccacgcccugaugagcaucaucuccaccuuccaccugagcauccccaacuucaaccaguacgaggccauguccugcgacuucaacgggggcaagaucagcgugcaguacaaccucucccacagcuacgccguggacgcggccaaccacugcgggaccaucgccaacggcguccugcagacguucaugcggauggccuggggcggguccuacaucgcgcuggacagcggcugcgggaacugggacugcaucaugaccuccuaccaguaccucaucauccagaacaccaccugggaggaccacugccaguucagccgccccucccccaucggcuaccuggggcugcucagccagcggacgcgcgacaucuacaucagccggcgccugcugggcaccuucaccuggacccucuccgacagcgagggcaacgagacgcccgggggcuacugccugacccgguggaugcugaucgaggccgagcucaagugcuucgggaacaccgccguggccaagugcaacgagaagcacgacgaggaguucugcgacaugcugcgccuguucgacuucaacaagcaggccauccggcgccucaagacccccgcgcaggccaacauccagcugaucaacaaggccgugaacgcccugaucaacgaccagcucaucaugaagaaccaccuccgggacaucaugugcauccccuacugcaacuacuccaaguacugguaccugaaccacacggucaccgggaagaccagccugccccgcugcuggcugguguccaacggcagcuaccugaacgagacccacuucuccgacgacaucgagcagcaggccgacaacaugaucacggagcuccugcagaaggaguacauggaccggcagggcaagaccccgcuggggcucguggaccuguucgucuucagcaccuccuucuaccugaucagcaucuuccugcaccucgugaagaucccgacccaccgccacgugaucggcaagcccugccccaagccccaccggcugaaccacauggggaucugcuccugcggccuguacaagcacccggggguccccgugaaguggaagcgcugaggacuaguaauaaggaaacuguaugaaugucugugggcaggaagugaagagauccuucuguaaagguuuuuggaauuaugucugcugaauaauaaacuuuuuugaaauaauaaaucugguagaaaaaugagaucuaaaaaaaaaaaaaaaaaaaaaaaaaaaaaaaaaaaaaaaaaaaaaaaaaaaaaaaaaaaaaaaaaaaaaaaaaaaaaaaaaaaaaaaaaaaaaaaaaaaa

SEQ ID NO: 29242 - RNA, 1785 nt, Artificial Sequence
  mRNA product Design b-4 (A100) comprising derived and/or modified sequence from LASV(Nig08-A19;Clade III)__ADU56618__GPCmut5 (opt1)
aggagagucccgcagucggcguccagcggcucugcuuguucgugugugugucguugcaggccuuauucaagcuuaccaugggccagaucgugaccuucuuccaggaggucccccacgugaucgaggaggugaugaacaucguccugaucgcccucagcauccuggccauccugaaggggcucuacaacaucgcgaccugcggccugaucgggcuggugacguuccuccugcuguccggccgcagcugcuccaugaccuacaaggggguguacgagcuccagacccuggagcugaacaugaacacccucaacaugacgaugccgcugagcugcaccaagaacaacucccaccacuacaucauggucggcaacgagaccggccuggagcucacccugacgaacaccagccugcuccaccacaaguucugcaaccuguccgacgcccacaagaagaaccuguacgaccacacccucaugagcaucaucuccaccuuccaccugagcauccccaacuucaaccaguacgaggccauguccugcgacuucaacgggggcaagaucacggugcaguacaaccugagccacuccuacgccaucgacgccgcgaaccacugcgggaccguggccaacggcguccuccagaccuucaugcggauggccuggggcgggagcuacaucgcccuggacuccggcugcgggaagugggacugcaucaugaccagcuaccaguaccugaucauccagaacacgaccugggaggaccacugccaguucucccggcccagccccaucggcuaccucgggcugcugucccagcgcacccgggacaucuacaucagccgccggcuccugggcaccuucacguggacccugagcgacuccgagggcaacgagacccccgggggcuacugccucacccgcuggaugcugaucgaggcggagcugaagugcuucgggaacacggccguggccaagugcaacgagaagcacgacgaggaguucugcgacaugcuccggcuguucgacuucaacaagcaggccauccgccggcugaaggcccccgcgcagaugagcauccagcucaucaacaaggccgugaacgcccugaucaacgaccagcugaucaugaagaaccaccuccgcgacaucaugugcauccccuacugcaacuacuccaaguacugguaccugaaccacaccagcaccgggcggaccucccugccccgcugcuggcucgucagcaacggcuccuaccugaacgagacgcacuucagcgacgacaucgagcagcaggccgacaacaugaucaccgagaugcugcagaaggaguaccucgaccggcagggcaagaccccgcuggggcugguggaccuguucguguucuccaccagcuucuaccucaucuccaucuuccugcaccuggucaagaucccgacgcaccgccacaucgugggcaagcccugccccaagccccaccggcucaaccacauggggaucugcagcugcggccuguacaagcagccgggggugcccguccgcuggaagcggugaggacuaguaauaaggaaacuguaugaaugucugugggcaggaagugaagagauccuucuguaaagguuuuuggaauuaugucugcugaauaauaaacuuuuuugaaauaauaaaucugguagaaaaaugagaucuaaaaaaaaaaaaaaaaaaaaaaaaaaaaaaaaaaaaaaaaaaaaaaaaaaaaaaaaaaaaaaaaaaaaaaaaaaaaaaaaaaaaaaaaaaaaaaaaaaaa

SEQ ID NO: 29243 - RNA, 1788 nt, Artificial Sequence
  mRNA product Design b-4 (A100) comprising derived and/or modified sequence from LASV(G1180-SLE-2010;Clade IV)__AIT17168__GPCmut5 (opt1)
aggagagucccgcagucggcguccagcggcucugcuuguucgugugugugucguugcaggccuuauucaagcuuaccaugggccagaucgugaccuucuuccaggaggucccccacgugaucgaggaggugaugaacaucguccugaucgcccucagcauccuggccgugcugaaggggcucuacaacuucgcgaccugcggccugguggggcugcucaccuuccugcugcucugcggccgcuccugcaccgccagccgguacaagggggucuacgagcugcagacccuggagcucaacauggagacccugaacaugacgaugccgcuguccugcaccaagaacaacagccaccacuacaucauggugggcaacgagaccggccucgagcugacccugacgaacaccuccaucaucaaccacaaguucugcaaccucagcgacgcccacaagaagaaccuguacgaccacgcccugauguccaucaucagcaccuuccaccucuccauccccaacuucaaccaguacgaggccaugagcugcgacuucaacgggggcaagaucuccgugcaguacaaccugagccacuccuacgcgggggacgccgccaaccacugcggcaccgucgccaacggggugcugcagacguucaugcgcauggcguggggcggcagcuacaucgcccucgacuccgggugcggcagcugggacugcaucaugaccuccuaccaguaccugaucauccagaacaccaccugggaggaccacugccaguucagccggcccucccccaucggguaccugggccuccugagccagcgcacgcgggacaucuacaucagccgccggcugcucggcaccuucaccuggacccuguccgacagcgaggggaaggacacgccgggcggguacugccugacccgcuggaugcucaucgaggccgagcugaagugcuucggcaacaccgccguggccaagugcaacgagaagcacgacgaggaguucugcgacaugcugcggcuguucgacuucaacaagcaggcgauccagcgccugaaggcccccgcccagauguccauccagcugaucaacaaggccgucaacgcccucaucaacgaccagcugaucaugaagaaccaccuccgggacaucaugugcauccccuacugcaacuacagcaaguacugguaccucaaccacaccacgaccggcaagaccucccugcccaagugcuggcuggugagcaacggcuccuaccucaacgagacccacuucagcgacgacaucgagcagcaggcggacaacaugaucacggagaugcugcagaaggaguacauggagcgccaggggaagacgccccugggccucguggaccuguucgucuucuccaccagcuucuaccugaucuccaucuuccugcaccucgugaagaucccgacccaccggcacaucgugggcaagagcugccccaagccccaccgccugaaccacauggggaucugcuccugcgggcuguacaagcagcccggcgucccggugaaguggaagcggugaggacuaguaauaaggaaacuguaugaaugucugugggcaggaagugaagagauccuucuguaaagguuuuuggaauuaugucugcugaauaauaaacuuuuuugaaauaauaaaucugguagaaaaaugagaucuaaaaaaaaaaaaaaaaaaaaaaaaaaaaaaaaaaaaaaaaaaaaaaaaaaaaaaaaaaaaaaaaaaaaaaaaaaaaaaaaaaaaaaaaaaaaaaaaaaaa

SEQ ID NO: 29244 - RNA, 1788 nt, Artificial Sequence
  mRNA product Design b-4 (A100) comprising derived and/or modified sequence from LASV(G1442-SLE-2011;Clade IV)__AIT17180__GPCmut5 (opt1)
aggagagucccgcagucggcguccagcggcucugcuuguucgugugugugucguugcaggccuuauucaagcuuaccaugggccagaucgugaccuucuuccaggaggucccccacgugaucgaggaggugaugaacaucguccugaucgcccucagcauccuggccgugcugaaggggcucuacaacguggcgaccugcggccugaucgggcuggucacguuccuccugcugugcggccgcuccugcaccaccacccucuacaaggggguguacgagcugcagacgcuggagcucaacauggagacccugaacaugaccaugccgcugagcugcaccaagaacaacucccaccacuacauccgggugggcaacgagacgggccucgagcugacccugaccaacaccagcaucaucaaccacaaguucugcaaccucuccgacgcccacaagaagaaccuguacgaccacgcccugaugagcaucaucuccacguuccaccucagcauccccaacuucaaccaguacgaggccauguccugcgacuucaacgggggcaagaucagcguccaguacaaccugucccacagcuacgccggggacgcggccaaccacugcggcaccguggccaacggggugcugcagaccuucaugcgcauggccuggggcggcuccuacaucgcgcucgacagcgggugcggcaacugggacugcaucaugaccuccuaccaguaccugaucauccagaacacgaccugggacgaccacugccaguucagccgccccucccccaucggguaccugggccuccugagccagcggacccgcgacgucuacaucucccggcgccugcucggcaccuucacguggacccugagcgacagcgaggggaaggacaccccgggcggguacugccugacccgguggaugcucaucgaggccgagcugaagugcuucggcaacacggccguggccaagugcaacgagaagcacgacgaggaguucugcgacaugcugcgccucuucgacuucaacaagcaggccauccagcggcugaaggcgcccgcccagauguccauccagcugaucaacaaggccgugaacgcccucaucaacgaccagcugaucaugaagaaccaccuccgcgacaucaugugcauccccuacugcaacuacagcaaguacugguaccugaacaacaccgccaccggcaagaccucccugcccaagugcuggcugaucagcaacggcuccuaccucaacgagacgcacuucagcgacgacaucgagcaggaggcggacaacaugaucaccgagaugcugcagaaggaguacauggagcggcaggggaagacgccccugggccucgucgaccuguucguguucuccaccagcuucuaccugaucuccaucuuccugcaccucgugaagaucccgacccaccgccacaucgucggcaagagcugccccaagccccaccggcugaaccacauggggaucugcuccugcgggcuguacaagcagcccggcgugccggugcgcuggaagcggugaggacuaguaauaaggaaacuguaugaaugucugugggcaggaagugaagagauccuucuguaaagguuuuuggaauuaugucugcugaauaauaaacuuuuuugaaauaauaaaucugguagaaaaaugagaucuaaaaaaaaaaaaaaaaaaaaaaaaaaaaaaaaaaaaaaaaaaaaaaaaaaaaaaaaaaaaaaaaaaaaaaaaaaaaaaaaaaaaaaaaaaaaaaaaaaaa

SEQ ID NO: 29245 - RNA, 1788 nt, Artificial Sequence
  mRNA product Design b-4 (A100) comprising derived and/or modified sequence from LASV(G3010-SLE-2013;Clade IV)__AIT17344__GPCmut5 (opt1)
aggagagucccgcagucggcguccagcggcucugcuuguucgugugugugucguugcaggccuuauucaagcuuaccaugggccagaucgugaccuucuuccaggaggucccccacgugaucgaggaggugaugaacaucguccugaucgcccucagcauccuggccgugcugaaggggcucuacaacuucgcgaccugcggccugguggggcuggucacguuccuccugcugugcggccgcuccugcaccaccagccucuacaaggggguguacgagcugcagacccuggagcucaacauggagacgcugaacaugaccaugccgcuguccugcaccaagaacaacagccaccacuacaucauggugggcaacgagaccggccucgagcugacgcugaccaacaccuccaucaucaaccacaaguucugcaaccucagcgacgcccacaagaagaaccuguacaaccacgcccugauguccaucaucagcaccuuccaccucuccauccccaacuucaaccaguacgaggccaugagcugcgacuucaacgggggcaagaucuccguccaguacaaccugagccacuccuacgccggggacgcggccagccacugcggcacgguggccaacggggugcugcagaccuucaugcggauggccuggggcggcuccuacaucgcgcucgacagcgggugcggcaagugggacugcaucaugaccuccuaccaguaccugaucauccagaacaccacgugggaggaccacugccaguucagccgccccucccccaucggguaccugggccuccugagccagcggacccgcgacaucuacaucagccggcgccugcucggcaccuucaccuggacgcuguccgacagcgaggggaaggacaccccgggcggguacugccugacccgguggaugcucaucgaggccgagcugaagugcuucggcaacaccgccgucgccaagugcaacgagaagcacgacgaggaguucugcgacaugcugcgccucuucgacuucaacaagcaggccauccagcggcugaagacgcccgcgcagauguccauccagcugaucaacaaggccgugaacgcccucaucaacgaccagcugaucaugaagaaccaccuccgcgacaucaugugcauccccuacugcaacuacagcaaguacugguaccugaaccacaccaccaccggcaagacgucccugcccaagugcuggcuggugagcaacggcuccuaccucaacgagacccacuucagcgacgacaucgagcagcaggccgacaacaugaucaccgagaugcugcagaaggaguacauggagcggcaggggaagacgccccugggccucgucgaccuguucguguucuccaccagcuucuaccugaucuccaucuuccugcaccucgugaagaucccgacccaccgccacaucgucggcaagagcugccccaagccccaccggcugaaccacauggggaucugcuccugcgggcuguacaagcagcccggcgugccggugcgcuggaagcggugaggacuaguaauaaggaaacuguaugaaugucugugggcaggaagugaagagauccuucuguaaagguuuuuggaauuaugucugcugaauaauaaacuuuuuugaaauaauaaaucugguagaaaaaugagaucuaaaaaaaaaaaaaaaaaaaaaaaaaaaaaaaaaaaaaaaaaaaaaaaaaaaaaaaaaaaaaaaaaaaaaaaaaaaaaaaaaaaaaaaaaaaaaaaaaaaa

SEQ ID NO: 29246 - RNA, 1788 nt, Artificial Sequence
  mRNA product Design b-4 (A100) comprising derived and/or modified sequence from LASV(G502-SLE-2009;Clade IV)__AIT17126__GPCmut5 (opt1)
aggagagucccgcagucggcguccagcggcucugcuuguucgugugugugucguugcaggccuuauucaagcuuaccaugggccagaucgugaccuucuuccaggaggucccccacgugaucgaggaggugaugaacaucguccugaucgcccucagcauccuggccgugcugaaggggcucuacaacuucgcgaccugcggccugguggggcugcucacguuccugcugcucugcggccgcuccugcaccaccgggcuguacaagggcgucuacgagcugcagacccucgagcugaacauggagacgcugaacaugaccaugccgcucagcugcaccaagaacaacucccaccacuacaucauggugggcaacgagaccgggcuggagcugacgcucaccaacaccagcaucaucaaccacaaguucugcaaccuguccgacgcccacaagaagaaccuguacgaccacgcccucaugagcaucaucuccaccuuccaccugagcauccccaacuucaaccaguacgaggccauguccugcgacuucaacggcgggaagaucagcgugcaguacaaccugucccacagcuacgccggcgacgcggccgaccacugcgggacggucgccaacggcgugcuccagaccuucaugcggauggccuggggcggguccuacaucgcgcuggacagcggcugcgggcggugggacugcaucaugaccuccuaccaguaccugaucauccagaacaccacgugggaggaccacugccaguucagccgccccucccccaucggcuaccucggccugcugagccagcggacccgcgacaucuacaucucccggcgccuccuggggaccuucaccuggacgcugagcgacagcgagggcaaggacacccccgggggcuacugccucacccgguggaugcugaucgaggccgagcugaagugcuucgggaacaccgccguggccaagugcaacgagaagcacgacgaggaguucugcgacaugcuccgccuguucgacuucaacaagcaggccauccagcggcugaaggcgcccgcccagauguccauccagcucaucaacaaggccgucaacgcccugaucaacgaccagcuggugaugaagaaccaccuccgcgacaucaugugcauccccuacugcaacuacagccgguacugguaccugaaccacacgaccaccggccgcaccucccugcccaagugcuggcucgugagcaacggguccuaccugaacgagacgcacuucagcgacgacaucgagcagcaggccgacaacaugaucaccgagaugcugcagaaggaguacauggagcggcagggcaagaccccgcucgggcuggucgaccuguucguguucuccaccagcuucuaccugaucuccaucuuccuccaccuggugaagaucccgacgcaccgccacaucgucggcaagagcugccccaagccccaccggcugaaccacauggggaucugcuccugcggccucuacaagcagcccggcgugccggugaaguggaagcgcugaggacuaguaauaaggaaacuguaugaaugucugugggcaggaagugaagagauccuucuguaaagguuuuuggaauuaugucugcugaauaauaaacuuuuuugaaauaauaaaucugguagaaaaaugagaucuaaaaaaaaaaaaaaaaaaaaaaaaaaaaaaaaaaaaaaaaaaaaaaaaaaaaaaaaaaaaaaaaaaaaaaaaaaaaaaaaaaaaaaaaaaaaaaaaaaaa

SEQ ID NO: 29247 - RNA, 1788 nt, Artificial Sequence
  mRNA product Design b-4 (A100) comprising derived and/or modified sequence from LASV(G733-SLE-2010;Clade IV)__AIT17154__GPCmut5 (opt1)
aggagagucccgcagucggcguccagcggcucugcuuguucgugugugugucguugcaggccuuauucaagcuuaccaugggccagaucgugaccuucuuccaggaggucccccacgugaucgaggaggugaugaacaucguccugaucgcccucagcauccuggccgugcugaaggggcucuacaacuucgcgaccugcggcaucguggggcuggucuccuuccugcuccugugcggccgcagcugcacgaccucccuguacaaggggguguacgagcuccagacccuggagcugaacauggagacccucaacaugacgaugccgcugagcugcaccaagaacaacucccaccacuacaucauggugggcaacgagaccggccuggagcucacccugacgaacaccagcaucaucaaccacaaguucugcaaccuguccgacgcccacaagaagaaccucuacgaccacgcccugaugagcaucaucuccaccuuccaccugagcauccccaacuucaaccaguacgaggccauguccugcgacuucaacgggggcaagaucagcguccaguacaaccucucccacagcuacgccggggacgcggccaaccacugcggcaccaucgccaacggggugcugcagacguucaugcggauggccuggggcggcuccuacaucgcgcuggacagcgggugcgaccggugggacugcaucaugaccuccuaccaguaccucaucauccagaacaccaccugggaggaccacugccaguucagccgccccucccccaucggcuaccuggggcugcucagccagcggacgcgcgacaucuacaucagccggcgccugcugggcaccuucaccuggacccucuccgacagcgagggcaaggacacgcccgggggcuacugccugacccgguggaugcugaucgaggccgagcucaagugcuucgggaacaccgccguggccaagugcaacgagaagcacgacgaggaguucugcgacaugcugcgccuguucgacuucaacaagcaggccauccagcggcucaaggcgcccgcccagauguccauccagcugaucaacaaggccgucaacgcccugaucaacgaccagcucaucaugaagaaccaccuccgcgacaucaugugcauccccuacugcaacuacagcaaguacugguaccugaaccacaccacgaccgggaagaccucccugcccaagugcuggcuggugagcaacggcuccuaccugaacgagacccacuucagcgacgacaucgagcagcaggccgacaacaugaucacggagaugcuccagaaggaguacauggagcggcagggcaagaccccgcuggggcugguggaccucuucgucuucuccaccagcuucuaccugaucuccaucuuccugcaccuggugaagaucccgacccaccgccacguggucggcaagagcugccccaagccccaccggcucaaccacauggggaucugcuccugcggccuguacgggcagcccggcgugccggugaaguggaagcgcugaggacuaguaauaaggaaacuguaugaaugucugugggcaggaagugaagagauccuucuguaaagguuuuuggaauuaugucugcugaauaauaaacuuuuuugaaauaauaaaucugguagaaaaaugagaucuaaaaaaaaaaaaaaaaaaaaaaaaaaaaaaaaaaaaaaaaaaaaaaaaaaaaaaaaaaaaaaaaaaaaaaaaaaaaaaaaaaaaaaaaaaaaaaaaaaaa

SEQ ID NO: 29248 - RNA, 1788 nt, Artificial Sequence
  mRNA product Design b-4 (A100) comprising derived and/or modified sequence from MOPV/LASV reassortant(IGS-1;Clade IV)__AFY05576__GPCmut5 (opt1)
aggagagucccgcagucggcguccagcggcucugcuuguucgugugugugucguugcaggccuuauucaagcuuaccaugggccagaucgugaccuucuuccaggaggucccccacgugaucgaggaggugaugaacaucguccugaucgcccucagcgugcuggccgugcugaaggggcucuacaacuucgcgaccugcggccuggucgggcuggugacguuccuccugcugugcggccgcuccugcaccaccagccucuacaaggggguguacgagcugcagacccuggagcucaacauggagacgcugaacaugaccaugccgcuguccugcaccaagaacaacagccaccacuacaucauggucggcaacgagaccggccucgagcugacgcugaccaacaccuccaucaucaaccacaaguucugcaaccucagcgacgcccacaagaagaaccuguacgaccacgcccugauguccaucaucagcaccuuccaccucuccauccccaacuucaaccaguacgaggccaugagcugcgacuucaacgggggcaagaucuccgugcaguacaaccugagccacuccuacgccggggacgcggccaaccacugcggcacgguggccaacgggguccugcagaccuucaugcggauggccuggggcggcagcuacaucgcgcucgacuccgggugcggcaacugggacugcaucaugaccagcuaccaguaccugaucauccagaacaccacgugggaggaccacugccaguucucccggcccagccccaucggguaccugggccuccugucccagcgcacccgggacaucuacaucagccgccggcugcucggcaccuucaccuggacgcugagcgacuccgagggggaggacaccccgggcggguacugccugacccgcuggaugcucaucgaggccgagcugaagugcuucggcaacaccgccguggccaagugcaacgagaagcacgacgaggaguucugcgacaugcugcggcuguucgacuucaacaagcaggccauccagcgccugaaggcgcccgcccagaugagcauccagcugaucaacaaggccgugaacgcccucaucaacgaccagcugaucaugaagaaccaccuccgggacaucaugugcauccccuacugcaacuacuccaaguacugguaccucaaccacacgaccaccggccgcaccagccugcccaagugcuggcuggucuccaacggcagcuaccucaacgagacgcacuucuccgacgacaucgagcagcaggccgacaacaugaucaccgagaugcugcagaaggaguacauggagcggcaggggaagacgccccugggccucguggaccuguucguguucagcaccuccuucuaccugaucagcaucuuccugcaccucgucaagaucccgacccaccgccacaucguggggaaguccugccccaagccccaccggcugaaccacaugggcaucugcagcugcgggcuguacaagcagcccggcgugccggucaaguggaagcgcugaggacuaguaauaaggaaacuguaugaaugucugugggcaggaagugaagagauccuucuguaaagguuuuuggaauuaugucugcugaauaauaaacuuuuuugaaauaauaaaucugguagaaaaaugagaucuaaaaaaaaaaaaaaaaaaaaaaaaaaaaaaaaaaaaaaaaaaaaaaaaaaaaaaaaaaaaaaaaaaaaaaaaaaaaaaaaaaaaaaaaaaaaaaaaaaaa

SEQ ID NO: 29249 - RNA, 1788 nt, Artificial Sequence
  mRNA product Design b-4 (A100) comprising derived and/or modified sequence from LASV(LM765-SLE-2012;Clade IV)__AIT17814__GPCmut5 (opt1)
aggagagucccgcagucggcguccagcggcucugcuuguucgugugugugucguugcaggccuuauucaagcuuaccaugggccagaucgugaccuucuuccaggaggucccccacgugaucgaggaggugaugaacaucguccugaucgcccucagcauccuggccgugcugaaggggcucuacaacuucgcgaccugcggccugguggggcuggucacguuccuccugcugugcggccgcuccugcaccaccagccucuacaaggggguguacgagcugcagacccuggagcucaacauggagacgcugaacaugaccaugccgcuguccugcaccaagaacaacagccaccacuacaucauggugggcaacgagaccggccucgagcugacgcugaccaacaccuccaucaucgaccacaaguucugcaaccucagcgacgcccaccggaagaaccuguacgaccacgcccugauguccaucaucagcaccuuccaccucuccauccccaacuucaaccaguacgaggccaugagcugcgacuucaacgggggcaagaucuccguccaguacaaccugagccacuccuacgccaaggacgcggccgaccacugcgggacgguggccaacggcgugcugcagaccuucaugcgcauggccuggggcgggagcuacaucgcgcucgacuccggcugcgggcgcugggacugcaucaugaccagcuaccaguaccugaucauccagaacaccacgugggaggaccacugccaguucucccggcccagccccaucggcuaccuggggcuccugucccagcgcacccgggacaucuacaucagccgccggcugcucggcaccuucaccuggacgcugagcgacuccgagggcaaggacacccccgggggcuacugccugacccgcuggaugcucaucgaggccgagcugaagugcuucgggaacaccgccgucgccaagugcaacgagaagcacgacgaggaguucugcgacaugcugcggcuguucgacuucaacaagcaggccauccagcgccugaaggcgcccgcccagaugagcauccagcugaucaacaaggccgugaacgcccucaucaacgaccagcugaucaugaagaaccaccuccgggacaucaugugcauccccuacugcaacuacuccaaguacugguaccucaaccacacgaccaccgggaagaccagccugcccaagugcuggcugguguccaacggcagcuaccucaacgagacgcacuucuccgacgacaucgagcagcaggccgacaacaugaucaccgagaugcugcagaaggaguacauggagcgccagggcaagaccccgcuggggcucgucgaccuguucguguucagcaccuccuucuaccugaucagcaucuuccugcaccucgugaagaucccgacgcaccggcacaucgucggcaagcccugccccaagccccaccgccugaaccacauggggaucugcuccugcggccuguacaagcagccgggggugcccgugaaguggaagcggugaggacuaguaauaaggaaacuguaugaaugucugugggcaggaagugaagagauccuucuguaaagguuuuuggaauuaugucugcugaauaauaaacuuuuuugaaauaauaaaucugguagaaaaaugagaucuaaaaaaaaaaaaaaaaaaaaaaaaaaaaaaaaaaaaaaaaaaaaaaaaaaaaaaaaaaaaaaaaaaaaaaaaaaaaaaaaaaaaaaaaaaaaaaaaaaaa

SEQ ID NO: 29250 - RNA, 1788 nt, Artificial Sequence
  mRNA product Design b-4 (A100) comprising derived and/or modified sequence from LASV(LM776-SLE-2012;Clade IV)__AIT17824__GPCmut5 (opt1)
aggagagucccgcagucggcguccagcggcucugcuuguucgugugugugucguugcaggccuuauucaagcuuaccaugggccagaucgugaccuucuuccaggaggucccccacgugaucgaggaggugaugaacaucguccugaucgcccucagcauccuggccgugcugaaggggcucuacaacuucgcgaccugcggccugguggggcuggucacguuccuccugcugugcggccgcuccugcaccaccagcguguacaaggggguguacgagcuccagacccuggagcugaacauggagacgcucaacaugaccaugccgcuguccugcaccaagaacaacagccaccacuacaucauggucggcaacgagaccggccuggagcucacgcugaccaacaccuccaucaucaaccacaaguucugcaaccugagcgacgcccacaagaagaaccucuacgaccacgcccugauguccaucaucagcaccuuccaccuguccauccccaacuucaaccaguacgaggccaugagcugcgacuucaacgggggcaagaucuccgugcaguacaaccucagccacuccuacgccggggacgcggccaaccacugcggcacgguggccaacgggguccugcagaccuucaugcggauggccuggggcggcagcuacaucgcgcuggacuccgggugcggcaagugggacugcaucaugaccagcuaccaguaccucaucauccagaacaccacgugggaggaccacugccaguucucccgccccagccccaucggguaccugggccugcucucccagcggacccgcgacaucuacaucagccggcgccugcugggcaccuucaccuggacgcucagcgacuccgaggggaaggacaccccgggcggguacugccugacccgguggaugcugaucgaggccgagcucaagugcuucggcaacaccgccguggccaagugcaacgagaagcacgacgaggaguucugcgacaugcugcgccuguucgacuucaacaagcaggccauccagcggcucaaggcgcccgcccagaugagcauccagcugaucaacaaggccgugaacgcccugaucaacgaccagcucaucaugaagaaccaccuccgcgacaucaugugcauccccuacugcaacuacuccaaguacugguaccugaaccacacgaccaccggcaagaccagccugcccaagugcuggcuggucuccaacggcagcuaccugaacgagacgcacuucuccgacgacaucgagcagcaggccgacaacaugaucaccgagaugcuccagaaggaguacauggagcggcaggggaagacgccccugggccugguggaccucuucguguucagcaccuccuucuaccugaucagcaucuuccugcaccuggucaagaucccgacccaccgccacaucguggggaaguccugccccaagccccaccggcucaaccacaugggcaucugcagcugcgggcuguacaagcagcccggcgugccgguccgcuggaagcggugaggacuaguaauaaggaaacuguaugaaugucugugggcaggaagugaagagauccuucuguaaagguuuuuggaauuaugucugcugaauaauaaacuuuuuugaaauaauaaaucugguagaaaaaugagaucuaaaaaaaaaaaaaaaaaaaaaaaaaaaaaaaaaaaaaaaaaaaaaaaaaaaaaaaaaaaaaaaaaaaaaaaaaaaaaaaaaaaaaaaaaaaaaaaaaaaa

SEQ ID NO: 29251 - RNA, 1788 nt, Artificial Sequence
  mRNA product Design b-4 (A100) comprising derived and/or modified sequence from LASV(Mad39;Clade IV)__ANH09722__GPCmut5 (opt1)
aggagagucccgcagucggcguccagcggcucugcuuguucgugugugugucguugcaggccuuauucaagcuuaccaugggccagaucgugaccuucuuccaggaggucccccacgugaucgaggaggugaugaacaucguccugaucgcccucagcauccuggccgugcugaaggggcucuacaacguggcgaccugcggccugaucgggcuggucacguuccuccugcugugcggccgcuccugcaccaccacccucuacaaggggguguacgagcugcaggcccuggagcucaacauggagacgcugaacaugaccaugccgcugagcugcaccaagaacaacucccaccacuacauccgggugggcaacgagaccggccucgagcugacgcugaccaacaccagccucaucaaccacaaguucugcaaccuguccgacgcccacaagaagaaccuguacgaccacgcccucaugagcaucaucuccaccuuccaccugagcauccccaacuucaaccaguacgaggccauguccugcgacuucaacgacgggaagaucagcguccaguacaaccugucccacacguacgcgggcgacaccgccaaccacugcgggaccguggccaacggcgugcuccagaccuucaugcgcauggccuggggcgggagcuacaucgcgcuggacuccggcugcgggggcugggacugcaucaugacgagcuaccaguaccugaucauccagaacaccaccugggaggaccacugccaguucucccggcccagccccaucggguaccucggccugcugucccagcggacccgcgacaucuacaucagccggcgccuccugggcacguucaccuggacccuguccgacagcgaggggaaggacaccccgggcggguacugccucacgcgguggaugcugaucgaggccgagcugaagugcuucggcaacaccgccgucgccaagugcaacgagaagcacgacgaggaguucugcgacaugcuccgccuguucgacuucaacaagcaggccauccagcggcugaaggcgcccgcccagaugagcauccagcucaucaacaaggccgugaacgcccugaucaacgaccagcugaucaugaagaaccaccuccgcgacaucaugugcauccccuacugcaacuacuccaaguacugguaccugaaccacaccgugaccggcaagacgagccugcccaagugcuggcucgucuccaacggcagcuaccugaacgagacccacuucuccgacgacaucgagcagcaggccgacaacaugaucaccgagaugcugcagaaggaguacauggagcggcaggggaagacgccccucggccugguggaccuguucguguucagcaccuccuucuaccugaucagcaucuuccuccaccuggucaagaucccgacccaccgccacgugguggggaagcccugccccaagccccaccggcugaaccacaugggcaucugcuccugcggguucuacaagcagccgggcguccccgugcgcuggaagcggugaggacuaguaauaaggaaacuguaugaaugucugugggcaggaagugaagagauccuucuguaaagguuuuuggaauuaugucugcugaauaauaaacuuuuuugaaauaauaaaucugguagaaaaaugagaucuaaaaaaaaaaaaaaaaaaaaaaaaaaaaaaaaaaaaaaaaaaaaaaaaaaaaaaaaaaaaaaaaaaaaaaaaaaaaaaaaaaaaaaaaaaaaaaaaaaaa

SEQ ID NO: 29252 - RNA, 1788 nt, Artificial Sequence
  mRNA product Design b-4 (A100) comprising derived and/or modified sequence from LASV(Z0947-SLE-2011;Clade IV)__AIT17840__GPCmut5 (opt1)
aggagagucccgcagucggcguccagcggcucugcuuguucgugugugugucguugcaggccuuauucaagcuuaccaugggccagaucgugaccuucuuccaggaggucccccacgugaucgaggaggugaugaacaucguccugaucgcccucagcauccuggccgugcugaaggggcucuacaacuucgcgaccugcggccugguggggcuggucacguuccuccugcugugcggccgcuccugcaccaucagccucuacaaggggguguacgagcugcagacccuggagcucaacauggagacccugaacaugacgaugccgcuguccugcaccaagaacaacagccaccacuacaucauggugggcaacgagaccggccucgagcugacccugacgaacaccuccaucaucaaccacaaguucugcaaccucagcgacgcccacaagaagaaccuguacgaccacgcccugauguccaucaucagcaccuuccaccucuccauccccaacuucaaccaguacgaggccaugagcugcgacuucaacgggggcaagaucuccguccaguacaaccugagccacuccuacgccggggacgcggccaaccacugcggcaccguggccaacggggugcugcagacguucaugcggauggccuggggcggcagcuacaucgcgcucgacuccgggugcgaccggugggacugcaucaugaccagcuaccaguaccugaucauccagaacaccaccugggaggaccacugccaguucucccgccccagccccaucggcuaccuggggcuccugucccagcggacgcgcgacaucuacaucagccggcgccugcucggcaccuucaccuggacccugagcgacuccgagggcaaggacacgcccgggggcuacugccugacccgguggaugcucaucgaggccgagcugaagugcuucgggaacaccgccgucgccaagugcaacgagaagcacgacgaggaguucugcgacaugcugcgccucuucgacuucaacaagcaggccauccagcggcugaaggcgcccgcccagaugagcauccagcugaucaacaaggccgugaacgcccucaucaacgaccagcugaucaugaagaaccaccuccgcgacaucaugugcauccccuacugcaacuacuccaaguacugguaccugaaccacaccacgaccgggaagaccagccugcccaagugcuggcugguguccaacggcagcuaccucaacgagacccacuucuccgacgacaucgagcagcaggccgacaacaugaucacggagaugcugcagaaggaguacauggagcggcagggcaagaccccgcuggggcucgucgaccuguucguguucagcaccuccuucuaccugaucagcaucuuccugcaccucgugaagaucccgacccaccgccacaucgucggcaagcccugccccaagccccaccggcugaaccacauggggaucugcuccugcggccuguacaagcagccgggggugcccgugaaguggaagcgcugaggacuaguaauaaggaaacuguaugaaugucugugggcaggaagugaagagauccuucuguaaagguuuuuggaauuaugucugcugaauaauaaacuuuuuugaaauaauaaaucugguagaaaaaugagaucuaaaaaaaaaaaaaaaaaaaaaaaaaaaaaaaaaaaaaaaaaaaaaaaaaaaaaaaaaaaaaaaaaaaaaaaaaaaaaaaaaaaaaaaaaaaaaaaaaaaa

SEQ ID NO: 29253 - RNA, 1788 nt, Artificial Sequence
  mRNA product Design b-4 (A100) comprising derived and/or modified sequence from LASV(Josiah;Clade IV)__NP_694870__GPCmut5 (opt1)
aggagagucccgcagucggcguccagcggcucugcuuguucgugugugugucguugcaggccuuauucaagcuuaccaugggccagaucgugaccuucuuccaggaggucccccacgugaucgaggaggugaugaacaucguccugaucgcccucagcgugcuggccgugcugaaggggcucuacaacuucgcgaccugcggccuggucgggcuggugacguuccuccugcugugcggccgcuccugcaccaccagccucuacaaggggguguacgagcugcagacccuggagcucaacauggagacgcugaacaugaccaugccgcuguccugcaccaagaacaacagccaccacuacaucauggucggcaacgagaccggccucgagcugacgcugaccaacaccuccaucaucaaccacaaguucugcaaccucagcgacgcccacaagaagaaccuguacgaccacgcccugauguccaucaucagcaccuuccaccucuccauccccaacuucaaccaguacgaggccaugagcugcgacuucaacgggggcaagaucuccgugcaguacaaccugagccacuccuacgccggggacgcggccaaccacugcggcacgguggccaacgggguccugcagaccuucaugcggauggccuggggcggcagcuacaucgcgcucgacuccgggugcggcaacugggacugcaucaugaccagcuaccaguaccugaucauccagaacaccacgugggaggaccacugccaguucucccgccccagccccaucggguaccugggccuccugucccagcggacccgcgacaucuacaucagccggcgccugcucggcaccuucaccuggacgcugagcgacuccgaggggaaggacaccccgggcggguacugccugacccgguggaugcucaucgaggccgagcugaagugcuucggcaacaccgccguggccaagugcaacgagaagcacgacgaggaguucugcgacaugcugcgccucuucgacuucaacaagcaggccauccagcggcugaaggcgcccgcccagaugagcauccagcugaucaacaaggccgugaacgcccucaucaacgaccagcugaucaugaagaaccaccuccgcgacaucaugugcauccccuacugcaacuacuccaaguacugguaccugaaccacacgaccaccgggcggaccagccugcccaagugcuggcuggucuccaacggcagcuaccucaacgagacgcacuucuccgacgacaucgagcagcaggccgacaacaugaucaccgagaugcugcagaaggaguacauggagcgccagggcaagaccccgcuggggcugguggaccucuucguguucagcaccuccuucuaccugaucagcaucuuccugcaccucgucaagauccccacgcaccggcacaucgugggcaaguccugccccaagccccaccgccugaaccacauggggaucugcagcugcggccuguacaagcagccgggggugcccgucaaguggaagcggugaggacuaguaauaaggaaacuguaugaaugucugugggcaggaagugaagagauccuucuguaaagguuuuuggaauuaugucugcugaauaauaaacuuuuuugaaauaauaaaucugguagaaaaaugagaucuaaaaaaaaaaaaaaaaaaaaaaaaaaaaaaaaaaaaaaaaaaaaaaaaaaaaaaaaaaaaaaaaaaaaaaaaaaaaaaaaaaaaaaaaaaaaaaaaaaaa

SEQ ID NO: 29254 - RNA, 1785 nt, Artificial Sequence
  mRNA product Design b-4 (A100) comprising derived and/or modified sequence from LASV(LP;Clade I)__AAF86701__GPCmut5 (opt1)
aggagagucccgcagucggcguccagcggcucugcuuguucgugugugugucguugcaggccuuauucaagcuuaccaugggccagaucaucaccuucuuccaggaggugccccacgucaucgaggaggugaugaacaucgugcugaucgcccucagccugcuggccauccucaaggggcuguacaacaucgcgaccugcggcaucaucgggcuggucgccuuccucuuccugugcggcaaguccugcagccugacgcucaagggcggguacgagcugcagacccuggagcucaacauggagacccugaacaugaccaugccgcuguccugcacgaagaacagcucccaccacuacauccgcgugggcaacgagaccgggcucgagcugacccugaccaacacgagcaucaucaaccacaaguucugcaaccucuccgacgcccacaagaagaaccuguacgaccacgcccugaugagcaucaucuccaccuuccaccucagcauccccaacuucaaccaguacgaggccauguccugcgacuucaacggcgggaagaucagcgugcaguacaaccugucccacagcuacgcgggcgacgccgccgagcacugcgggaccgucgccaacggcgugcugcagaccuucaugcggauggcguggggcgggcgcuacaucgcccucgacuccggcugcgggaacugggacugcaucaugacgagcuaccaguaccugaucauccagaacaccaccugggaggaccacugccaguucucccggcccagccccaucggcuaccugggccuccugucccagcgcacccgggacaucuacaucagccgccggcugcucgggacguucaccuggacccugagcgacuccgagggcaacgagacccccgggggcuacugccugacgcgcuggaugcucaucgaggccgagcugaagugcuucgggaacaccgccguggccaagugcaacgagaagcacgacgaggaguucugcgacaugcugcggcuguucgacuucaacaagcaggcgauccgccggcugaaggccccggcccagaugagcauccagcugaucaacaaggccgucaacgcccucaucaacgaccagcugaucaugaagaaccaccuccgcgacaucaugugcauccccuacugcaacuacuccaaguacugguaccucaaccacaccagcuccggccggaccagccugcccaagugcuggcugaucuccaacggcagcuaccucaacgagacgcaguucuccgacgacaucgagcagcaggcggacaacaugaucaccgagaugcugcagaaggaguacaucgagcgccaggggaagaccccgcugggccugguggacaucuucaucuucagcaccuccuucuaccucaucagcaucuuccugcaccugaucaagauccccacgcaccggcacaucguggggaagcccugccccaagccgcaccgccucaaccacaugggcgucugcuccugcgggcuguacaagcaccccggcgugcccaccaaguggaagcggugaggacuaguaauaaggaaacuguaugaaugucugugggcaggaagugaagagauccuucuguaaagguuuuuggaauuaugucugcugaauaauaaacuuuuuugaaauaauaaaucugguagaaaaaugagaucuaaaaaaaaaaaaaaaaaaaaaaaaaaaaaaaaaaaaaaaaaaaaaaaaaaaaaaaaaaaaaaaaaaaaaaaaaaaaaaaaaaaaaaaaaaaaaaaaaaaa

SEQ ID NO: 29255 - RNA, 1785 nt, Artificial Sequence
  mRNA product Design b-4 (A100) comprising derived and/or modified sequence from LASV(803213;Clade II)__AAF86703__GPCmut5 (opt1)
aggagagucccgcagucggcguccagcggcucugcuuguucgugugugugucguugcaggccuuauucaagcuuaccaugggccagaucaucaccuucuuccaggaggugccccacgucaucgaggaggugaugaacaucgugcugaucgcccucagccugcuggccauccucaaggggaucuacaacgucgcgaccugcggccuguucgggcugaucuccuuccuccugcugugcggccgcagcugcuccgugacguacaaggggguguacgagcuccagacccuggagcugaacauggccaaccucaacaugaccaugccgcugagcugcaccaagaacaacucccaccacuacaucauggucggcaacgagacgggccuggagcucacccugaccaacaccagcaucaucaaccacaaguucugcaaccuguccgacgcccacaagaagaaccucuacgaccacgcccugaugagcaucaucuccacguuccaccugagcauccccaacuucaaccaguacgaggccauguccugcgacuucaacgggggcaagaucagcgugcaguacaaccucucccacagcuucgcgguggacgccgccaaccacugcgggaccaucgccaacggcguccugcagaccuucaugcggauggcguggggcggguccuacaucgcccuggacagcggcugcgggaacugggacugcaucaugaccuccuaccaguaccucaucauccagaacacgaccugggaggaccacugccaguucagccgccccucccccaucggcuaccuggggcugcucagccagcggacccgcgacaucuacaucagccggcgccugcugggcaccuucacguggacccucuccgacagcgagggcaacgaggcccccgggggcuacugccugacccgguggaugcugaucgaggccgagcucaagugcuucgggaacaccgccguggcgaagugcaacgagaagcacgacgaggaguucugcgacaugcugcgccuguucgacuucaacaagcaggccaucaagcggcucaagacgccggcccagauguccauccagcugaucaacaaggccgugaacgcccugaucaacgaccagcucaucaugaagaaccaccuccgcgacaucaugugcauccccuacugcaacuacagccgguacugguaccugaaccacaccgucaccggcaagaccucccugccccgcugcuggcuggugagcaacggguccuaccugaacgagacgcacuucagcgacgacaucgagcagcaggcggacaacaugaucaccgagaugcuccagaaggaguacauggaccggcagggcaagaccccgcugggccugguggaccuguucgucuucuccaccagcuucuaccucaucuccaucuuccugcaccuggugaagauccccacgcaccgccacaucguggggaagcccugccccaagccgcaccggcucaaccacaugggcaucugcagcugcgggcuguacaagcaccccggcguccccgugaaguggaagcgcugaggacuaguaauaaggaaacuguaugaaugucugugggcaggaagugaagagauccuucuguaaagguuuuuggaauuaugucugcugaauaauaaacuuuuuugaaauaauaaaucugguagaaaaaugagaucuaaaaaaaaaaaaaaaaaaaaaaaaaaaaaaaaaaaaaaaaaaaaaaaaaaaaaaaaaaaaaaaaaaaaaaaaaaaaaaaaaaaaaaaaaaaaaaaaaaaa

SEQ ID NO: 29256 - RNA, 1785 nt, Artificial Sequence
  mRNA product Design b-4 (A100) comprising derived and/or modified sequence from LASV(GA391;Clade III)__CAA36645__GPCmut5 (opt1)
aggagagucccgcagucggcguccagcggcucugcuuguucgugugugugucguugcaggccuuauucaagcuuaccaugggccagaucgugaccuucuuccaggaggucccccacgugaucgaggaggugaugaacaucguccugaucgcccucagcauccuggccauccugaaggggcucuacaacguggcgaccugcggccugaucgggcuggugacguuccuccugcuguccggccgcagcugcucccucaucuacaaggggaccuacgagcugcagacccuggagcucaacauggagacccugaacaugacgaugccgcugagcugcaccaagaacaacucccaccacuacauccgggucggcaacgagaccggccucgagcugacccugacgaacaccagcauccucaaccacaaguucugcaaccuguccgacgcccacaagcgcaaccuguacgaccacagccucauguccaucaucagcaccuuccaccuguccauccccaacuucaaccaguacgaggccaugagcugcgacuucaacgggggcaagaucaccgugcaguacaaccugucccacagcuucgccguggacgccgcggggcacugcggcacgcucgccaacgggguccugcagaccuucaugcggauggccuggggcggcuccuacaucgcccuggacagcgggugcggcaacugggacugcaucaugaccuccuaccaguaccucaucauccagaacaccacgugggacgaccacugccaguucagccgccccucccccaucggguaccugggccugcucagccagcggacccgcgacaucuacaucagccggcgccugcugggcaccuucaccuggacgcucuccgacagcgaggggaacgagaccccgggcggguacugccugacccgguggaugcugaucgaggcggagcucaagugcuucggcaacaccgccguggccaagugcaacgagaagcacgacgaggaguucugcgacaugcugcgccuguucgacuucaacaagcaggccauccggcgccucaagacgcccgcccagauguccauccagcugaucaacaaggcggugaacgcccugaucaacgaccagcucaucaugaagaaccaccuccgggacaucaugugcauccccuacugcaacuacagccgcuacugguaccugaaccacaccuccaccgggaagaccagccugccccggugcuggcugaucuccaacggcagcuaccugaacgagacgaaguucuccgacgacaucgagcagcaggccgacaacaugaucaccgagaugcugcagaaggaguacaucgaccgccagggcaagaccccgcucgggcuggucgaccuguucguguucagcaccuccuucuaccucaucagcaucuuccugcaccuggugaagauccccacgcaccggcacaucgucggcaagcccugccccaagccgcaccgccucaaccacauggggaucugcuccugcggccuguacaagcagcccggggugcccgugcgguggaagcgcugaggacuaguaauaaggaaacuguaugaaugucugugggcaggaagugaagagauccuucuguaaagguuuuuggaauuaugucugcugaauaauaaacuuuuuugaaauaauaaaucugguagaaaaaugagaucuaaaaaaaaaaaaaaaaaaaaaaaaaaaaaaaaaaaaaaaaaaaaaaaaaaaaaaaaaaaaaaaaaaaaaaaaaaaaaaaaaaaaaaaaaaaaaaaaaaaa

SEQ ID NO: 29257 - RNA, 1788 nt, Artificial Sequence
  mRNA product Design b-4 (A100) comprising derived and/or modified sequence from LASV(AV;Clade V)__CCA30314__GPCmut5 (opt1)
aggagagucccgcagucggcguccagcggcucugcuuguucgugugugugucguugcaggccuuauucaagcuuaccaugggccagaucgugaccuucuuccaggaggucccccacgugaucgaggaggugaugaacaucguccugaucgcccucagcauccuggccgugcugaaggggcucuacaacaucgcgaccugcggccugaucgggcugaucacguuccuccugcugugcggccgcuccugcagcuccaaccucuacaaggggguguacgagcugcagagccuggaccucaacauggagacccugaacaugaccaugccgcuguccugcaccaagaacaacagccaccacuacauccgggucggcaacgacacgggccucgagcugacccugaccaacaccuccauccucaaccacaaguucugcaaccugagcgacgcccacaagaaggaccuguacgaccacgcccucauguccaucaucagcacguuccaccuguccauccccaacuucaaccaguacgaggccaugagcugcgacuucaacgggggcaagaucuccgugcaguacaaccugagccacuccuacgccaucgacgcggccaaccacugcgggaccguggccaacggcauccuccagaccuucaugcgcauggccuggggcgggagcuacaucgcgcuggacuccggcugcgggaacugggacugcaucaugaccagcuaccaguaccugaucauccagaacacgaccugggagaaccacugccaguucucccggcccagccccaucggcuaccucgggcugcugagccagcgcacccgggacaucuacaucucccgccggcuccugggcaccuucacguggacccugagcgacuccgagggcaacgccacccccgggggcuacugccucacccgcuggaugcugaucgaggccgagcugaagugcuucgggaacacggccgucgccaagugcaacgagaagcacgacgaggaguucugcgacaugcuccggcuguucgacuucaacaagcaggcgaucagccgccugaaguccccggcccagaugagcauccagcucaucaacaaggccgugaacgcccugaucaacgaccagcugaucaugaagaaccaccuccgggacaucaugugcauccccuacugcaacuacuccaaguacugguaccugaaccacaccaucaccggcaagaccagccugcccaagugcuggcucguguccaacgggagcuaccugaacgagacgcacuucuccgacgacaucgagcagcaggccgacaacaugaucaccgagaugcugcagaaggaguacauggagcgccagggcaagaccccgcugggccucgucgaccuguucguguucagcaccuccuucuaccugaucagcaucuuccuccggcuggugaagauccccacgcaccgccacaucgucgggaagcccugccccaagccgcaccggcugaaccacaugggcaucugcuccugcgggcucuacaagcagcccggcgugcccgugcgcuggaagcggugaggacuaguaauaaggaaacuguaugaaugucugugggcaggaagugaagagauccuucuguaaagguuuuuggaauuaugucugcugaauaauaaacuuuuuugaaauaauaaaucugguagaaaaaugagaucuaaaaaaaaaaaaaaaaaaaaaaaaaaaaaaaaaaaaaaaaaaaaaaaaaaaaaaaaaaaaaaaaaaaaaaaaaaaaaaaaaaaaaaaaaaaaaaaaaaaa

SEQ ID NO: 29258 - RNA, 1785 nt, Artificial Sequence
  mRNA product Design b-4 (A100) comprising derived and/or modified sequence from LASV(Togo/2016/7082;Clade VI)__AMR44577__GPCmut5 (opt1)
aggagagucccgcagucggcguccagcggcucugcuuguucgugugugugucguugcaggccuuauucaagcuuaccaugggccagaucaucaccuucuuccaggaggugccccacgucaucgaggaggugaugaacaucgugcugaucgcccucagccugcuggccauccucaagggggucuacaacguggcgaccugcggcaucaucgggcuggugacguuccuguuccucugcggccgcuccugcagccugaucuacaagggguccuacgagcugcagacccucgagcugaacauggagacccugaacaugaccaugccgcucagcugcacgaagaacuccagccaccacuacauccgggucggcaacgagaccggccuggagcugacccucaccaacacguccaucaucaaccacaaguucugcaaccugagcgacgcccacaagcgcaaccuguacgaccacgcccucauguccauccugagcaccuuccaccuguccauccccaacuucaaccaguacgaggccaugagcugcgacuucaacgggggcaagaucuccgugcaguacaaccucagccacgccuacgcgguggacgccgccgagcacugcgggaccgucgccaacggcgugcugcagaccuucaugcggauggcguggggcggguccuacaucgcccuggacagcggcugcgggaacugggacugcaucaugacguccuaccaguaccucaucauccagaacaccaccugggaggaccacugccaguucagccgccccucccccaucggcuaccuggggcugcucagccagcggacccgcgacaucuacaucagccggcgccugcugggcacguucaccuggacccucuccgacagcgagggcaacgagacccccgggggcuacugccugacgcgguggaugcugaucgaggccgagcucaagugcuucgggaacaccgccguggccaagugcaacgagaagcacgacgaggaguucugcgacaugcugcgccuguucgacuucaacaagcaggcgauccagcggcucaaguccccggcccagaugagcauccagcugaucaacaaggccgucaacgcccugaucaacgaccagcucaucaugaagaaccaccuccgcgacaugaugugcauccccuacugcaacuacuccaaguacugguaccugaaccacaccagcuccggccggaccagccugcccaagugcuggcugguguccaacgggagcuaccugaacgagacgcacuucuccgacgacaucgagcagcaggccgacaacaugaucaccgagaugcuccagaaggaguacaucgaccgccagggcaagaccccgcugggccugguggaccuguucgucuucagcaccuccuucuaccucaucagcaucuuccugcaccugaucaagauccccacgcaccggcacaucguggggaagcccugccccaagccgcaccgccucaaccacaugggcaucugcuccugcgggcuguacaagcagcccggcgugcccacccgguggaagcgcugaggacuaguaauaaggaaacuguaugaaugucugugggcaggaagugaagagauccuucuguaaagguuuuuggaauuaugucugcugaauaauaaacuuuuuugaaauaauaaaucugguagaaaaaugagaucuaaaaaaaaaaaaaaaaaaaaaaaaaaaaaaaaaaaaaaaaaaaaaaaaaaaaaaaaaaaaaaaaaaaaaaaaaaaaaaaaaaaaaaaaaaaaaaaaaaaa

SEQ ID NO: 29259 - RNA, 1785 nt, Artificial Sequence
  mRNA product Design b-4 (A100) comprising derived and/or modified sequence from LASV(KAK-428;Clade n.d. (VII))__ANH09740__GPCmut5 (opt1)
aggagagucccgcagucggcguccagcggcucugcuuguucgugugugugucguugcaggccuuauucaagcuuaccaugggccagaucgugaccuucuuccaggaggucccccacgugaucgaggaggugaugaacaucguccugaucgcccucagccugcuggccauccucaaggggcuguacaacuucgcgaccugcggcgugaucgggcugaucacguuccuccugcugugcggccgcuccugcagcgccaccuacaaggggcaguacgagcuccagacccuggagcugaacauggagucccucaacaugaccaugccgcugagcugcacgaagaacaacucccaccacuacauccgggccggcaacaacaccggccuggagcucacccugaccaacacgagcaucaucucccacaaguucugcaaccugagcgacgcccacaagaagaaccucuacgaccacacccugauguccaucaucaccaccuuccaccugagcauccccaacuucaaccaguacgaggccauguccugcgacuucaacgggggcaagaucagcauccaguacaaccucucccacagcuacgcgggggacgccgcccagcacugcggcacgguggccaacgggguccugcagaccuucaugcgcauggcguggggcggcuccuaccuggcccucgacagcgggugccggggcugggacugcaucaucuccagcuaccaguaccugaucauccagaacaccaccugggacgaccacugccaguucucccgccccagccccaucggguaccugggcuucgugagccagaagacgcgggacaucuacaucucccgccggcuccugggcaccuucaccuggacccugagcgacuccgaggggcacgacaugccgggcggguacugccucacgcgcuggaugcugaucgaggccgaccugaagugcuucggcaacaccgccguggccaagugcaacgagaagcacgacgaggaguucugcgacauguggcggcuguucgacuucaacaagcaggcgauccagcgccugaaggcccccgcccagaugaacauccagcugaucaacaaggccgucaacgcccucaucaacgaccagcugaugaugaagaaccaccuccgggacaucaugugcauccccuacugcaacuacagcaaguucugguaccucaacaacaccaccacggggcgcaccucccugccccggugcuggcugaucagcaacggcuccuaccucaacgagacccacuucagcgacgacaucgagcagcaggcggacaacaugaucaccgagaugcugcagaaggaguacauggaccgccagggcaagacgccgcuggggcucguggaccuguucguguucuccaccagcuucuaccugaucaccaucuuccugcaccucgucaagauccccacccaccggcacaucgugggcaagcccugccccaagccgcaccgccugaaccacauggggaucugcuccugcggccuguacaagcagcccggggugcccguccgguggaagcgcugaggacuaguaauaaggaaacuguaugaaugucugugggcaggaagugaagagauccuucuguaaagguuuuuggaauuaugucugcugaauaauaaacuuuuuugaaauaauaaaucugguagaaaaaugagaucuaaaaaaaaaaaaaaaaaaaaaaaaaaaaaaaaaaaaaaaaaaaaaaaaaaaaaaaaaaaaaaaaaaaaaaaaaaaaaaaaaaaaaaaaaaaaaaaaaaaa

SEQ ID NO: 29260 - RNA, 1785 nt, Artificial Sequence; identical to SEQ ID NO: 29254
  mRNA product Design b-4 (A100) comprising derived and/or modified sequence from LASV(Pinneo-NIG-1969;Clade I)__AIT17836__GPCmut5 (opt1)

SEQ ID NO: 29261 - RNA, 1785 nt, Artificial Sequence
  mRNA product Design b-4 (A100) comprising derived and/or modified sequence from LASV(ISTH0009-NIG-2011;Clade II)__AIT17404__GPCmut5 (opt1)
aggagagucccgcagucggcguccagcggcucugcuuguucgugugugugucguugcaggccuuauucaagcuuaccaugggccagaucaucaccuucuuccaggaggugccccacgucaucgaggaggugaugaacaucgugcugaucgcccucagccugcuggccauccucaaggggaucuacaacgucgcgaccugcggccuguucgggcugguguccuuccuccugcugugcggccgcagcugcuccacgaccuacaaggggguguacgagcuccagacccuggagcuggacauggccagccucaacaugaccaugccgcuguccugcacgaagaacaacagccaccacuacaucauggucggcaacgagaccggccuggagcucacccugaccaacacguccaucaucaaccacaaguucugcaaccugagcgacgcccacaagaagaaccucuacgaccacgcccugauguccaucaucagcaccuuccaccuguccauccccaacuucaaccaguacgaggccaugagcugcgacuucaacgggggcaagaucuccgugcaguacaaccucagccacgcguacgccguggacgccgccaaccacugcgggaccaucgcgaacggcguccugcagaccuucaugcggauggccuggggcggguccuacaucgcccuggacagcggcugcggguccugggacugcaucaugacgagcuaccaguaccucaucauccagaacaccaccugggaggaccacugccaguucucccgccccagccccaucggcuaccuggggcugcucagccagcggacccgcgacaucuacaucucccggcgccugcugggcacguucaccuggacccucagcgacuccgagggcaacgagacccccgggggcuacugccugacgcgguggaugcugaucgaggccgagcucaagugcuucgggaacaccgccguggcgaagugcaacgagaagcacgacgaggaguucugcgacaugcugcgccuguucgacuucaacaagcaggccauccggcgccucaagaccccggcccagaugagcauccagcugaucaacaaggccgugaacgcccugaucaacgaccagcucaucaugaagaaccaccuccgggacaucaugugcauccccuacugcaacuacuccaaguacugguaccugaaccacaccgucacgggcaagaccagccugccccgcugcuggcugguguccaacgggagcuaccugaacgagacccacuucuccgacgacaucgagcagcaggcggacaacaugaucaccgagcuccugcagaaggaguacauggaccggcagggcaagacgccgcugggccugguggaccucuucgucuucagcaccuccuucuaccugaucagcaucuuccugcaccucaucaagauccccacccaccgccacaucaccgggaagcccugccccaagccgcaccggcugaaccacaugggcaucugcuccugcgggcuguacaagcaccccggcgugcccgugaaguggaagcgcugaggacuaguaauaaggaaacuguaugaaugucugugggcaggaagugaagagauccuucuguaaagguuuuuggaauuaugucugcugaauaauaaacuuuuuugaaauaauaaaucugguagaaaaaugagaucuaaaaaaaaaaaaaaaaaaaaaaaaaaaaaaaaaaaaaaaaaaaaaaaaaaaaaaaaaaaaaaaaaaaaaaaaaaaaaaaaaaaaaaaaaaaaaaaaaaaa

SEQ ID NO: 29262 - RNA, 1785 nt, Artificial Sequence
  mRNA product Design b-4 (A100) comprising derived and/or modified sequence from LASV(ISTH2010-NIG-2012;Clade II)__AIT17482__GPCmut5 (opt1)
aggagagucccgcagucggcguccagcggcucugcuuguucgugugugugucguugcaggccuuauucaagcuuaccaugggccagaucaucaccuucuuccaggaggugccccacgucaucgaggaggugaugaacaucgugcugaucgcccucagccugcuggccauccucaaggggaucuacaacgucgcgaccugcggccuguucgggcugguguccuuccuccugcugugcggccgcagcugcuccacgaccuacaaggggguguacgagcuccagacccuggagcuggacauggccagccucaacaugaccaugccgcuguccugcacgaagaacaacagccaccacuacaucauggucggcaacgagaccggccuggagcucacccugaccaacacguccaucaucaaccacaaguucugcaaccugagcgacgcccacaagaagaaccucuacgaccacgcccugauguccaucaucagcaccuuccaccuguccauccccaacuucaaccaguacgaggccaugagcugcgacuucaacgggggcaagaucuccgugcaguacaaccucagccacgcguacgccguggacgccgccaaccacugcgggaccaucgcgaacggcguccugcagaccuucaugcggauggccuggggcggguccuacaucgcccuggacagcggcugcggguccugggacugcaucaugacgagcuaccaguaccucaucauccagaacaucaccugggaggaccacugccaguucucccgccccagccccaucggcuaccuggggcugcucagccagcggacccgcgacaucuacaucucccggcgccugcugggcaccuucacguggacccucagcgacuccgagggcaacgagacccccgggggcuacugccugacccgguggaugcugaucgaggccgagcucaagugcuucgggaacacggccguggcgaagugcaacgagaagcacgacgaggaguucugcgacaugcugcgccuguucgacuucaacaagcaggccauccggcgccucaagaccccggcccagaugagcauccagcugaucaacaaggccgugaacgcccugaucaacgaccagcucaucaugaagaaccaccuccgggacaucaugugcauccccuacugcaacuacuccaaguacugguaccugaaccacaccgucaccggcaagacgagccugccccgcugcuggcugguguccaacgggagcuaccugaacgagacccacuucuccgacgacaucgagcagcaggcggacaacaugaucaccgagcuccugcagaaggaguacaucgaccggcagggcaagaccccgcugggccugguggaccucuucgucuucagcacguccuucuaccugaucagcaucuuccugcaccucgugaagauccccacccaccgccacguggucgggaagcccugccccaagccgcaccggcugaaccacaugggcaucugcuccugcgggcuguacaagcaccccggcgugcccgugaaguggaagcgcugaggacuaguaauaaggaaacuguaugaaugucugugggcaggaagugaagagauccuucuguaaagguuuuuggaauuaugucugcugaauaauaaacuuuuuugaaauaauaaaucugguagaaaaaugagaucuaaaaaaaaaaaaaaaaaaaaaaaaaaaaaaaaaaaaaaaaaaaaaaaaaaaaaaaaaaaaaaaaaaaaaaaaaaaaaaaaaaaaaaaaaaaaaaaaaaaa

SEQ ID NO: 29263 - RNA, 1785 nt, Artificial Sequence
  mRNA product Design b-4 (A100) comprising derived and/or modified sequence from LASV(Lassa virus/H.sapiens-wt/NGA/2015/ISTH_0543;Clade II)__AVO03639__GPCmut5 (opt1)
aggagagucccgcagucggcguccagcggcucugcuuguucgugugugugucguugcaggccuuauucaagcuuaccaugggccagaucaucaccuucuuccaggaggugccccacgucaucgaggaggugaugaacaucgugcugaucgcccucagccugcuggccauccucaaggggaucuacaacgucgcgaccugcggccuguucgggcugguguccuuccuccugcugugcggccgcagcugcuccacgaccuacaaggggguguacgagcuccagacccuggagcuggacauggccaaccucaacaugaccaugccgcugagcugcacgaagaacaacucccaccacuacaucauggucggcaacgagaccggccuggagcucacccugaccaacacgagcaucaucaaccacaaguucugcaaccuguccgacgcccacaagaagaaccucuacgaccacgcccugaugagcaucaucuccaccuuccaccugagcauccccaacuucaaccaguacgaggccauguccugcgacuucaacgggggcaagaucagcgugcaguacaaccucucccacaccuacgcgguggacgccgccaaccacugcgggaccaucgccaacggcguccugcagacguucaugcggauggcguggggcgggagcuacaucgcccuggacuccggcugcgggagcugggacugcaucaugaccuccuaccaguaccucgugauccagaacaccaccugggaggaccacugccaguucagccgccccucccccaucggcuaccuggggcugcucagccagcggacgcgcgacaucuacaucagccggcgccugcugggcaccuucaccuggacccucuccgacagcgagggcaacgagacgcccgggggcuacugccugacccgguggaugcugaucgaggccgagcucaagugcuucgggaacaccgccguggccaagugcaacgagaagcacgacgaggaguucugcgacaugcugcgccuguucgacuucaacaagcaggcgauccggcgccucaagaccccggcccagauguccauccagcugaucaacaaggccgucaacgcccugaucaacgaccagcucaucaugaagaaccaccuccgggacaucaugugcauccccuacugcaacuacagcaaguacugguaccugaaccacacggugaccggcaagaccucccugccccgcugcuggcuggugagcaacggguccuaccugaacgagacccacuucagcgacgacaucgagcagcaggccgacaacaugaucacggagcuccugcagaaggaguacaucgaccggcagggcaagaccccgcugggccuggucgaccucuucguguucuccaccagcuucuaccugaucuccaucuuccugcaccucgugaagauccccacccaccgccacaucacggggaagcccugccccaagccgcaccggcugaaccacaugggcaucugcagcugcgggcuguacaagcaccccggcguccccgugaaguggaagcgcugaggacuaguaauaaggaaacuguaugaaugucugugggcaggaagugaagagauccuucuguaaagguuuuuggaauuaugucugcugaauaauaaacuuuuuugaaauaauaaaucugguagaaaaaugagaucuaaaaaaaaaaaaaaaaaaaaaaaaaaaaaaaaaaaaaaaaaaaaaaaaaaaaaaaaaaaaaaaaaaaaaaaaaaaaaaaaaaaaaaaaaaaaaaaaaaaa

SEQ ID NO: 29264 - RNA, 1785 nt, Artificial Sequence
  mRNA product Design b-4 (A100) comprising derived and/or modified sequence from LASV(Lassa virus/H.sapiens-wt/NGA/2016/ISTH_0009;Clade II)__AVO03571__GPCmut5 (opt1)
aggagagucccgcagucggcguccagcggcucugcuuguucgugugugugucguugcaggccuuauucaagcuuaccaugggccagaucaucaccuucuuccaggaggugccccacgucaucgaggaggugaugaacaucgugcugaucgcccucagccugcuggccauccucaaggggaucuacaacgucgcgaccugcggccugcuggggcucguguccuuccugcugcucugcggccgcagcugcuccacgaccuacaaggggguguacgagcugcagacccuggagcucgacauggccagccugaacaugaccaugccgcuguccugcacgaagaacaacagccaccacuacaucauggucggcaacgagaccggccucgagcugacccugaccaacacguccaucaucaaccacaaguucugcaaccucagcgacgcccacaagaagaaccuguacgaccacgcccugauguccaucaucagcaccuuccaccucuccauccccaacuucaaccaguacgaggccaugagcugcgacuucaacgggggccggaucuccgugcaguacaaccugagccacuccuacgcgguggacgccgccaaccacugcgggaccaucgccaacggcguccugcagaccuucaugcgcauggcguggggcgggagcuacaucgcccucgacuccggcugcgggagcugggacugcaucaugacguccuaccaguaccugaucauccagaacaccaccugggaggaccacugccaguucagccggcccagccccaucggcuaccuggggcuccugucccagcgcacccgggacaucuacaucagccgccggcugcucggcacguucaccuggacccuguccgacagcgagggcaacgagacccccgggggcuacugccugacgcgcuggaugcucaucgaggccgagcugaagugcuucgggaacaccgccguggccaagugcaacgagaagcacgacgaggaguucugcgacaugcugcggcuguucgacuucaacaagcaggcgauccgccggcugaagaccccggcccagauguccauccagcugaucaacaaggccgugaacgcccucaucaacgaccagcugaucaugaagaaccaccuccgcgacaucaugugcauccccuacugcaacuacagcaaguacugguaccucaaccacaccgucacgggcaagaccucccugccccggugcuggcuggugagcaacggguccuaccucaacgagacccacuucagcgacgacaucgagcagcaggccgacaacaugaucaccgagcugcugcagaaggaguacaucgaccgccagggcaagacgccgcugggccucguggaccuguucgucuucuccaccagcuucuaccugaucuccaucuuccuccaccuggugaagauccccacccaccggcacaucaccgggaagcccugccccaagccgcaccgccugaaccacaugggcaucugcagcugcgggcucuacaaccaccccggcgugcccgucaaguggaagcggugaggacuaguaauaaggaaacuguaugaaugucugugggcaggaagugaagagauccuucuguaaagguuuuuggaauuaugucugcugaauaauaaacuuuuuugaaauaauaaaucugguagaaaaaugagaucuaaaaaaaaaaaaaaaaaaaaaaaaaaaaaaaaaaaaaaaaaaaaaaaaaaaaaaaaaaaaaaaaaaaaaaaaaaaaaaaaaaaaaaaaaaaaaaaaaaaa

SEQ ID NO: 29265 - RNA, 1785 nt, Artificial Sequence
  mRNA product Design b-4 (A100) comprising derived and/or modified sequence from LASV(Lassa virus/H.sapiens-wt/NGA/2016/ISTH_0017;Clade II)__AVO03567__GPCmut5 (opt1)
aggagagucccgcagucggcguccagcggcucugcuuguucgugugugugucguugcaggccuuauucaagcuuaccaugggccagaucaucaccuucuuccaggaggugccccacgucaucgaggaggugaugaacaucgugcugaucgcccucagccugcuggccauccucaaggggaucuacaacgucgcgaccugcggccuguucgggcugguguccuuccuccugcugugcggccgcagcugcuccacgaccuacaaggggguguacgagcuccagacccuggagcuggacauggccagccucaacaugaccaugccgcuguccugcacgaagaacaacagccaccacuacaucauggucggcaacgagaccggccuggagcucacccugaccaacacguccaucaucaaccacaaguucugcaaccugagcgacgcccacaagaagaaccucuacgaccacgcccugauguccaucaucagcaccuuccaccuguccauccccaacuucaaccaguacgaggccaugagcugcgacuucaacgggggcaagaucuccgugcaguacaaccucagccacaccuacgcgaucgacgccgccaaccacugcgggaccaucgccaacggcgugcugcagacguucaugcggauggcguggggcggguccuacaucgcccuggacagcggcugcggguccugggacugcaucaugaccagcuaccaguaccucaucauccagaacaccaccugggaggaccacugccaguucucccgccccagccccaucggcuaccuggggcugcucagccagcggacgcgcgacaucuacaucucccggcgccugcugggcaccuucaccuggacccucagcgacuccgagggcaacgagacgcccgggggcuacugccugacccgguggaugcugaucgaggccgagcucaagugcuucgggaacaccgccgucgccaagugcaacgagaagcacgacgaggaguucugcgacaugcugcgccuguucgacuucaacaagcaggcgauccggcgccucaagaccccggcccagaugagcauccagcugaucaacaaggccgugaacgcccugaucaacgaccagcucaucaugaagaaccaccuccgggacaucaugugcauccccuacugcaacuacuccaaguacugguaccugaaccacacggugaccggcaagaccagccugccccgcugcuggcuggucuccaacgggagcuaccugaacgagacccacuucuccgacgacaucgagcagcaggccgacaacaugaucacggagcuccugcagaaggaguacauggaccggcagggcaagaccccgcugggccugguggaccucuucguguucagcaccuccuucuaccugaucagcaucuuccugcaccucguccgcauccccacccaccggcacgugaucgggaagcccugccccaagccgcaccgccugaaccacaugggcaucugcuccugcgggcuguacaagcaccccggcgugcccgucaaguggaagcggugaggacuaguaauaaggaaacuguaugaaugucugugggcaggaagugaagagauccuucuguaaagguuuuuggaauuaugucugcugaauaauaaacuuuuuugaaauaauaaaucugguagaaaaaugagaucuaaaaaaaaaaaaaaaaaaaaaaaaaaaaaaaaaaaaaaaaaaaaaaaaaaaaaaaaaaaaaaaaaaaaaaaaaaaaaaaaaaaaaaaaaaaaaaaaaaaa

SEQ ID NO: 29266 - RNA, 1785 nt, Artificial Sequence
  mRNA product Design b-4 (A100) comprising derived and/or modified sequence from LASV(Lassa virus/H.sapiens-wt/NGA/2018/ISTH_0959;Clade II)__AVV65099__GPCmut5 (opt1)
aggagagucccgcagucggcguccagcggcucugcuuguucgugugugugucguugcaggccuuauucaagcuuaccaugggccagaucaucaccuucuuccaggaggugccccacgucaucgaggaggugaugaacaucgugcugaucgcccucagccugcuggccauccucaaggggaucuacaacgucgugaccugcggccuguucgggcugguguccuuccuccugcugugcggccgcagcugcuccacgaccuacaagggggucuacgagcuccagacccuggagcuggacauggcgagccucaacaugaccaugccgcuguccugcacgaagaacaacagccaccacuacaucauggugggcaacgagaccggccuggagcucacccugaccaacacguccaucaucaaccacaaguucugcaaccugagcgacgcccacaagaagaaccucuacgaccacgcccugauguccaucaucagcaccuuccaccuguccauccccaacuucaaccaguacgaggccaugagcugcgacuucaacgggggcaagaucuccgugcaguacaaccucagccacgccuacgcgaucgacgccgccaaccacugcgggaccaucgccaacggcguccugcagaccuucaugcggauggcguggggcggguccuacaucgcccuggacagcggcugcggguccugggacugcaucaugacgagcuaccaguaccucaucauccagaacaccaccugggaggaccacugccaguucucccgccccagccccaucggcuaccuggggcugcucagccagcggacccgcgacaucuacaucucccggcgccugcugggcacguucaccuggacccucagcgacuccgagggcaacgagacccccgggggcuacugccugacgcgguggaugcugaucgaggccgagcucaagugcuucgggaacaccgccguggccaagugcaacgagaagcacgacgaggaguucugcgacaugcugcgccuguucgacuucaacaagcaggcgauccggcgccucaagaccccggcccagaugagcauccagcugaucaacaaggccgugaacgcccugaucaacgaccagcucaucaugaagaaccaccuccgggacaucaugugcauccccuacugcaacuacuccaaguacugguaccugaaccacaccgucacgggcaagaccagccugccccgcugcuggcugguguccaacgggagcuaccugaacgagacccacuucuccgacgacaucgagcagcaggccgacaacaugaucaccgagcuccugcagaaggaguacaucgaccggcagggcaagacgccgcugggccugguggaccucuucgucuucagcaccuccuucuaccugaucagcaucuuccugcaccucgugaagauccccacccaccgccacgugaucgggaagcccugccccaagccgcaccggcugaaccacaugggcaucugcuccugcgggcuguacaagcaccccggcguccccgugaaguggaagcgcugaggacuaguaauaaggaaacuguaugaaugucugugggcaggaagugaagagauccuucuguaaagguuuuuggaauuaugucugcugaauaauaaacuuuuuugaaauaauaaaucugguagaaaaaugagaucuaaaaaaaaaaaaaaaaaaaaaaaaaaaaaaaaaaaaaaaaaaaaaaaaaaaaaaaaaaaaaaaaaaaaaaaaaaaaaaaaaaaaaaaaaaaaaaaaaaaa

SEQ ID NO: 29267 - RNA, 1785 nt, Artificial Sequence
  mRNA product Design b-4 (A100) comprising derived and/or modified sequence from LASV(LASV003-NIG-2008;Clade II)__AIT17580__GPCmut5 (opt1)
aggagagucccgcagucggcguccagcggcucugcuuguucgugugugugucguugcaggccuuauucaagcuuaccaugggccagaucaucaccuucuuccaggaggugccccacgucaucgaggaggugaugaacaucgugcugaucgcccucagccugcuggccauccucaaggggaucuacaacgucgcgaccugcggccuguucgggcugguguccuuccuccugcugugcggccgcagcugcuccacgaccuacaaggggguguacgagcuccagacccuggagcuggacauggccagccucaacaugaccaugccgcuguccugcacgaagaacaacagccaccacuacaucauggucggcaacgagaccggccuggagcucacccugaccaacacguccaucaucaaccacaaguucugcaaccugagcgacgcccacaagaagaaccucuacgaccacgcccugauguccaucaucagcaccuuccaccuguccauccccaacuucaaccaguacgaggccaugagcugcgacuucaacgggggcaagaucuccgugcaguacaaccucagccacaccuacgcgguggacgccgccaaccacugcgggaccaucgccaacggcguccugcagacguucaugcggauggcguggggcggguccuacaucgcccuggacagcggcugcggguccugggacugcaucaugaccagcuaccaguaccucaucauccagaacaccaccugggaggaccacugccaguucucccgccccagccccaucggcuaccuggggcugcucagccagcggacgcgcgacaucuacaucucccggcgccugcugggcaccuucaccuggacccucagcgacuccgagagcaacgagacgccgggcggguacugccugacccgguggaugcugaucgaggccgagcucaagugcuucggcaacaccgccguggccaagugcaacgagaagcacgacgaggaguucugcgacaugcugcgccuguucgacuucaacaagcaggcgauccggcgccucaaggcccccgcccagauguccauccagcugaucaacaaggccgugaacgcccugaucaacgaccagcucaucaugaagaaccaccuccgggacaucaugugcauccccuacugcaacuacagcaaguacugguaccugaaccacaccgucacggggcgcaccucccugccccggugcuggcuggugagcaacggcuccuaccugaacgagacccacuucagcgacgacaucgagcagcaggcggacaacaugaucaccgagcuccugcagaaggaguacauggaccgccaggggaagacgccgcugggccugguggaccucuucgucuucuccaccagcuucuaccugaucuccaucuuccugcaccucgugaagauccccacccaccggcacgugaucggcaagcccugccccaagccgcaccgccugaaccacauggggaucugcagcugcggccuguacaagcaccccgggguccccgugaaguggaagcggugaggacuaguaauaaggaaacuguaugaaugucugugggcaggaagugaagagauccuucuguaaagguuuuuggaauuaugucugcugaauaauaaacuuuuuugaaauaauaaaucugguagaaaaaugagaucuaaaaaaaaaaaaaaaaaaaaaaaaaaaaaaaaaaaaaaaaaaaaaaaaaaaaaaaaaaaaaaaaaaaaaaaaaaaaaaaaaaaaaaaaaaaaaaaaaaaa

SEQ ID NO: 29268 - RNA, 1785 nt, Artificial Sequence
  mRNA product Design b-4 (A100) comprising derived and/or modified sequence from LASV(LASV035-NIG-2009;Clade II)__AIT17588__GPCmut5 (opt1)
aggagagucccgcagucggcguccagcggcucugcuuguucgugugugugucguugcaggccuuauucaagcuuaccaugggccagaucaucaccuucuuccaggaggugccccacgucaucgaggaggugaugaacaucgugcugaucgcccucagccugcuggccauccucaaggggaucuacaacgucgcgaccugcggccuguucgggcugguguccuuccuccugcugugcggccgcagcugcuccacgaccuacaaggggguguacgagcuccagacccuggagcuggacauggccagccucaacaugaccaugccgcuguccugcacgaagaacaacagccaccacuacaucauggucggcaacgagaccggccuggagcucacccugaccaacacguccaucaucaaccacaaguucugcaaccugagcgacgcccacaagaagaaccucuacgaccacgcccugauguccaucaucagcaccuuccaccuguccauccccaacuucaaccaguacgaggccaugagcugcgacuucaacgggggcaagaucuccgugcaguacaaccucagccacgcguacgccguggacgccgccaaccacugcgggaccaucgcgaacggcguccugcagaccuucaugcggauggccuggggcggguccuacaucgcccuggacagcggcugcggguccugggacugcaucaugacgagcuaccaguaccucaucauccagaacaccaccugggaggaccacugccaguucucccgccccagccccaucggcuaccuggggcugcucagccagcggacccgcgacaucuacaucucccggcgccugcugggcacguucaccuggacccucagcgacuccgagggcaacgagacccccgggggcuacugccugacgcgguggaugcugaucgaggccgagcucaagugcuucgggaacaccgccguggcgaagugcaacgagaagcacgacgaggaguucugcgacaugcugcgccuguucgacuucaacaagcaggccauccggcgccucaaggccccggcccagaugagcauccagcugaucaacaaggccgugaacgcgcugaucaacgaccagcucaucaugaagaaccaccuccgggacaucaugugcauccccuacugcaacuacuccaaguacugguaccugaaccacaccgucaccggcaagacgagccugccccgcugcuggcugguguccaacgggagcuaccugaacgagacccacuucuccgacgacaucgagcagcaggccgacaacaugaucaccgagcuccugcagaaggaguacaucgaccggcagggcaagaccccgcugggccugguggaccucuucgucuucagcacguccuucuaccugaucagcaucuuccugcaccucgugaagauccccacccaccgccacgugaucgggaagcccugccccaagccgcaccggcugaaccacaugggcaucugcuccugcgggcuguacaagcaccccggcguccccgugaaguggaagcgcugaggacuaguaauaaggaaacuguaugaaugucugugggcaggaagugaagagauccuucuguaaagguuuuuggaauuaugucugcugaauaauaaacuuuuuugaaauaauaaaucugguagaaaaaugagaucuaaaaaaaaaaaaaaaaaaaaaaaaaaaaaaaaaaaaaaaaaaaaaaaaaaaaaaaaaaaaaaaaaaaaaaaaaaaaaaaaaaaaaaaaaaaaaaaaaaaa

SEQ ID NO: 29269 - RNA, 1785 nt, Artificial Sequence
  mRNA product Design b-4 (A100) comprising derived and/or modified sequence from LASV(LASV1000-NIG-2009;Clade II)__AIT17782__GPCmut5 (opt1)
aggagagucccgcagucggcguccagcggcucugcuuguucgugugugugucguugcaggccuuauucaagcuuaccaugggccagaucaucaccuucuuccaggaggugccccacgucaucgaggaggugaugaacaucgugcugaucgcccucagccugcuggccauccucaaggggaucuacaacgucgcgaccugcggccuguucgggcugguguccuuccuccugcugugcggccgcagcugcuccacgaccuacaaggggguguacgagcuccagacccuggagcuggacauggccagccucaacaugaccaugccgcuguccugcacgaagaacaacagccaccacuacaucauggucggcaacgagaccggccuggagcucacccugaccaacacguccaucaucaaccacaaguucugcaaccugagcgacgcccacaagaagaaccucuacgaccacgcccugauguccaucaucagcaccuuccaccuguccauccccaacuucaaccaguacgaggccaugagcugcgacuucaacgggggcaagaucuccgugcaguacaaccucagccacaccuacgcgguggacgccgccaaccacugcgggaccaucgccaacggcguccugcagacguucaugcggauggcguggggcggguccuacaucgcccuggacagcggcugcggguccugggacugcaucaugaccagcuaccaguaccucaucauccagaacaccaccugggaggaccacugccaguucucccgccccagccccaucggcuaccuggggcugcucagccagcggacgcgcgacaucuacaucucccggcgccugcugggcaccuucaccuggacccucagcgacuccgagggcaacgagacgcccgggggcuacugccugacccgguggaugcugaucgaggccgagcucaagugcuucgggaacaccgccguggccaagugcaacgagaagcacgacgaggaguucugcgacaugcugcgccuguucgacuucaacaagcaggcgaucaagcggcucaagaccccggcccagaugagcauccagcugaucaacaaggccgugaacgcccugaucaacgaccagcucaucaugaagaaccaccuccgcgacaucaugugcauccccuacugcaacuacuccaaguacugguaccugaaccacacggucaccggcaagaccagccugccccggugcuggcugguguccaacgggagcuaccugaacgagacccacuucuccgacgacaucgagcagcaggccgacaacaugaucacggagcuccugcagaaggaguacaucgaccgccagggcaagaccccgcugggccugguggaccucuucgucuucagcaccuccuucuaccugaucagcaucuuccugcaccucgugaagauccccacccaccggcacguggucgggaagcccugccccaagccgcaccgccugaaccacaugggcaucugcuccugcgggcuguacaagcaccccggcgugcccgugaaguggaagcggugaggacuaguaauaaggaaacuguaugaaugucugugggcaggaagugaagagauccuucuguaaagguuuuuggaauuaugucugcugaauaauaaacuuuuuugaaauaauaaaucugguagaaaaaugagaucuaaaaaaaaaaaaaaaaaaaaaaaaaaaaaaaaaaaaaaaaaaaaaaaaaaaaaaaaaaaaaaaaaaaaaaaaaaaaaaaaaaaaaaaaaaaaaaaaaaaa

SEQ ID NO: 29270 - RNA, 1785 nt, Artificial Sequence
  mRNA product Design b-4 (A100) comprising derived and/or modified sequence from LASV(LASV221-NIG-2010;Clade II)__AIT17624__GPCmut5 (opt1)
aggagagucccgcagucggcguccagcggcucugcuuguucgugugugugucguugcaggccuuauucaagcuuaccaugggccagaucaucaccuucuuccaggaggugccccacgucaucgaggaggugaugaacaucgugcugaucgcccucagccugcuggccauccucaaggggaucuacaacgucgcgaccugcggccuguucgggcugguguccuuccuccugcugugcggccgcagcugcuccacgaccuacaaggggguguacgagcuccagacccuggagcuggacauggccagccucaacaugaccaugccgcuguccugcacgaagaacaacagccaccacuacaucauggucggcaacgagaccggccuggagcucacccugaccaacacguccaucaucaaccacaaguucugcaaccugagcgacgcccacaagaagaaccucuacgaccacgcccugauguccaucaucagcaccuuccaccuguccauccccaacuucaaccaguacgaggccaugagcugcgacuucaacgggggcaagaucuccgugcaguacaaccucagccacaccuacgcgaucgacgccgccaaccacugcgggaccaucgccaacggcgugcugcagacguucaugcggauggcguggggcggguccuacaucgcccuggacagcggcugcggguccugggacugcaucaugaccagcuaccaguaccucaucauccagaacaccaccugggaggaccacugccaguucucccgccccagccccaucggcuaccuggggcugcucagccagcggacgcgcgacaucuacaucucccggcgccugcugggcaccuucaccuggacccucagcgacuccgagggcaacgagacgcccgggggcuacugccugacccgguggaugcugaucgaggccgagcucaagugcuucgggaacaccgccgucgccaagugcaacgagaagcacgacgaggaguucugcgacaugcugcgccuguucgacuucaacaagcaggcgauccggcgccucaagaccccggcccagaugagcauccagcugaucaacaaggccgugaacgcccugaucaacgaccagcucaucaugaagaaccaccuccgggacaucaugugcauccccuacugcaacuacuccaaguacugguaccugaaccacacggugaccggcaagaccagccugccccgcugcuggcuggucuccaacgggagcuaccugaacgagacccacuucuccgacgacaucgagcagcaggccgacaacaugaucacggagaugcuccagaaggaguacauggaccggcagggcaagaccccgcugggccugguggaccuguucguguucagcaccuccuucuaccucaucagcaucuuccugcaccuggucaagauccccacccaccgccacgugaucgggaagcccugccccaagccgcaccggcucaaccacaugggcaucugcuccugcgggcuguacaagcaccccggcgugcccgucaaguggaagcgcugaggacuaguaauaaggaaacuguaugaaugucugugggcaggaagugaagagauccuucuguaaagguuuuuggaauuaugucugcugaauaauaaacuuuuuugaaauaauaaaucugguagaaaaaugagaucuaaaaaaaaaaaaaaaaaaaaaaaaaaaaaaaaaaaaaaaaaaaaaaaaaaaaaaaaaaaaaaaaaaaaaaaaaaaaaaaaaaaaaaaaaaaaaaaaaaaa

SEQ ID NO: 29271 - RNA, 1785 nt, Artificial Sequence
  mRNA product Design b-4 (A100) comprising derived and/or modified sequence from LASV(LASV237-NIG-2010;Clade II)__AIT17638__GPCmut5 (opt1)
aggagagucccgcagucggcguccagcggcucugcuuguucgugugugugucguugcaggccuuauucaagcuuaccaugggccagaucaucaccuucuuccaggaggugccccacgucaucgaggaggugaugaacaucgugcugaucgcccucagccugcuggccauccucaaggggaucuacaacgucgcgaccugcggccuguucgggcugguguccuuccuccugcugugcggccgcagcugcuccacgaccuacaaggggguguacgagcuccagacccuggagcuggacauggccagccucaacaugaccaugccgcuguccugcacgaagaacaacagccaccacuacaucauggucggcaacgagaccggccuggagcucacccugaccaacacguccaucaucaaccacaaguucugcaaccugagcgacgcccacaagaaggaccucuacgaccacgcccugauguccaucaucagcaccuuccaccuguccauccccaacuucaaccaguacgaggccaugagcugcgacuucaacgggggcaagaucuccgugcaguacaaccucagccacaccuacgcgguggacgccgccaaccacugcgggaccaucgccaacggcguccugcagacguucaugcggauggcguggggcggguccuacaucgcccuggacagcggcugcggguccugggacugcaucaugaccagcuaccaguaccucaucauccagaacaccaccugggaggaccacugccaguucucccgccccagccccaucggcuaccuggggcugcucagccagcggacgcgcgacaucuacaucucccggcgccugcugggcaccuucaccuggacccucagcgacuccgagggcaacgagacgcccgggggcuacugccugacccgguggaugcugaucgaggccgagcucaagugcuucgggaacaccgccguggccaagugcaacgagaagcacgacgaggaguucugcgacaugcugcgccuguucgacuucaacaagcaggcgauccggcgccucaagaccccggcccagaugagcauccagcugaucaacaaggccgugaacgcccugaucaacgaccagcucaucaugaagaaccaccuccgggacaucaugugcauccccuacugcaacuacuccaaguacugguaccugaaccacacggucaccggcaagaccagccugccccgcugcuggcugguguccaacgggagcuaccugaacgagacccacuucuccgacgacaucgagcagcaggccgacaacaugaucacggagcuccugcagaaggaguacauggaccggcagggcaagaccccgcugggccugguggaccucuucgucuucagcaccuccuucuaccugaucagcaucuuccugcaccucaucaagauccccacccaccgccacaucacggggaagcccugccccaagccgcaccggcugaaccacaugggcaucugcuccugcgggcuguacaagcaccccggcgugcccgugaaguggaagcgcugaggacuaguaauaaggaaacuguaugaaugucugugggcaggaagugaagagauccuucuguaaagguuuuuggaauuaugucugcugaauaauaaacuuuuuugaaauaauaaaucugguagaaaaaugagaucuaaaaaaaaaaaaaaaaaaaaaaaaaaaaaaaaaaaaaaaaaaaaaaaaaaaaaaaaaaaaaaaaaaaaaaaaaaaaaaaaaaaaaaaaaaaaaaaaaaaa

SEQ ID NO: 29272 - RNA, 1785 nt, Artificial Sequence
  mRNA product Design b-4 (A100) comprising derived and/or modified sequence from LASV(LASV253-NIG-2011;Clade II)__AIT17670__GPCmut5 (opt1)
aggagagucccgcagucggcguccagcggcucugcuuguucgugugugugucguugcaggccuuauucaagcuuaccaugggccagaucaucaccuucuuccaggaggugccccacgucaucgaggaggugaugaacaucgugcugaucgcccucagccugcuggccauccucaaggggaucuacaacgucgcgaccugcggccuguucgggcugguguccuuccuccugcugugcggccgcagcugcuccacgaccuacaaggggguguacgagcuccagacccuggagcuggacauggccagccucaacaugaccaugccgcuguccugcacgaagaacaacagccaccacuacaucauggucggcaacgagaccggccuggagcucacccugaccaacacguccaucaucaaccacaaguucugcaaccugagcgacgcccacaagaagaaccucuacgaccacgcccugauguccaucaucagcaccuuccaccuguccauccccaacuucaaccaguacgaggccaugagcugcgacuucaacgggggcaagaucuccgugcaguacaaccucagccacaccuacgcgguggacgccgccaaccacugcgggaccaucgccaacggcguccugcagacguucaugcggauggcguggggcggguccuacaucgcccuggacagcggcugcggguccugggacugcaucaugaccagcuaccaguaccucaucauccagaacaccaccugggaggaccacugccaguucucccgccccagccccaucggcuaccuggggcugcucagccagcggacgcgcgacaucuacaucucccggcgccugcugggcaccuucaccuggacccucagcgacuccgagggcaacgagacgcccgggggcuacugccugacccgguggaugcugaucgaggccgagcucaagugcuucgggaacaccgccguggccaagugcaacgagaagcacgacgaggaguucugcgacaugcugcgccuguucgacuucaacaagcaggcgauccggcgccucaaggccccggcccagaugagcauccagcugaucaacaaggccgugaacgcccugaucaacgaccagcucaucaugaagaaccaccuccgggacaucaugugcauccccuacugcaacuacuccaaguacugguaccugaaccacaccgucacgggccgcaccagccugccccggugcuggcugguguccaacgggagcuaccugaacgagacccacuucuccgacgacaucgagcagcaggcggacaacaugaucaccgagcuccugcagaaggaguacaucgaccgccagggcaagacgccgcugggccugguggaccucuucgucuucagcaccuccuucuaccugaucagcaucuuccugcaccucgugaagauccccacccaccggcacaucaucgggaagcccugccccaagccgcaccgccugaaccacaugggcaucugcuccugcgggcuguacaagcaccccggcgugcccgucaaguggaagcggugaggacuaguaauaaggaaacuguaugaaugucugugggcaggaagugaagagauccuucuguaaagguuuuuggaauuaugucugcugaauaauaaacuuuuuugaaauaauaaaucugguagaaaaaugagaucuaaaaaaaaaaaaaaaaaaaaaaaaaaaaaaaaaaaaaaaaaaaaaaaaaaaaaaaaaaaaaaaaaaaaaaaaaaaaaaaaaaaaaaaaaaaaaaaaaaaa

SEQ ID NO: 29273 - RNA, 1785 nt, Artificial Sequence
  mRNA product Design b-4 (A100) comprising derived and/or modified sequence from LASV(LASV254-NIG-2011;Clade II)__AIT17674__GPCmut5 (opt1)
aggagagucccgcagucggcguccagcggcucugcuuguucgugugugugucguugcaggccuuauucaagcuuaccaugggccagaucaucaccuucuuccaggaggugccccacgucaucgaggaggugaugaacaucgugcugaucgcccucagccugcuggccauccucaaggggaucuacaacgucgcgaccugcggccuguucgggcugguguccuuccuccugcugugcggccgcagcugcuccacgaccuacaaggggguguacgagcuccagacccuggagcuggacaugaccaaccucaacaugacgaugccgcugagcugcaccaagaacaacucccaccacuacaucauggucggcaacgagaccggccuggagcucacccugacgaacaccagcaucaucaaccacaaguucugcaaccuguccgacgcccacaagaagaaccucuacaaccacgcccugaugagcaucaucuccaccuuccaccugagcauccccaacuucaaccaguacgaggccauguccugcgacuucaacgggggcaagaucagcgugcaguacaaccucucccacagcuacgccguggacgcggccaaccacugcgggaccaucgccaacggcguccugcagacguucaugcggauggccuggggcggguccuacaucgcgcuggacagcggcugcgggaacugggacugcaucaugaccuccuaccaguaccucaucauccagaacaccaccugggaggaccacugccaguucagccgccccucccccaucggcuaccuggggcugcucagccagcggacgcgcgacaucuacaucagccggcgccugcugggcaccuucaccuggacccucuccgacagcgagggcaacgagacgcccgggggcuacugccugacccgguggaugcugaucgaggccgagcucaagugcuucgggaacaccgccguggccaagugcaacgagaagcacgacgaggaguucugcgacaugcugcgccuguucgacuucaacaagcaggccauccggcgccucaagaccccggcgcaggccaacauccagcugaucaacaaggccgugaacgcccugaucaacgaccagcucaucaugaagaaccaccuccgggacaucaugugcauccccuacugcaacuacuccaaguacugguaccugaaccacacggucaccggcaagaccagccugccccgcugcuggcugguguccaacgggagcuaccugaacgagacccacuucuccgacgacaucgagcagcaggccgacaacaugaucacggagcuccugcagaaggaguacauggaccggcagggcaagaccccgcugggccugguggaccucuucgucuucagcaccuccuucuaccugaucagcaucuuccugcaccucgugaagauccccacccaccgccacgugaucgggaagcccugccccaagccgcaccggcugaaccacaugggcaucugcuccugcgggcuguacaagcaccccggcguccccgugaaguggaagcgcugaggacuaguaauaaggaaacuguaugaaugucugugggcaggaagugaagagauccuucuguaaagguuuuuggaauuaugucugcugaauaauaaacuuuuuugaaauaauaaaucugguagaaaaaugagaucuaaaaaaaaaaaaaaaaaaaaaaaaaaaaaaaaaaaaaaaaaaaaaaaaaaaaaaaaaaaaaaaaaaaaaaaaaaaaaaaaaaaaaaaaaaaaaaaaaaaa

SEQ ID NO: 29274 - RNA, 1785 nt, Artificial Sequence
  mRNA product Design b-4 (A100) comprising derived and/or modified sequence from LASV(Nig08-A19;Clade III)__ADU56618__GPCmut5 (opt1)
aggagagucccgcagucggcguccagcggcucugcuuguucgugugugugucguugcaggccuuauucaagcuuaccaugggccagaucgugaccuucuuccaggaggucccccacgugaucgaggaggugaugaacaucguccugaucgcccucagcauccuggccauccugaaggggcucuacaacaucgcgaccugcggccugaucgggcuggugacguuccuccugcuguccggccgcagcugcuccaugaccuacaaggggguguacgagcuccagacccuggagcugaacaugaacacccucaacaugacgaugccgcugagcugcaccaagaacaacucccaccacuacaucauggucggcaacgagaccggccuggagcucacccugacgaacaccagccugcuccaccacaaguucugcaaccuguccgacgcccacaagaagaaccuguacgaccacacccucaugagcaucaucuccaccuuccaccugagcauccccaacuucaaccaguacgaggccauguccugcgacuucaacgggggcaagaucacggugcaguacaaccugagccacuccuacgccaucgacgccgcgaaccacugcgggaccguggccaacggcguccuccagaccuucaugcggauggccuggggcgggagcuacaucgcccuggacuccggcugcgggaagugggacugcaucaugaccagcuaccaguaccugaucauccagaacacgaccugggaggaccacugccaguucucccgccccagccccaucggcuaccucgggcugcugucccagcggacccgcgacaucuacaucagccggcgccuccugggcaccuucacguggacccugagcgacuccgagggcaacgagacccccgggggcuacugccucacccgguggaugcugaucgaggcggagcugaagugcuucgggaacacggccguggccaagugcaacgagaagcacgacgaggaguucugcgacaugcuccgccuguucgacuucaacaagcaggccauccggcgccugaaggccccggcgcagaugagcauccagcucaucaacaaggccgugaacgcccugaucaacgaccagcugaucaugaagaaccaccuccgggacaucaugugcauccccuacugcaacuacuccaaguacugguaccugaaccacaccagcaccggccgcaccucccugccccggugcuggcucgucagcaacggguccuaccugaacgagacgcacuucagcgacgacaucgagcagcaggccgacaacaugaucaccgagaugcugcagaaggaguaccuggaccgccagggcaagaccccgcucggccugguggaccuguucguguucuccaccagcuucuaccucaucuccaucuuccugcaccuggucaagauccccacgcaccggcacaucguggggaagcccugccccaagccgcaccgccucaaccacaugggcaucugcagcugcgggcuguacaagcagcccggcgugcccguccgguggaagcgcugaggacuaguaauaaggaaacuguaugaaugucugugggcaggaagugaagagauccuucuguaaagguuuuuggaauuaugucugcugaauaauaaacuuuuuugaaauaauaaaucugguagaaaaaugagaucuaaaaaaaaaaaaaaaaaaaaaaaaaaaaaaaaaaaaaaaaaaaaaaaaaaaaaaaaaaaaaaaaaaaaaaaaaaaaaaaaaaaaaaaaaaaaaaaaaaaa

SEQ ID NO: 29275 - RNA, 1788 nt, Artificial Sequence
  mRNA product Design b-4 (A100) comprising derived and/or modified sequence from LASV(G1180-SLE-2010;Clade IV)__AIT17168__GPCmut5 (opt1)
aggagagucccgcagucggcguccagcggcucugcuuguucgugugugugucguugcaggccuuauucaagcuuaccaugggccagaucgugaccuucuuccaggaggucccccacgugaucgaggaggugaugaacaucguccugaucgcccucagcauccuggccgugcugaaggggcucuacaacuucgcgaccugcggccugguggggcugcucacguuccugcugcucugcggccgcuccugcaccgccagccgguacaagggggucuacgagcugcagacccuggagcucaacauggagacccugaacaugacgaugccgcuguccugcaccaagaacaacagccaccacuacaucauggugggcaacgagaccggccucgagcugacccugacgaacaccuccaucaucaaccacaaguucugcaaccucagcgacgcccacaagaagaaccuguacgaccacgcccugauguccaucaucagcaccuuccaccucuccauccccaacuucaaccaguacgaggccaugagcugcgacuucaacgggggcaagaucuccgugcaguacaaccugagccacuccuacgcgggggacgccgccaaccacugcggcaccgucgccaacggggugcugcagacguucaugcgcauggcguggggcggcagcuacaucgcccucgacuccgggugcggcagcugggacugcaucaugaccuccuaccaguaccugaucauccagaacaccaccugggaggaccacugccaguucagccggcccucccccaucggguaccugggccuccugagccagcgcacgcgggacaucuacaucagccgccggcugcucggcaccuucaccuggacccuguccgacagcgaggggaaggacacgccgggcggguacugccugacccgcuggaugcucaucgaggccgagcugaagugcuucggcaacaccgccguggccaagugcaacgagaagcacgacgaggaguucugcgacaugcugcggcuguucgacuucaacaagcaggcgauccagcgccugaaggcccccgcccagauguccauccagcugaucaacaaggccgucaacgcccucaucaacgaccagcugaucaugaagaaccaccuccgggacaucaugugcauccccuacugcaacuacagcaaguacugguaccucaaccacaccacgaccgggaagaccucccugcccaagugcuggcuggugagcaacggcuccuaccucaacgagacccacuucagcgacgacaucgagcagcaggcggacaacaugaucacggagaugcugcagaaggaguacauggagcgccagggcaagaccccgcuggggcugguggaccucuucgucuucuccaccagcuucuaccugaucuccaucuuccugcaccucgugaagauccccacccaccggcacaucgugggcaagagcugccccaagccccaccgccugaaccacauggggaucugcuccugcggccuguacaagcagccggggguccccgugaaguggaagcggugaggacuaguaauaaggaaacuguaugaaugucugugggcaggaagugaagagauccuucuguaaagguuuuuggaauuaugucugcugaauaauaaacuuuuuugaaauaauaaaucugguagaaaaaugagaucuaaaaaaaaaaaaaaaaaaaaaaaaaaaaaaaaaaaaaaaaaaaaaaaaaaaaaaaaaaaaaaaaaaaaaaaaaaaaaaaaaaaaaaaaaaaaaaaaaaaa

SEQ ID NO: 29276 - RNA, 1788 nt, Artificial Sequence
  mRNA product Design b-4 (A100) comprising derived and/or modified sequence from LASV(G1442-SLE-2011;Clade IV)__AIT17180__GPCmut5 (opt1)
aggagagucccgcagucggcguccagcggcucugcuuguucgugugugugucguugcaggccuuauucaagcuuaccaugggccagaucgugaccuucuuccaggaggucccccacgugaucgaggaggugaugaacaucguccugaucgcccucagcauccuggccgugcugaaggggcucuacaacguggcgaccugcggccugaucgggcuggucacguuccuccugcugugcggccgcuccugcaccaccacccucuacaaggggguguacgagcugcagacgcuggagcucaacauggagacccugaacaugaccaugccgcugagcugcaccaagaacaacucccaccacuacauccgggugggcaacgagacgggccucgagcugacccugaccaacaccagcaucaucaaccacaaguucugcaaccucuccgacgcccacaagaagaaccuguacgaccacgcccugaugagcaucaucuccacguuccaccucagcauccccaacuucaaccaguacgaggccauguccugcgacuucaacgggggcaagaucagcguccaguacaaccugucccacagcuacgccggggacgcggccaaccacugcggcaccguggccaacggggugcugcagaccuucaugcgcauggccuggggcggcuccuacaucgcgcucgacagcgggugcggcaacugggacugcaucaugaccuccuaccaguaccugaucauccagaacacgaccugggacgaccacugccaguucagccggcccucccccaucggguaccugggccuccugagccagcgcacccgggacgucuacaucucccgccggcugcucggcaccuucacguggacccugagcgacagcgaggggaaggacaccccgggcggguacugccugacccgcuggaugcucaucgaggccgagcugaagugcuucggcaacacggccguggccaagugcaacgagaagcacgacgaggaguucugcgacaugcugcggcuguucgacuucaacaagcaggccauccagcgccugaaggcgcccgcccagauguccauccagcugaucaacaaggccgugaacgcccucaucaacgaccagcugaucaugaagaaccaccuccgggacaucaugugcauccccuacugcaacuacagcaaguacugguaccucaacaacaccgccaccgggaagaccucccugcccaagugcuggcugaucagcaacggcuccuaccucaacgagacgcacuucagcgacgacaucgagcaggaggcggacaacaugaucaccgagaugcugcagaaggaguacauggagcgccagggcaagaccccgcuggggcuggucgaccucuucguguucuccaccagcuucuaccugaucuccaucuuccugcaccucgugaagauccccacgcaccggcacaucgucggcaagagcugccccaagccccaccgccugaaccacauggggaucugcuccugcggccuguacaagcagccgggggugcccgugcgguggaagcgcugaggacuaguaauaaggaaacuguaugaaugucugugggcaggaagugaagagauccuucuguaaagguuuuuggaauuaugucugcugaauaauaaacuuuuuugaaauaauaaaucugguagaaaaaugagaucuaaaaaaaaaaaaaaaaaaaaaaaaaaaaaaaaaaaaaaaaaaaaaaaaaaaaaaaaaaaaaaaaaaaaaaaaaaaaaaaaaaaaaaaaaaaaaaaaaaaa

SEQ ID NO: 29277 - RNA, 1788 nt, Artificial Sequence
  mRNA product Design b-4 (A100) comprising derived and/or modified sequence from LASV(G3010-SLE-2013;Clade IV)__AIT17344__GPCmut5 (opt1)
aggagagucccgcagucggcguccagcggcucugcuuguucgugugugugucguugcaggccuuauucaagcuuaccaugggccagaucgugaccuucuuccaggaggucccccacgugaucgaggaggugaugaacaucguccugaucgcccucagcauccuggccgugcugaaggggcucuacaacuucgcgaccugcggccugguggggcuggucacguuccuccugcugugcggccgcuccugcaccaccagccucuacaaggggguguacgagcugcagacccuggagcucaacauggagacgcugaacaugaccaugccgcuguccugcaccaagaacaacagccaccacuacaucauggugggcaacgagaccggccucgagcugacgcugaccaacaccuccaucaucaaccacaaguucugcaaccucagcgacgcccacaagaagaaccuguacaaccacgcccugauguccaucaucagcaccuuccaccucuccauccccaacuucaaccaguacgaggccaugagcugcgacuucaacgggggcaagaucuccguccaguacaaccugagccacuccuacgccggggacgcggccagccacugcggcacgguggccaacggggugcugcagaccuucaugcggauggccuggggcggcuccuacaucgcgcucgacagcgggugcggcaagugggacugcaucaugaccuccuaccaguaccugaucauccagaacaccacgugggaggaccacugccaguucagccgccccucccccaucggguaccugggccuccugagccagcggacccgcgacaucuacaucagccggcgccugcucggcaccuucaccuggacgcuguccgacagcgaggggaaggacaccccgggcggguacugccugacccgguggaugcucaucgaggccgagcugaagugcuucggcaacaccgccgucgccaagugcaacgagaagcacgacgaggaguucugcgacaugcugcgccucuucgacuucaacaagcaggccauccagcggcugaagacgcccgcgcagauguccauccagcugaucaacaaggccgugaacgcccucaucaacgaccagcugaucaugaagaaccaccuccgcgacaucaugugcauccccuacugcaacuacagcaaguacugguaccugaaccacaccaccaccgggaagacgucccugcccaagugcuggcuggugagcaacggcuccuaccucaacgagacccacuucagcgacgacaucgagcagcaggccgacaacaugaucaccgagaugcugcagaaggaguacauggagcggcagggcaagaccccgcuggggcuggucgaccucuucguguucuccacgagcuucuaccugaucuccaucuuccugcaccucgugaagauccccacccaccgccacaucgucggcaagagcugccccaagccccaccggcugaaccacauggggaucugcuccugcggccuguacaagcagccgggggugcccgugcgcuggaagcggugaggacuaguaauaaggaaacuguaugaaugucugugggcaggaagugaagagauccuucuguaaagguuuuuggaauuaugucugcugaauaauaaacuuuuuugaaauaauaaaucugguagaaaaaugagaucuaaaaaaaaaaaaaaaaaaaaaaaaaaaaaaaaaaaaaaaaaaaaaaaaaaaaaaaaaaaaaaaaaaaaaaaaaaaaaaaaaaaaaaaaaaaaaaaaaaaa

SEQ ID NO: 29278 - RNA, 1788 nt, Artificial Sequence
  mRNA product Design b-4 (A100) comprising derived and/or modified sequence from LASV(G502-SLE-2009;Clade IV)__AIT17126__GPCmut5 (opt1)
aggagagucccgcagucggcguccagcggcucugcuuguucgugugugugucguugcaggccuuauucaagcuuaccaugggccagaucgugaccuucuuccaggaggucccccacgugaucgaggaggugaugaacaucguccugaucgcccucagcauccuggccgugcugaaggggcucuacaacuucgcgaccugcggccugguggggcugcucacguuccugcugcucugcggccgcuccugcaccaccgggcuguacaagggcgucuacgagcugcagacccucgagcugaacauggagacgcugaacaugaccaugccgcucagcugcaccaagaacaacucccaccacuacaucauggugggcaacgagaccgggcuggagcugacgcucaccaacaccagcaucaucaaccacaaguucugcaaccuguccgacgcccacaagaagaaccuguacgaccacgcccucaugagcaucaucuccaccuuccaccugagcauccccaacuucaaccaguacgaggccauguccugcgacuucaacggcgggaagaucagcgugcaguacaaccugucccacagcuacgccggcgacgcggccgaccacugcgggacggucgccaacggcgugcuccagaccuucaugcggauggccuggggcggguccuacaucgcgcuggacagcggcugcgggcgcugggacugcaucaugaccuccuaccaguaccugaucauccagaacaccacgugggaggaccacugccaguucagccggcccucccccaucggcuaccucggccugcugagccagcgcacccgggacaucuacaucucccgccggcuccuggggaccuucaccuggacgcugagcgacagcgagggcaaggacacccccgggggcuacugccucacccgcuggaugcugaucgaggccgagcugaagugcuucgggaacaccgccguggccaagugcaacgagaagcacgacgaggaguucugcgacaugcuccggcuguucgacuucaacaagcaggccauccagcgccugaaggcgccggcccagauguccauccagcucaucaacaaggccgucaacgcccugaucaacgaccagcuggugaugaagaaccaccuccgggacaucaugugcauccccuacugcaacuacagccgcuacugguaccugaaccacacgaccaccggccggaccucccugcccaagugcuggcucgugagcaacggcuccuaccugaacgagacgcacuucagcgacgacaucgagcagcaggccgacaacaugaucaccgagaugcugcagaaggaguacauggagcgccaggggaagaccccgcugggccucgucgaccuguucguguucuccaccagcuucuaccugaucuccaucuuccuccaccuggugaagauccccacgcaccggcacaucgucggcaagagcugccccaagccccaccgccugaaccacauggggaucugcuccugcgggcucuacaagcagccgggcgugcccgugaaguggaagcggugaggacuaguaauaaggaaacuguaugaaugucugugggcaggaagugaagagauccuucuguaaagguuuuuggaauuaugucugcugaauaauaaacuuuuuugaaauaauaaaucugguagaaaaaugagaucuaaaaaaaaaaaaaaaaaaaaaaaaaaaaaaaaaaaaaaaaaaaaaaaaaaaaaaaaaaaaaaaaaaaaaaaaaaaaaaaaaaaaaaaaaaaaaaaaaaaa

SEQ ID NO: 29279 - RNA, 1788 nt, Artificial Sequence
  mRNA product Design b-4 (A100) comprising derived and/or modified sequence from LASV(G733-SLE-2010;Clade IV)__AIT17154__GPCmut5 (opt1)
aggagagucccgcagucggcguccagcggcucugcuuguucgugugugugucguugcaggccuuauucaagcuuaccaugggccagaucgugaccuucuuccaggaggucccccacgugaucgaggaggugaugaacaucguccugaucgcccucagcauccuggccgugcugaaggggcucuacaacuucgcgaccugcggcaucguggggcuggucuccuuccugcuccugugcggccgcagcugcacgaccucccuguacaaggggguguacgagcuccagacccuggagcugaacauggagacccucaacaugacgaugccgcugagcugcaccaagaacaacucccaccacuacaucauggugggcaacgagaccggccuggagcucacccugacgaacaccagcaucaucaaccacaaguucugcaaccuguccgacgcccacaagaagaaccucuacgaccacgcccugaugagcaucaucuccaccuuccaccugagcauccccaacuucaaccaguacgaggccauguccugcgacuucaacgggggcaagaucagcguccaguacaaccucucccacagcuacgccggggacgcggccaaccacugcggcaccaucgccaacggggugcugcagacguucaugcggauggccuggggcggcuccuacaucgcgcuggacagcgggugcgaccgcugggacugcaucaugaccuccuaccaguaccucaucauccagaacaccaccugggaggaccacugccaguucagccggcccucccccaucggcuaccuggggcugcucagccagcgcacgcgggacaucuacaucagccgccggcugcugggcaccuucaccuggacccucuccgacagcgagggcaaggacacgcccgggggcuacugccugacccgcuggaugcugaucgaggccgagcucaagugcuucgggaacaccgccguggccaagugcaacgagaagcacgacgaggaguucugcgacaugcugcggcuguucgacuucaacaagcaggccauccagcgccucaaggcgccggcccagauguccauccagcugaucaacaaggccgucaacgcccugaucaacgaccagcucaucaugaagaaccaccuccgggacaucaugugcauccccuacugcaacuacagcaaguacugguaccugaaccacaccacgaccggcaagaccucccugcccaagugcuggcuggugagcaacggguccuaccugaacgagacccacuucagcgacgacaucgagcagcaggccgacaacaugaucacggagaugcuccagaaggaguacauggagcgccagggcaagaccccgcugggccugguggaccuguucgucuucuccaccagcuucuaccucaucuccaucuuccugcaccuggugaagauccccacccaccggcacguggucggcaagagcugccccaagccccaccgccucaaccacauggggaucugcuccugcgggcuguacggccagccgggggugcccgugaaguggaagcggugaggacuaguaauaaggaaacuguaugaaugucugugggcaggaagugaagagauccuucuguaaagguuuuuggaauuaugucugcugaauaauaaacuuuuuugaaauaauaaaucugguagaaaaaugagaucuaaaaaaaaaaaaaaaaaaaaaaaaaaaaaaaaaaaaaaaaaaaaaaaaaaaaaaaaaaaaaaaaaaaaaaaaaaaaaaaaaaaaaaaaaaaaaaaaaaaa

SEQ ID NO: 29280 - RNA, 1788 nt, Artificial Sequence
  mRNA product Design b-4 (A100) comprising derived and/or modified sequence from MOPV/LASV reassortant(IGS-1;Clade IV)__AFY05576__GPCmut5 (opt1)
aggagagucccgcagucggcguccagcggcucugcuuguucgugugugugucguugcaggccuuauucaagcuuaccaugggccagaucgugaccuucuuccaggaggucccccacgugaucgaggaggugaugaacaucguccugaucgcccucagcgugcuggccgugcugaaggggcucuacaacuucgcgaccugcggccuggucgggcuggugacguuccuccugcugugcggccgcuccugcaccaccagccucuacaaggggguguacgagcugcagacccuggagcucaacauggagacgcugaacaugaccaugccgcuguccugcaccaagaacaacagccaccacuacaucauggucggcaacgagaccggccucgagcugacgcugaccaacaccuccaucaucaaccacaaguucugcaaccucagcgacgcccacaagaagaaccuguacgaccacgcccugauguccaucaucagcaccuuccaccucuccauccccaacuucaaccaguacgaggccaugagcugcgacuucaacgggggcaagaucuccgugcaguacaaccugagccacuccuacgccggggacgcggccaaccacugcggcacgguggccaacgggguccugcagaccuucaugcggauggccuggggcggcagcuacaucgcgcucgacuccgggugcggcaacugggacugcaucaugaccagcuaccaguaccugaucauccagaacaccacgugggaggaccacugccaguucucccgccccagccccaucggguaccugggccuccugucccagcggacccgcgacaucuacaucagccggcgccugcucggcaccuucaccuggacgcugagcgacuccgagggggaggacaccccgggcggguacugccugacccgguggaugcucaucgaggccgagcugaagugcuucggcaacaccgccguggccaagugcaacgagaagcacgacgaggaguucugcgacaugcugcgccucuucgacuucaacaagcaggccauccagcggcugaaggcgcccgcccagaugagcauccagcugaucaacaaggccgugaacgcccucaucaacgaccagcugaucaugaagaaccaccuccgcgacaucaugugcauccccuacugcaacuacuccaaguacugguaccugaaccacacgaccaccgggcggaccagccugcccaagugcuggcuggucuccaacggcagcuaccucaacgagacgcacuucuccgacgacaucgagcagcaggccgacaacaugaucaccgagaugcugcagaaggaguacauggagcgccagggcaagaccccgcuggggcugguggaccucuucguguucagcaccuccuucuaccugaucagcaucuuccugcaccucgucaagauccccacgcaccggcacaucgugggcaaguccugccccaagccccaccgccugaaccacauggggaucugcagcugcggccuguacaagcagccgggggugcccgucaaguggaagcggugaggacuaguaauaaggaaacuguaugaaugucugugggcaggaagugaagagauccuucuguaaagguuuuuggaauuaugucugcugaauaauaaacuuuuuugaaauaauaaaucugguagaaaaaugagaucuaaaaaaaaaaaaaaaaaaaaaaaaaaaaaaaaaaaaaaaaaaaaaaaaaaaaaaaaaaaaaaaaaaaaaaaaaaaaaaaaaaaaaaaaaaaaaaaaaaaa

SEQ ID NO: 29281 - RNA, 1788 nt, Artificial Sequence
  mRNA product Design b-4 (A100) comprising derived and/or modified sequence from LASV(LM765-SLE-2012;Clade IV)__AIT17814__GPCmut5 (opt1)
aggagagucccgcagucggcguccagcggcucugcuuguucgugugugugucguugcaggccuuauucaagcuuaccaugggccagaucgugaccuucuuccaggaggucccccacgugaucgaggaggugaugaacaucguccugaucgcccucagcauccuggccgugcugaaggggcucuacaacuucgcgaccugcggccugguggggcuggucacguuccuccugcugugcggccgcuccugcaccaccagccucuacaaggggguguacgagcugcagacccuggagcucaacauggagacgcugaacaugaccaugccgcuguccugcaccaagaacaacagccaccacuacaucauggugggcaacgagaccggccucgagcugacgcugaccaacaccuccaucaucgaccacaaguucugcaaccucagcgacgcccaccggaagaaccuguacgaccacgcccugauguccaucaucagcaccuuccaccucuccauccccaacuucaaccaguacgaggccaugagcugcgacuucaacgggggcaagaucuccguccaguacaaccugagccacuccuacgccaaggacgcggccgaccacugcgggacgguggccaacggcgugcugcagaccuucaugcgcauggccuggggcgggagcuacaucgcgcucgacuccggcugcgggcggugggacugcaucaugaccagcuaccaguaccugaucauccagaacaccacgugggaggaccacugccaguucucccgccccagccccaucggcuaccuggggcuccugucccagcggacccgcgacaucuacaucagccggcgccugcucggcaccuucaccuggacgcugagcgacuccgagggcaaggacacccccgggggcuacugccugacccgguggaugcucaucgaggccgagcugaagugcuucgggaacaccgccgucgccaagugcaacgagaagcacgacgaggaguucugcgacaugcugcgccucuucgacuucaacaagcaggccauccagcggcugaaggcgccggcccagaugagcauccagcugaucaacaaggccgugaacgcccucaucaacgaccagcugaucaugaagaaccaccuccgcgacaucaugugcauccccuacugcaacuacuccaaguacugguaccugaaccacacgaccaccggcaagaccagccugcccaagugcuggcugguguccaacgggagcuaccucaacgagacgcacuucuccgacgacaucgagcagcaggccgacaacaugaucaccgagaugcugcagaaggaguacauggagcggcagggcaagaccccgcugggccuggucgaccucuucguguucagcaccuccuucuaccugaucagcaucuuccugcaccucgugaagauccccacgcaccgccacaucgucgggaagcccugccccaagccgcaccggcugaaccacaugggcaucugcuccugcgggcuguacaagcagcccggcgugcccgugaaguggaagcgcugaggacuaguaauaaggaaacuguaugaaugucugugggcaggaagugaagagauccuucuguaaagguuuuuggaauuaugucugcugaauaauaaacuuuuuugaaauaauaaaucugguagaaaaaugagaucuaaaaaaaaaaaaaaaaaaaaaaaaaaaaaaaaaaaaaaaaaaaaaaaaaaaaaaaaaaaaaaaaaaaaaaaaaaaaaaaaaaaaaaaaaaaaaaaaaaaa

SEQ ID NO: 29282 - RNA, 1788 nt, Artificial Sequence
  mRNA product Design b-4 (A100) comprising derived and/or modified sequence from LASV(LM776-SLE-2012;Clade IV)__AIT17824__GPCmut5 (opt1)
aggagagucccgcagucggcguccagcggcucugcuuguucgugugugugucguugcaggccuuauucaagcuuaccaugggccagaucgugaccuucuuccaggaggucccccacgugaucgaggaggugaugaacaucguccugaucgcccucagcauccuggccgugcugaaggggcucuacaacuucgcgaccugcggccugguggggcuggucacguuccuccugcugugcggccgcuccugcaccaccagcguguacaaggggguguacgagcuccagacccuggagcugaacauggagacgcucaacaugaccaugccgcuguccugcaccaagaacaacagccaccacuacaucauggucggcaacgagaccggccuggagcucacgcugaccaacaccuccaucaucaaccacaaguucugcaaccugagcgacgcccacaagaagaaccucuacgaccacgcccugauguccaucaucagcaccuuccaccuguccauccccaacuucaaccaguacgaggccaugagcugcgacuucaacgggggcaagaucuccgugcaguacaaccucagccacuccuacgccggggacgcggccaaccacugcggcacgguggccaacgggguccugcagaccuucaugcggauggccuggggcggcagcuacaucgcgcuggacuccgggugcggcaagugggacugcaucaugaccagcuaccaguaccucaucauccagaacaccacgugggaggaccacugccaguucucccgccccagccccaucggguaccugggccugcucucccagcggacccgcgacaucuacaucagccggcgccugcugggcaccuucaccuggacgcucagcgacuccgaggggaaggacaccccgggcggguacugccugacccgguggaugcugaucgaggccgagcucaagugcuucggcaacaccgccguggccaagugcaacgagaagcacgacgaggaguucugcgacaugcugcgccuguucgacuucaacaagcaggccauccagcggcucaaggcgcccgcccagaugagcauccagcugaucaacaaggccgugaacgcccugaucaacgaccagcucaucaugaagaaccaccuccgcgacaucaugugcauccccuacugcaacuacuccaaguacugguaccugaaccacacgaccaccgggaagaccagccugcccaagugcuggcuggucuccaacggcagcuaccugaacgagacgcacuucuccgacgacaucgagcagcaggccgacaacaugaucaccgagaugcuccagaaggaguacauggagcggcagggcaagaccccgcuggggcugguggaccuguucguguucagcaccuccuucuaccucaucagcaucuuccugcaccuggucaagauccccacgcaccgccacaucgugggcaaguccugccccaagccccaccggcucaaccacauggggaucugcagcugcggccuguacaagcagccgggggugcccguccgcuggaagcggugaggacuaguaauaaggaaacuguaugaaugucugugggcaggaagugaagagauccuucuguaaagguuuuuggaauuaugucugcugaauaauaaacuuuuuugaaauaauaaaucugguagaaaaaugagaucuaaaaaaaaaaaaaaaaaaaaaaaaaaaaaaaaaaaaaaaaaaaaaaaaaaaaaaaaaaaaaaaaaaaaaaaaaaaaaaaaaaaaaaaaaaaaaaaaaaaa

SEQ ID NO: 29283 - RNA, 1788 nt, Artificial Sequence
  mRNA product Design b-4 (A100) comprising derived and/or modified sequence from LASV(Mad39;Clade IV)__ANH09722__GPCmut5 (opt1)
aggagagucccgcagucggcguccagcggcucugcuuguucgugugugugucguugcaggccuuauucaagcuuaccaugggccagaucgugaccuucuuccaggaggucccccacgugaucgaggaggugaugaacaucguccugaucgcccucagcauccuggccgugcugaaggggcucuacaacguggcgaccugcggccugaucgggcuggucacguuccuccugcugugcggccgcuccugcaccaccacccucuacaaggggguguacgagcugcaggcccuggagcucaacauggagacgcugaacaugaccaugccgcugagcugcaccaagaacaacucccaccacuacauccgggugggcaacgagaccggccucgagcugacgcugaccaacaccagccucaucaaccacaaguucugcaaccuguccgacgcccacaagaagaaccuguacgaccacgcccucaugagcaucaucuccaccuuccaccugagcauccccaacuucaaccaguacgaggccauguccugcgacuucaacgacgggaagaucagcguccaguacaaccugucccacacguacgcgggcgacaccgccaaccacugcgggaccguggccaacggcgugcuccagaccuucaugcgcauggccuggggcgggagcuacaucgcgcuggacuccggcugcgggggcugggacugcaucaugacgagcuaccaguaccugaucauccagaacaccaccugggaggaccacugccaguucucccggcccagccccaucggguaccucggccugcugucccagcgcacccgggacaucuacaucagccgccggcuccugggcacguucaccuggacccuguccgacagcgaggggaaggacaccccgggcggguacugccucacgcgcuggaugcugaucgaggccgagcugaagugcuucggcaacaccgccgucgccaagugcaacgagaagcacgacgaggaguucugcgacaugcuccggcuguucgacuucaacaagcaggccauccagcgccugaaggcgcccgcccagaugagcauccagcucaucaacaaggccgugaacgcccugaucaacgaccagcugaucaugaagaaccaccuccgggacaucaugugcauccccuacugcaacuacuccaaguacugguaccugaaccacaccgugaccgggaagacgagccugcccaagugcuggcucgucuccaacggcagcuaccugaacgagacccacuucuccgacgacaucgagcagcaggccgacaacaugaucaccgagaugcugcagaaggaguacauggagcgccagggcaagaccccgcuggggcucguggaccuguucguguucagcacguccuucuaccugaucagcaucuuccuccaccuggucaagauccccacccaccggcacguggugggcaagcccugccccaagccgcaccgccugaaccacauggggaucugcuccugcggcuucuacaagcagcccgggguccccgugcgguggaagcgcugaggacuaguaauaaggaaacuguaugaaugucugugggcaggaagugaagagauccuucuguaaagguuuuuggaauuaugucugcugaauaauaaacuuuuuugaaauaauaaaucugguagaaaaaugagaucuaaaaaaaaaaaaaaaaaaaaaaaaaaaaaaaaaaaaaaaaaaaaaaaaaaaaaaaaaaaaaaaaaaaaaaaaaaaaaaaaaaaaaaaaaaaaaaaaaaaa

SEQ ID NO: 29284 - RNA, 1788 nt, Artificial Sequence
  mRNA product Design b-4 (A100) comprising derived and/or modified sequence from LASV(Z0947-SLE-2011;Clade IV)__AIT17840__GPCmut5 (opt1)
aggagagucccgcagucggcguccagcggcucugcuuguucgugugugugucguugcaggccuuauucaagcuuaccaugggccagaucgugaccuucuuccaggaggucccccacgugaucgaggaggugaugaacaucguccugaucgcccucagcauccuggccgugcugaaggggcucuacaacuucgcgaccugcggccugguggggcuggucacguuccuccugcugugcggccgcuccugcaccaucagccucuacaaggggguguacgagcugcagacccuggagcucaacauggagacccugaacaugacgaugccgcuguccugcaccaagaacaacagccaccacuacaucauggugggcaacgagaccggccucgagcugacccugacgaacaccuccaucaucaaccacaaguucugcaaccucagcgacgcccacaagaagaaccuguacgaccacgcccugauguccaucaucagcaccuuccaccucuccauccccaacuucaaccaguacgaggccaugagcugcgacuucaacgggggcaagaucuccguccaguacaaccugagccacuccuacgccggggacgcggccaaccacugcggcaccguggccaacggggugcugcagacguucaugcggauggccuggggcggcagcuacaucgcgcucgacuccgggugcgaccgcugggacugcaucaugaccagcuaccaguaccugaucauccagaacaccaccugggaggaccacugccaguucucccggcccagccccaucggcuaccuggggcuccugucccagcgcacgcgggacaucuacaucagccgccggcugcucggcaccuucaccuggacccugagcgacuccgagggcaaggacacgcccgggggcuacugccugacccgcuggaugcucaucgaggccgagcugaagugcuucgggaacaccgccgucgccaagugcaacgagaagcacgacgaggaguucugcgacaugcugcggcuguucgacuucaacaagcaggccauccagcgccugaaggcgccggcccagaugagcauccagcugaucaacaaggccgugaacgcccucaucaacgaccagcugaucaugaagaaccaccuccgggacaucaugugcauccccuacugcaacuacuccaaguacugguaccucaaccacaccacgaccggcaagaccagccugcccaagugcuggcugguguccaacgggagcuaccucaacgagacccacuucuccgacgacaucgagcagcaggccgacaacaugaucacggagaugcugcagaaggaguacauggagcgccagggcaagaccccgcugggccuggucgaccucuucguguucagcaccuccuucuaccugaucagcaucuuccugcaccucgugaagauccccacccaccggcacaucgucgggaagcccugccccaagccgcaccgccugaaccacaugggcaucugcuccugcgggcuguacaagcagcccggcgugcccgugaaguggaagcggugaggacuaguaauaaggaaacuguaugaaugucugugggcaggaagugaagagauccuucuguaaagguuuuuggaauuaugucugcugaauaauaaacuuuuuugaaauaauaaaucugguagaaaaaugagaucuaaaaaaaaaaaaaaaaaaaaaaaaaaaaaaaaaaaaaaaaaaaaaaaaaaaaaaaaaaaaaaaaaaaaaaaaaaaaaaaaaaaaaaaaaaaaaaaaaaaa

SEQ ID NO: 29285 - RNA, 1788 nt, Artificial Sequence
  mRNA product Design b-4 (A100) comprising derived and/or modified sequence from LASV(Josiah;Clade IV)__NP_694870__GPCmut5 (opt4)
aggagagucccgcagucggcguccagcggcucugcuuguucgugugugugucguugcaggccuuauucaagcuuaccaugggccagaucgugaccuucuuccaggaggugccccacgugaucgaggaggugaugaacaucgugcugaucgcccugagcgugcuggccgugcugaagggccuguacaacuucgccaccugcggccuggugggccuggugaccuuccugcugcugugcggcagaagcugcaccaccagccuguacaagggcguguacgagcugcagacccuggagcugaacauggagacccugaacaugaccaugccccugagcugcaccaagaacaacagccaccacuacaucauggugggcaacgagaccggccuggagcugacccugaccaacaccagcaucaucaaccacaaguucugcaaccugagcgacgcccacaagaagaaccuguacgaccacgcccugaugagcaucaucagcaccuuccaccugagcauccccaacuucaaccaguacgaggccaugagcugcgacuucaacggcggcaagaucagcgugcaguacaaccugagccacagcuacgccggcgacgccgccaaccacugcggcaccguggccaacggcgugcugcagaccuucaugagaauggccuggggcggcagcuacaucgcccuggacagcggcugcggcaacugggacugcaucaugaccagcuaccaguaccugaucauccagaacaccaccugggaggaccacugccaguucagcagacccagccccaucggcuaccugggccugcugagccagagaaccagagacaucuacaucagcagaagacugcugggcaccuucaccuggacccugagcgacagcgagggcaaggacacccccggcggcuacugccugaccagauggaugcugaucgaggccgagcugaagugcuucggcaacaccgccguggccaagugcaacgagaagcacgacgaggaguucugcgacaugcugagacuguucgacuucaacaagcaggccauccagagacugaaggcccccgcccagaugagcauccagcugaucaacaaggccgugaacgcccugaucaacgaccagcugaucaugaagaaccaccugagagacaucaugugcauccccuacugcaacuacagcaaguacugguaccugaaccacaccaccaccggcagaaccagccugcccaagugcuggcuggugagcaacggcagcuaccugaacgagacccacuucagcgacgacaucgagcagcaggccgacaacaugaucaccgagaugcugcagaaggaguacauggagagacagggcaagaccccccugggccugguggaccuguucguguucagcaccagcuucuaccugaucagcaucuuccugcaccuggugaagauccccacccacagacacaucgugggcaagagcugccccaagccccacagacugaaccacaugggcaucugcagcugcggccuguacaagcagcccggcgugcccgugaaguggaagagaugaggacuaguaauaaggaaacuguaugaaugucugugggcaggaagugaagagauccuucuguaaagguuuuuggaauuaugucugcugaauaauaaacuuuuuugaaauaauaaaucugguagaaaaaugagaucuaaaaaaaaaaaaaaaaaaaaaaaaaaaaaaaaaaaaaaaaaaaaaaaaaaaaaaaaaaaaaaaaaaaaaaaaaaaaaaaaaaaaaaaaaaaaaaaaaaaa

SEQ ID NO: 29286 - RNA, 1785 nt, Artificial Sequence
  mRNA product Design b-4 (A100) comprising derived and/or modified sequence from LASV(LP;Clade I)__AAF86701__GPCmut5 (opt4)
aggagagucccgcagucggcguccagcggcucugcuuguucgugugugugucguugcaggccuuauucaagcuuaccaugggccagaucaucaccuucuuccaggaggugccccacgugaucgaggaggugaugaacaucgugcugaucgcccugagccugcuggccauccugaagggccuguacaacaucgccaccugcggcaucaucggccugguggccuuccuguuccugugcggcaagagcugcagccugacccugaagggcggcuacgagcugcagacccuggagcugaacauggagacccugaacaugaccaugccccugagcugcaccaagaacagcagccaccacuacaucagagugggcaacgagaccggccuggagcugacccugaccaacaccagcaucaucaaccacaaguucugcaaccugagcgacgcccacaagaagaaccuguacgaccacgcccugaugagcaucaucagcaccuuccaccugagcauccccaacuucaaccaguacgaggccaugagcugcgacuucaacggcggcaagaucagcgugcaguacaaccugagccacagcuacgccggcgacgccgccgagcacugcggcaccguggccaacggcgugcugcagaccuucaugagaauggccuggggcggcagauacaucgcccuggacagcggcugcggcaacugggacugcaucaugaccagcuaccaguaccugaucauccagaacaccaccugggaggaccacugccaguucagcagacccagccccaucggcuaccugggccugcugagccagagaaccagagacaucuacaucagcagaagacugcugggcaccuucaccuggacccugagcgacagcgagggcaacgagacccccggcggcuacugccugaccagauggaugcugaucgaggccgagcugaagugcuucggcaacaccgccguggccaagugcaacgagaagcacgacgaggaguucugcgacaugcugagacuguucgacuucaacaagcaggccaucagaagacugaaggcccccgcccagaugagcauccagcugaucaacaaggccgugaacgcccugaucaacgaccagcugaucaugaagaaccaccugagagacaucaugugcauccccuacugcaacuacagcaaguacugguaccugaaccacaccagcagcggcagaaccagccugcccaagugcuggcugaucagcaacggcagcuaccugaacgagacccaguucagcgacgacaucgagcagcaggccgacaacaugaucaccgagaugcugcagaaggaguacaucgagagacagggcaagaccccccugggccugguggacaucuucaucuucagcaccagcuucuaccugaucagcaucuuccugcaccugaucaagauccccacccacagacacaucgugggcaagcccugccccaagccccacagacugaaccacaugggcgugugcagcugcggccuguacaagcaccccggcgugcccaccaaguggaagagaugaggacuaguaauaaggaaacuguaugaaugucugugggcaggaagugaagagauccuucuguaaagguuuuuggaauuaugucugcugaauaauaaacuuuuuugaaauaauaaaucugguagaaaaaugagaucuaaaaaaaaaaaaaaaaaaaaaaaaaaaaaaaaaaaaaaaaaaaaaaaaaaaaaaaaaaaaaaaaaaaaaaaaaaaaaaaaaaaaaaaaaaaaaaaaaaaa

SEQ ID NO: 29287 - RNA, 1785 nt, Artificial Sequence
  mRNA product Design b-4 (A100) comprising derived and/or modified sequence from LASV(803213;Clade II)__AAF86703__GPCmut5 (opt4)
aggagagucccgcagucggcguccagcggcucugcuuguucgugugugugucguugcaggccuuauucaagcuuaccaugggccagaucaucaccuucuuccaggaggugccccacgugaucgaggaggugaugaacaucgugcugaucgcccugagccugcuggccauccugaagggcaucuacaacguggccaccugcggccuguucggccugaucagcuuccugcugcugugcggcagaagcugcagcgugaccuacaagggcguguacgagcugcagacccuggagcugaacauggccaaccugaacaugaccaugccccugagcugcaccaagaacaacagccaccacuacaucauggugggcaacgagaccggccuggagcugacccugaccaacaccagcaucaucaaccacaaguucugcaaccugagcgacgcccacaagaagaaccuguacgaccacgcccugaugagcaucaucagcaccuuccaccugagcauccccaacuucaaccaguacgaggccaugagcugcgacuucaacggcggcaagaucagcgugcaguacaaccugagccacagcuucgccguggacgccgccaaccacugcggcaccaucgccaacggcgugcugcagaccuucaugagaauggccuggggcggcagcuacaucgcccuggacagcggcugcggcaacugggacugcaucaugaccagcuaccaguaccugaucauccagaacaccaccugggaggaccacugccaguucagcagacccagccccaucggcuaccugggccugcugagccagagaaccagagacaucuacaucagcagaagacugcugggcaccuucaccuggacccugagcgacagcgagggcaacgaggcccccggcggcuacugccugaccagauggaugcugaucgaggccgagcugaagugcuucggcaacaccgccguggccaagugcaacgagaagcacgacgaggaguucugcgacaugcugagacuguucgacuucaacaagcaggccaucaagagacugaagacccccgcccagaugagcauccagcugaucaacaaggccgugaacgcccugaucaacgaccagcugaucaugaagaaccaccugagagacaucaugugcauccccuacugcaacuacagcagauacugguaccugaaccacaccgugaccggcaagaccagccugcccagaugcuggcuggugagcaacggcagcuaccugaacgagacccacuucagcgacgacaucgagcagcaggccgacaacaugaucaccgagaugcugcagaaggaguacauggacagacagggcaagaccccccugggccugguggaccuguucguguucagcaccagcuucuaccugaucagcaucuuccugcaccuggugaagauccccacccacagacacaucgugggcaagcccugccccaagccccacagacugaaccacaugggcaucugcagcugcggccuguacaagcaccccggcgugcccgugaaguggaagagaugaggacuaguaauaaggaaacuguaugaaugucugugggcaggaagugaagagauccuucuguaaagguuuuuggaauuaugucugcugaauaauaaacuuuuuugaaauaauaaaucugguagaaaaaugagaucuaaaaaaaaaaaaaaaaaaaaaaaaaaaaaaaaaaaaaaaaaaaaaaaaaaaaaaaaaaaaaaaaaaaaaaaaaaaaaaaaaaaaaaaaaaaaaaaaaaaa

SEQ ID NO: 29288 - RNA, 1785 nt, Artificial Sequence
  mRNA product Design b-4 (A100) comprising derived and/or modified sequence from LASV(GA391;Clade III)__CAA36645__GPCmut5 (opt4)
aggagagucccgcagucggcguccagcggcucugcuuguucgugugugugucguugcaggccuuauucaagcuuaccaugggccagaucgugaccuucuuccaggaggugccccacgugaucgaggaggugaugaacaucgugcugaucgcccugagcauccuggccauccugaagggccuguacaacguggccaccugcggccugaucggccuggugaccuuccugcugcugagcggcagaagcugcagccugaucuacaagggcaccuacgagcugcagacccuggagcugaacauggagacccugaacaugaccaugccccugagcugcaccaagaacaacagccaccacuacaucagagugggcaacgagaccggccuggagcugacccugaccaacaccagcauccugaaccacaaguucugcaaccugagcgacgcccacaagagaaaccuguacgaccacagccugaugagcaucaucagcaccuuccaccugagcauccccaacuucaaccaguacgaggccaugagcugcgacuucaacggcggcaagaucaccgugcaguacaaccugagccacagcuucgccguggacgccgccggccacugcggcacccuggccaacggcgugcugcagaccuucaugagaauggccuggggcggcagcuacaucgcccuggacagcggcugcggcaacugggacugcaucaugaccagcuaccaguaccugaucauccagaacaccaccugggacgaccacugccaguucagcagacccagccccaucggcuaccugggccugcugagccagagaaccagagacaucuacaucagcagaagacugcugggcaccuucaccuggacccugagcgacagcgagggcaacgagacccccggcggcuacugccugaccagauggaugcugaucgaggccgagcugaagugcuucggcaacaccgccguggccaagugcaacgagaagcacgacgaggaguucugcgacaugcugagacuguucgacuucaacaagcaggccaucagaagacugaagacccccgcccagaugagcauccagcugaucaacaaggccgugaacgcccugaucaacgaccagcugaucaugaagaaccaccugagagacaucaugugcauccccuacugcaacuacagcagauacugguaccugaaccacaccagcaccggcaagaccagccugcccagaugcuggcugaucagcaacggcagcuaccugaacgagaccaaguucagcgacgacaucgagcagcaggccgacaacaugaucaccgagaugcugcagaaggaguacaucgacagacagggcaagaccccccugggccugguggaccuguucguguucagcaccagcuucuaccugaucagcaucuuccugcaccuggugaagauccccacccacagacacaucgugggcaagcccugccccaagccccacagacugaaccacaugggcaucugcagcugcggccuguacaagcagcccggcgugcccgugagauggaagagaugaggacuaguaauaaggaaacuguaugaaugucugugggcaggaagugaagagauccuucuguaaagguuuuuggaauuaugucugcugaauaauaaacuuuuuugaaauaauaaaucugguagaaaaaugagaucuaaaaaaaaaaaaaaaaaaaaaaaaaaaaaaaaaaaaaaaaaaaaaaaaaaaaaaaaaaaaaaaaaaaaaaaaaaaaaaaaaaaaaaaaaaaaaaaaaaaa

SEQ ID NO: 29289 - RNA, 1788 nt, Artificial Sequence
  mRNA product Design b-4 (A100) comprising derived and/or modified sequence from LASV(AV;Clade V)__CCA30314__GPCmut5 (opt4)
aggagagucccgcagucggcguccagcggcucugcuuguucgugugugugucguugcaggccuuauucaagcuuaccaugggccagaucgugaccuucuuccaggaggugccccacgugaucgaggaggugaugaacaucgugcugaucgcccugagcauccuggccgugcugaagggccuguacaacaucgccaccugcggccugaucggccugaucaccuuccugcugcugugcggcagaagcugcagcagcaaccuguacaagggcguguacgagcugcagagccuggaccugaacauggagacccugaacaugaccaugccccugagcugcaccaagaacaacagccaccacuacaucagagugggcaacgacaccggccuggagcugacccugaccaacaccagcauccugaaccacaaguucugcaaccugagcgacgcccacaagaaggaccuguacgaccacgcccugaugagcaucaucagcaccuuccaccugagcauccccaacuucaaccaguacgaggccaugagcugcgacuucaacggcggcaagaucagcgugcaguacaaccugagccacagcuacgccaucgacgccgccaaccacugcggcaccguggccaacggcauccugcagaccuucaugagaauggccuggggcggcagcuacaucgcccuggacagcggcugcggcaacugggacugcaucaugaccagcuaccaguaccugaucauccagaacaccaccugggagaaccacugccaguucagcagacccagccccaucggcuaccugggccugcugagccagagaaccagagacaucuacaucagcagaagacugcugggcaccuucaccuggacccugagcgacagcgagggcaacgccacccccggcggcuacugccugaccagauggaugcugaucgaggccgagcugaagugcuucggcaacaccgccguggccaagugcaacgagaagcacgacgaggaguucugcgacaugcugagacuguucgacuucaacaagcaggccaucagcagacugaagagccccgcccagaugagcauccagcugaucaacaaggccgugaacgcccugaucaacgaccagcugaucaugaagaaccaccugagagacaucaugugcauccccuacugcaacuacagcaaguacugguaccugaaccacaccaucaccggcaagaccagccugcccaagugcuggcuggugagcaacggcagcuaccugaacgagacccacuucagcgacgacaucgagcagcaggccgacaacaugaucaccgagaugcugcagaaggaguacauggagagacagggcaagaccccccugggccugguggaccuguucguguucagcaccagcuucuaccugaucagcaucuuccugagacuggugaagauccccacccacagacacaucgugggcaagcccugccccaagccccacagacugaaccacaugggcaucugcagcugcggccuguacaagcagcccggcgugcccgugagauggaagagaugaggacuaguaauaaggaaacuguaugaaugucugugggcaggaagugaagagauccuucuguaaagguuuuuggaauuaugucugcugaauaauaaacuuuuuugaaauaauaaaucugguagaaaaaugagaucuaaaaaaaaaaaaaaaaaaaaaaaaaaaaaaaaaaaaaaaaaaaaaaaaaaaaaaaaaaaaaaaaaaaaaaaaaaaaaaaaaaaaaaaaaaaaaaaaaaaa

SEQ ID NO: 29290 - RNA, 1785 nt, Artificial Sequence
  mRNA product Design b-4 (A100) comprising derived and/or modified sequence from LASV(Togo/2016/7082;Clade VI)__AMR44577__GPCmut5 (opt4)
aggagagucccgcagucggcguccagcggcucugcuuguucgugugugugucguugcaggccuuauucaagcuuaccaugggccagaucaucaccuucuuccaggaggugccccacgugaucgaggaggugaugaacaucgugcugaucgcccugagccugcuggccauccugaagggcguguacaacguggccaccugcggcaucaucggccuggugaccuuccuguuccugugcggcagaagcugcagccugaucuacaagggcagcuacgagcugcagacccuggagcugaacauggagacccugaacaugaccaugccccugagcugcaccaagaacagcagccaccacuacaucagagugggcaacgagaccggccuggagcugacccugaccaacaccagcaucaucaaccacaaguucugcaaccugagcgacgcccacaagagaaaccuguacgaccacgcccugaugagcauccugagcaccuuccaccugagcauccccaacuucaaccaguacgaggccaugagcugcgacuucaacggcggcaagaucagcgugcaguacaaccugagccacgccuacgccguggacgccgccgagcacugcggcaccguggccaacggcgugcugcagaccuucaugagaauggccuggggcggcagcuacaucgcccuggacagcggcugcggcaacugggacugcaucaugaccagcuaccaguaccugaucauccagaacaccaccugggaggaccacugccaguucagcagacccagccccaucggcuaccugggccugcugagccagagaaccagagacaucuacaucagcagaagacugcugggcaccuucaccuggacccugagcgacagcgagggcaacgagacccccggcggcuacugccugaccagauggaugcugaucgaggccgagcugaagugcuucggcaacaccgccguggccaagugcaacgagaagcacgacgaggaguucugcgacaugcugagacuguucgacuucaacaagcaggccauccagagacugaagagccccgcccagaugagcauccagcugaucaacaaggccgugaacgcccugaucaacgaccagcugaucaugaagaaccaccugagagacaugaugugcauccccuacugcaacuacagcaaguacugguaccugaaccacaccagcagcggcagaaccagccugcccaagugcuggcuggugagcaacggcagcuaccugaacgagacccacuucagcgacgacaucgagcagcaggccgacaacaugaucaccgagaugcugcagaaggaguacaucgacagacagggcaagaccccccugggccugguggaccuguucguguucagcaccagcuucuaccugaucagcaucuuccugcaccugaucaagauccccacccacagacacaucgugggcaagcccugccccaagccccacagacugaaccacaugggcaucugcagcugcggccuguacaagcagcccggcgugcccaccagauggaagagaugaggacuaguaauaaggaaacuguaugaaugucugugggcaggaagugaagagauccuucuguaaagguuuuuggaauuaugucugcugaauaauaaacuuuuuugaaauaauaaaucugguagaaaaaugagaucuaaaaaaaaaaaaaaaaaaaaaaaaaaaaaaaaaaaaaaaaaaaaaaaaaaaaaaaaaaaaaaaaaaaaaaaaaaaaaaaaaaaaaaaaaaaaaaaaaaaa

SEQ ID NO: 29291 - RNA, 1785 nt, Artificial Sequence
  mRNA product Design b-4 (A100) comprising derived and/or modified sequence from LASV(KAK-428;Clade n.d. (VII))__ANH09740__GPCmut5 (opt4)
aggagagucccgcagucggcguccagcggcucugcuuguucgugugugugucguugcaggccuuauucaagcuuaccaugggccagaucgugaccuucuuccaggaggugccccacgugaucgaggaggugaugaacaucgugcugaucgcccugagccugcuggccauccugaagggccuguacaacuucgccaccugcggcgugaucggccugaucaccuuccugcugcugugcggcagaagcugcagcgccaccuacaagggccaguacgagcugcagacccuggagcugaacauggagagccugaacaugaccaugccccugagcugcaccaagaacaacagccaccacuacaucagagccggcaacaacaccggccuggagcugacccugaccaacaccagcaucaucagccacaaguucugcaaccugagcgacgcccacaagaagaaccuguacgaccacacccugaugagcaucaucaccaccuuccaccugagcauccccaacuucaaccaguacgaggccaugagcugcgacuucaacggcggcaagaucagcauccaguacaaccugagccacagcuacgccggcgacgccgcccagcacugcggcaccguggccaacggcgugcugcagaccuucaugagaauggccuggggcggcagcuaccuggcccuggacagcggcugcagaggcugggacugcaucaucagcagcuaccaguaccugaucauccagaacaccaccugggacgaccacugccaguucagcagacccagccccaucggcuaccugggcuucgugagccagaagaccagagacaucuacaucagcagaagacugcugggcaccuucaccuggacccugagcgacagcgagggccacgacaugcccggcggcuacugccugaccagauggaugcugaucgaggccgaccugaagugcuucggcaacaccgccguggccaagugcaacgagaagcacgacgaggaguucugcgacauguggagacuguucgacuucaacaagcaggccauccagagacugaaggcccccgcccagaugaacauccagcugaucaacaaggccgugaacgcccugaucaacgaccagcugaugaugaagaaccaccugagagacaucaugugcauccccuacugcaacuacagcaaguucugguaccugaacaacaccaccaccggcagaaccagccugcccagaugcuggcugaucagcaacggcagcuaccugaacgagacccacuucagcgacgacaucgagcagcaggccgacaacaugaucaccgagaugcugcagaaggaguacauggacagacagggcaagaccccccugggccugguggaccuguucguguucagcaccagcuucuaccugaucaccaucuuccugcaccuggugaagauccccacccacagacacaucgugggcaagcccugccccaagccccacagacugaaccacaugggcaucugcagcugcggccuguacaagcagcccggcgugcccgugagauggaagagaugaggacuaguaauaaggaaacuguaugaaugucugugggcaggaagugaagagauccuucuguaaagguuuuuggaauuaugucugcugaauaauaaacuuuuuugaaauaauaaaucugguagaaaaaugagaucuaaaaaaaaaaaaaaaaaaaaaaaaaaaaaaaaaaaaaaaaaaaaaaaaaaaaaaaaaaaaaaaaaaaaaaaaaaaaaaaaaaaaaaaaaaaaaaaaaaaa

SEQ ID NO: 29292 - RNA, 1785 nt, Artificial Sequence; identical to SEQ ID NO: 29286
  mRNA product Design b-4 (A100) comprising derived and/or modified sequence from LASV(Pinneo-NIG-1969;Clade I)__AIT17836__GPCmut5 (opt4)

SEQ ID NO: 29293 - RNA, 1785 nt, Artificial Sequence
  mRNA product Design b-4 (A100) comprising derived and/or modified sequence from LASV(ISTH0009-NIG-2011;Clade II)__AIT17404__GPCmut5 (opt4)
aggagagucccgcagucggcguccagcggcucugcuuguucgugugugugucguugcaggccuuauucaagcuuaccaugggccagaucaucaccuucuuccaggaggugccccacgugaucgaggaggugaugaacaucgugcugaucgcccugagccugcuggccauccugaagggcaucuacaacguggccaccugcggccuguucggccuggugagcuuccugcugcugugcggcagaagcugcagcaccaccuacaagggcguguacgagcugcagacccuggagcuggacauggccagccugaacaugaccaugccccugagcugcaccaagaacaacagccaccacuacaucauggugggcaacgagaccggccuggagcugacccugaccaacaccagcaucaucaaccacaaguucugcaaccugagcgacgcccacaagaagaaccuguacgaccacgcccugaugagcaucaucagcaccuuccaccugagcauccccaacuucaaccaguacgaggccaugagcugcgacuucaacggcggcaagaucagcgugcaguacaaccugagccacgccuacgccguggacgccgccaaccacugcggcaccaucgccaacggcgugcugcagaccuucaugagaauggccuggggcggcagcuacaucgcccuggacagcggcugcggcagcugggacugcaucaugaccagcuaccaguaccugaucauccagaacaccaccugggaggaccacugccaguucagcagacccagccccaucggcuaccugggccugcugagccagagaaccagagacaucuacaucagcagaagacugcugggcaccuucaccuggacccugagcgacagcgagggcaacgagacccccggcggcuacugccugaccagauggaugcugaucgaggccgagcugaagugcuucggcaacaccgccguggccaagugcaacgagaagcacgacgaggaguucugcgacaugcugagacuguucgacuucaacaagcaggccaucagaagacugaagacccccgcccagaugagcauccagcugaucaacaaggccgugaacgcccugaucaacgaccagcugaucaugaagaaccaccugagagacaucaugugcauccccuacugcaacuacagcaaguacugguaccugaaccacaccgugaccggcaagaccagccugcccagaugcuggcuggugagcaacggcagcuaccugaacgagacccacuucagcgacgacaucgagcagcaggccgacaacaugaucaccgagcugcugcagaaggaguacauggacagacagggcaagaccccccugggccugguggaccuguucguguucagcaccagcuucuaccugaucagcaucuuccugcaccugaucaagauccccacccacagacacaucaccggcaagcccugccccaagccccacagacugaaccacaugggcaucugcagcugcggccuguacaagcaccccggcgugcccgugaaguggaagagaugaggacuaguaauaaggaaacuguaugaaugucugugggcaggaagugaagagauccuucuguaaagguuuuuggaauuaugucugcugaauaauaaacuuuuuugaaauaauaaaucugguagaaaaaugagaucuaaaaaaaaaaaaaaaaaaaaaaaaaaaaaaaaaaaaaaaaaaaaaaaaaaaaaaaaaaaaaaaaaaaaaaaaaaaaaaaaaaaaaaaaaaaaaaaaaaaa

SEQ ID NO: 29294 - RNA, 1785 nt, Artificial Sequence
  mRNA product Design b-4 (A100) comprising derived and/or modified sequence from LASV(ISTH2010-NIG-2012;Clade II)__AIT17482__GPCmut5 (opt4)
aggagagucccgcagucggcguccagcggcucugcuuguucgugugugugucguugcaggccuuauucaagcuuaccaugggccagaucaucaccuucuuccaggaggugccccacgugaucgaggaggugaugaacaucgugcugaucgcccugagccugcuggccauccugaagggcaucuacaacguggccaccugcggccuguucggccuggugagcuuccugcugcugugcggcagaagcugcagcaccaccuacaagggcguguacgagcugcagacccuggagcuggacauggccagccugaacaugaccaugccccugagcugcaccaagaacaacagccaccacuacaucauggugggcaacgagaccggccuggagcugacccugaccaacaccagcaucaucaaccacaaguucugcaaccugagcgacgcccacaagaagaaccuguacgaccacgcccugaugagcaucaucagcaccuuccaccugagcauccccaacuucaaccaguacgaggccaugagcugcgacuucaacggcggcaagaucagcgugcaguacaaccugagccacgccuacgccguggacgccgccaaccacugcggcaccaucgccaacggcgugcugcagaccuucaugagaauggccuggggcggcagcuacaucgcccuggacagcggcugcggcagcugggacugcaucaugaccagcuaccaguaccugaucauccagaacaucaccugggaggaccacugccaguucagcagacccagccccaucggcuaccugggccugcugagccagagaaccagagacaucuacaucagcagaagacugcugggcaccuucaccuggacccugagcgacagcgagggcaacgagacccccggcggcuacugccugaccagauggaugcugaucgaggccgagcugaagugcuucggcaacaccgccguggccaagugcaacgagaagcacgacgaggaguucugcgacaugcugagacuguucgacuucaacaagcaggccaucagaagacugaagacccccgcccagaugagcauccagcugaucaacaaggccgugaacgcccugaucaacgaccagcugaucaugaagaaccaccugagagacaucaugugcauccccuacugcaacuacagcaaguacugguaccugaaccacaccgugaccggcaagaccagccugcccagaugcuggcuggugagcaacggcagcuaccugaacgagacccacuucagcgacgacaucgagcagcaggccgacaacaugaucaccgagcugcugcagaaggaguacaucgacagacagggcaagaccccccugggccugguggaccuguucguguucagcaccagcuucuaccugaucagcaucuuccugcaccuggugaagauccccacccacagacacguggugggcaagcccugccccaagccccacagacugaaccacaugggcaucugcagcugcggccuguacaagcaccccggcgugcccgugaaguggaagagaugaggacuaguaauaaggaaacuguaugaaugucugugggcaggaagugaagagauccuucuguaaagguuuuuggaauuaugucugcugaauaauaaacuuuuuugaaauaauaaaucugguagaaaaaugagaucuaaaaaaaaaaaaaaaaaaaaaaaaaaaaaaaaaaaaaaaaaaaaaaaaaaaaaaaaaaaaaaaaaaaaaaaaaaaaaaaaaaaaaaaaaaaaaaaaaaaa

SEQ ID NO: 29295 - RNA, 1785 nt, Artificial Sequence
  mRNA product Design b-4 (A100) comprising derived and/or modified sequence from LASV(Lassa virus/H.sapiens-wt/NGA/2015/ISTH_0543;Clade II)__AVO03639__GPCmut5 (opt4)
aggagagucccgcagucggcguccagcggcucugcuuguucgugugugugucguugcaggccuuauucaagcuuaccaugggccagaucaucaccuucuuccaggaggugccccacgugaucgaggaggugaugaacaucgugcugaucgcccugagccugcuggccauccugaagggcaucuacaacguggccaccugcggccuguucggccuggugagcuuccugcugcugugcggcagaagcugcagcaccaccuacaagggcguguacgagcugcagacccuggagcuggacauggccaaccugaacaugaccaugccccugagcugcaccaagaacaacagccaccacuacaucauggugggcaacgagaccggccuggagcugacccugaccaacaccagcaucaucaaccacaaguucugcaaccugagcgacgcccacaagaagaaccuguacgaccacgcccugaugagcaucaucagcaccuuccaccugagcauccccaacuucaaccaguacgaggccaugagcugcgacuucaacggcggcaagaucagcgugcaguacaaccugagccacaccuacgccguggacgccgccaaccacugcggcaccaucgccaacggcgugcugcagaccuucaugagaauggccuggggcggcagcuacaucgcccuggacagcggcugcggcagcugggacugcaucaugaccagcuaccaguaccuggugauccagaacaccaccugggaggaccacugccaguucagcagacccagccccaucggcuaccugggccugcugagccagagaaccagagacaucuacaucagcagaagacugcugggcaccuucaccuggacccugagcgacagcgagggcaacgagacccccggcggcuacugccugaccagauggaugcugaucgaggccgagcugaagugcuucggcaacaccgccguggccaagugcaacgagaagcacgacgaggaguucugcgacaugcugagacuguucgacuucaacaagcaggccaucagaagacugaagacccccgcccagaugagcauccagcugaucaacaaggccgugaacgcccugaucaacgaccagcugaucaugaagaaccaccugagagacaucaugugcauccccuacugcaacuacagcaaguacugguaccugaaccacaccgugaccggcaagaccagccugcccagaugcuggcuggugagcaacggcagcuaccugaacgagacccacuucagcgacgacaucgagcagcaggccgacaacaugaucaccgagcugcugcagaaggaguacaucgacagacagggcaagaccccccugggccugguggaccuguucguguucagcaccagcuucuaccugaucagcaucuuccugcaccuggugaagauccccacccacagacacaucaccggcaagcccugccccaagccccacagacugaaccacaugggcaucugcagcugcggccuguacaagcaccccggcgugcccgugaaguggaagagaugaggacuaguaauaaggaaacuguaugaaugucugugggcaggaagugaagagauccuucuguaaagguuuuuggaauuaugucugcugaauaauaaacuuuuuugaaauaauaaaucugguagaaaaaugagaucuaaaaaaaaaaaaaaaaaaaaaaaaaaaaaaaaaaaaaaaaaaaaaaaaaaaaaaaaaaaaaaaaaaaaaaaaaaaaaaaaaaaaaaaaaaaaaaaaaaaa

SEQ ID NO: 29296 - RNA, 1785 nt, Artificial Sequence
  mRNA product Design b-4 (A100) comprising derived and/or modified sequence from LASV(Lassa virus/H.sapiens-wt/NGA/2016/ISTH_0009;Clade II)__AVO03571__GPCmut5 (opt4)
aggagagucccgcagucggcguccagcggcucugcuuguucgugugugugucguugcaggccuuauucaagcuuaccaugggccagaucaucaccuucuuccaggaggugccccacgugaucgaggaggugaugaacaucgugcugaucgcccugagccugcuggccauccugaagggcaucuacaacguggccaccugcggccugcugggccuggugagcuuccugcugcugugcggcagaagcugcagcaccaccuacaagggcguguacgagcugcagacccuggagcuggacauggccagccugaacaugaccaugccccugagcugcaccaagaacaacagccaccacuacaucauggugggcaacgagaccggccuggagcugacccugaccaacaccagcaucaucaaccacaaguucugcaaccugagcgacgcccacaagaagaaccuguacgaccacgcccugaugagcaucaucagcaccuuccaccugagcauccccaacuucaaccaguacgaggccaugagcugcgacuucaacggcggcagaaucagcgugcaguacaaccugagccacagcuacgccguggacgccgccaaccacugcggcaccaucgccaacggcgugcugcagaccuucaugagaauggccuggggcggcagcuacaucgcccuggacagcggcugcggcagcugggacugcaucaugaccagcuaccaguaccugaucauccagaacaccaccugggaggaccacugccaguucagcagacccagccccaucggcuaccugggccugcugagccagagaaccagagacaucuacaucagcagaagacugcugggcaccuucaccuggacccugagcgacagcgagggcaacgagacccccggcggcuacugccugaccagauggaugcugaucgaggccgagcugaagugcuucggcaacaccgccguggccaagugcaacgagaagcacgacgaggaguucugcgacaugcugagacuguucgacuucaacaagcaggccaucagaagacugaagacccccgcccagaugagcauccagcugaucaacaaggccgugaacgcccugaucaacgaccagcugaucaugaagaaccaccugagagacaucaugugcauccccuacugcaacuacagcaaguacugguaccugaaccacaccgugaccggcaagaccagccugcccagaugcuggcuggugagcaacggcagcuaccugaacgagacccacuucagcgacgacaucgagcagcaggccgacaacaugaucaccgagcugcugcagaaggaguacaucgacagacagggcaagaccccccugggccugguggaccuguucguguucagcaccagcuucuaccugaucagcaucuuccugcaccuggugaagauccccacccacagacacaucaccggcaagcccugccccaagccccacagacugaaccacaugggcaucugcagcugcggccuguacaaccaccccggcgugcccgugaaguggaagagaugaggacuaguaauaaggaaacuguaugaaugucugugggcaggaagugaagagauccuucuguaaagguuuuuggaauuaugucugcugaauaauaaacuuuuuugaaauaauaaaucugguagaaaaaugagaucuaaaaaaaaaaaaaaaaaaaaaaaaaaaaaaaaaaaaaaaaaaaaaaaaaaaaaaaaaaaaaaaaaaaaaaaaaaaaaaaaaaaaaaaaaaaaaaaaaaaa

SEQ ID NO: 29297 - RNA, 1785 nt, Artificial Sequence
  mRNA product Design b-4 (A100) comprising derived and/or modified sequence from LASV(Lassa virus/H.sapiens-wt/NGA/2016/ISTH_0017;Clade II)__AVO03567__GPCmut5 (opt4)
aggagagucccgcagucggcguccagcggcucugcuuguucgugugugugucguugcaggccuuauucaagcuuaccaugggccagaucaucaccuucuuccaggaggugccccacgugaucgaggaggugaugaacaucgugcugaucgcccugagccugcuggccauccugaagggcaucuacaacguggccaccugcggccuguucggccuggugagcuuccugcugcugugcggcagaagcugcagcaccaccuacaagggcguguacgagcugcagacccuggagcuggacauggccagccugaacaugaccaugccccugagcugcaccaagaacaacagccaccacuacaucauggugggcaacgagaccggccuggagcugacccugaccaacaccagcaucaucaaccacaaguucugcaaccugagcgacgcccacaagaagaaccuguacgaccacgcccugaugagcaucaucagcaccuuccaccugagcauccccaacuucaaccaguacgaggccaugagcugcgacuucaacggcggcaagaucagcgugcaguacaaccugagccacaccuacgccaucgacgccgccaaccacugcggcaccaucgccaacggcgugcugcagaccuucaugagaauggccuggggcggcagcuacaucgcccuggacagcggcugcggcagcugggacugcaucaugaccagcuaccaguaccugaucauccagaacaccaccugggaggaccacugccaguucagcagacccagccccaucggcuaccugggccugcugagccagagaaccagagacaucuacaucagcagaagacugcugggcaccuucaccuggacccugagcgacagcgagggcaacgagacccccggcggcuacugccugaccagauggaugcugaucgaggccgagcugaagugcuucggcaacaccgccguggccaagugcaacgagaagcacgacgaggaguucugcgacaugcugagacuguucgacuucaacaagcaggccaucagaagacugaagacccccgcccagaugagcauccagcugaucaacaaggccgugaacgcccugaucaacgaccagcugaucaugaagaaccaccugagagacaucaugugcauccccuacugcaacuacagcaaguacugguaccugaaccacaccgugaccggcaagaccagccugcccagaugcuggcuggugagcaacggcagcuaccugaacgagacccacuucagcgacgacaucgagcagcaggccgacaacaugaucaccgagcugcugcagaaggaguacauggacagacagggcaagaccccccugggccugguggaccuguucguguucagcaccagcuucuaccugaucagcaucuuccugcaccuggugagaauccccacccacagacacgugaucggcaagcccugccccaagccccacagacugaaccacaugggcaucugcagcugcggccuguacaagcaccccggcgugcccgugaaguggaagagaugaggacuaguaauaaggaaacuguaugaaugucugugggcaggaagugaagagauccuucuguaaagguuuuuggaauuaugucugcugaauaauaaacuuuuuugaaauaauaaaucugguagaaaaaugagaucuaaaaaaaaaaaaaaaaaaaaaaaaaaaaaaaaaaaaaaaaaaaaaaaaaaaaaaaaaaaaaaaaaaaaaaaaaaaaaaaaaaaaaaaaaaaaaaaaaaaa

SEQ ID NO: 29298 - RNA, 1785 nt, Artificial Sequence
  mRNA product Design b-4 (A100) comprising derived and/or modified sequence from LASV(Lassa virus/H.sapiens-wt/NGA/2018/ISTH_0959;Clade II)__AVV65099__GPCmut5 (opt4)
aggagagucccgcagucggcguccagcggcucugcuuguucgugugugugucguugcaggccuuauucaagcuuaccaugggccagaucaucaccuucuuccaggaggugccccacgugaucgaggaggugaugaacaucgugcugaucgcccugagccugcuggccauccugaagggcaucuacaacguggugaccugcggccuguucggccuggugagcuuccugcugcugugcggcagaagcugcagcaccaccuacaagggcguguacgagcugcagacccuggagcuggacauggccagccugaacaugaccaugccccugagcugcaccaagaacaacagccaccacuacaucauggugggcaacgagaccggccuggagcugacccugaccaacaccagcaucaucaaccacaaguucugcaaccugagcgacgcccacaagaagaaccuguacgaccacgcccugaugagcaucaucagcaccuuccaccugagcauccccaacuucaaccaguacgaggccaugagcugcgacuucaacggcggcaagaucagcgugcaguacaaccugagccacgccuacgccaucgacgccgccaaccacugcggcaccaucgccaacggcgugcugcagaccuucaugagaauggccuggggcggcagcuacaucgcccuggacagcggcugcggcagcugggacugcaucaugaccagcuaccaguaccugaucauccagaacaccaccugggaggaccacugccaguucagcagacccagccccaucggcuaccugggccugcugagccagagaaccagagacaucuacaucagcagaagacugcugggcaccuucaccuggacccugagcgacagcgagggcaacgagacccccggcggcuacugccugaccagauggaugcugaucgaggccgagcugaagugcuucggcaacaccgccguggccaagugcaacgagaagcacgacgaggaguucugcgacaugcugagacuguucgacuucaacaagcaggccaucagaagacugaagacccccgcccagaugagcauccagcugaucaacaaggccgugaacgcccugaucaacgaccagcugaucaugaagaaccaccugagagacaucaugugcauccccuacugcaacuacagcaaguacugguaccugaaccacaccgugaccggcaagaccagccugcccagaugcuggcuggugagcaacggcagcuaccugaacgagacccacuucagcgacgacaucgagcagcaggccgacaacaugaucaccgagcugcugcagaaggaguacaucgacagacagggcaagaccccccugggccugguggaccuguucguguucagcaccagcuucuaccugaucagcaucuuccugcaccuggugaagauccccacccacagacacgugaucggcaagcccugccccaagccccacagacugaaccacaugggcaucugcagcugcggccuguacaagcaccccggcgugcccgugaaguggaagagaugaggacuaguaauaaggaaacuguaugaaugucugugggcaggaagugaagagauccuucuguaaagguuuuuggaauuaugucugcugaauaauaaacuuuuuugaaauaauaaaucugguagaaaaaugagaucuaaaaaaaaaaaaaaaaaaaaaaaaaaaaaaaaaaaaaaaaaaaaaaaaaaaaaaaaaaaaaaaaaaaaaaaaaaaaaaaaaaaaaaaaaaaaaaaaaaaa

SEQ ID NO: 29299 - RNA, 1785 nt, Artificial Sequence
  mRNA product Design b-4 (A100) comprising derived and/or modified sequence from LASV(LASV003-NIG-2008;Clade II)__AIT17580__GPCmut5 (opt4)
aggagagucccgcagucggcguccagcggcucugcuuguucgugugugugucguugcaggccuuauucaagcuuaccaugggccagaucaucaccuucuuccaggaggugccccacgugaucgaggaggugaugaacaucgugcugaucgcccugagccugcuggccauccugaagggcaucuacaacguggccaccugcggccuguucggccuggugagcuuccugcugcugugcggcagaagcugcagcaccaccuacaagggcguguacgagcugcagacccuggagcuggacauggccagccugaacaugaccaugccccugagcugcaccaagaacaacagccaccacuacaucauggugggcaacgagaccggccuggagcugacccugaccaacaccagcaucaucaaccacaaguucugcaaccugagcgacgcccacaagaagaaccuguacgaccacgcccugaugagcaucaucagcaccuuccaccugagcauccccaacuucaaccaguacgaggccaugagcugcgacuucaacggcggcaagaucagcgugcaguacaaccugagccacaccuacgccguggacgccgccaaccacugcggcaccaucgccaacggcgugcugcagaccuucaugagaauggccuggggcggcagcuacaucgcccuggacagcggcugcggcagcugggacugcaucaugaccagcuaccaguaccugaucauccagaacaccaccugggaggaccacugccaguucagcagacccagccccaucggcuaccugggccugcugagccagagaaccagagacaucuacaucagcagaagacugcugggcaccuucaccuggacccugagcgacagcgagagcaacgagacccccggcggcuacugccugaccagauggaugcugaucgaggccgagcugaagugcuucggcaacaccgccguggccaagugcaacgagaagcacgacgaggaguucugcgacaugcugagacuguucgacuucaacaagcaggccaucagaagacugaaggcccccgcccagaugagcauccagcugaucaacaaggccgugaacgcccugaucaacgaccagcugaucaugaagaaccaccugagagacaucaugugcauccccuacugcaacuacagcaaguacugguaccugaaccacaccgugaccggcagaaccagccugcccagaugcuggcuggugagcaacggcagcuaccugaacgagacccacuucagcgacgacaucgagcagcaggccgacaacaugaucaccgagcugcugcagaaggaguacauggacagacagggcaagaccccccugggccugguggaccuguucguguucagcaccagcuucuaccugaucagcaucuuccugcaccuggugaagauccccacccacagacacgugaucggcaagcccugccccaagccccacagacugaaccacaugggcaucugcagcugcggccuguacaagcaccccggcgugcccgugaaguggaagagaugaggacuaguaauaaggaaacuguaugaaugucugugggcaggaagugaagagauccuucuguaaagguuuuuggaauuaugucugcugaauaauaaacuuuuuugaaauaauaaaucugguagaaaaaugagaucuaaaaaaaaaaaaaaaaaaaaaaaaaaaaaaaaaaaaaaaaaaaaaaaaaaaaaaaaaaaaaaaaaaaaaaaaaaaaaaaaaaaaaaaaaaaaaaaaaaaa

SEQ ID NO: 29300 - RNA, 1785 nt, Artificial Sequence
  mRNA product Design b-4 (A100) comprising derived and/or modified sequence from LASV(LASV035-NIG-2009;Clade II)__AIT17588__GPCmut5 (opt4)
aggagagucccgcagucggcguccagcggcucugcuuguucgugugugugucguugcaggccuuauucaagcuuaccaugggccagaucaucaccuucuuccaggaggugccccacgugaucgaggaggugaugaacaucgugcugaucgcccugagccugcuggccauccugaagggcaucuacaacguggccaccugcggccuguucggccuggugagcuuccugcugcugugcggcagaagcugcagcaccaccuacaagggcguguacgagcugcagacccuggagcuggacauggccagccugaacaugaccaugccccugagcugcaccaagaacaacagccaccacuacaucauggugggcaacgagaccggccuggagcugacccugaccaacaccagcaucaucaaccacaaguucugcaaccugagcgacgcccacaagaagaaccuguacgaccacgcccugaugagcaucaucagcaccuuccaccugagcauccccaacuucaaccaguacgaggccaugagcugcgacuucaacggcggcaagaucagcgugcaguacaaccugagccacgccuacgccguggacgccgccaaccacugcggcaccaucgccaacggcgugcugcagaccuucaugagaauggccuggggcggcagcuacaucgcccuggacagcggcugcggcagcugggacugcaucaugaccagcuaccaguaccugaucauccagaacaccaccugggaggaccacugccaguucagcagacccagccccaucggcuaccugggccugcugagccagagaaccagagacaucuacaucagcagaagacugcugggcaccuucaccuggacccugagcgacagcgagggcaacgagacccccggcggcuacugccugaccagauggaugcugaucgaggccgagcugaagugcuucggcaacaccgccguggccaagugcaacgagaagcacgacgaggaguucugcgacaugcugagacuguucgacuucaacaagcaggccaucagaagacugaaggcccccgcccagaugagcauccagcugaucaacaaggccgugaacgcccugaucaacgaccagcugaucaugaagaaccaccugagagacaucaugugcauccccuacugcaacuacagcaaguacugguaccugaaccacaccgugaccggcaagaccagccugcccagaugcuggcuggugagcaacggcagcuaccugaacgagacccacuucagcgacgacaucgagcagcaggccgacaacaugaucaccgagcugcugcagaaggaguacaucgacagacagggcaagaccccccugggccugguggaccuguucguguucagcaccagcuucuaccugaucagcaucuuccugcaccuggugaagauccccacccacagacacgugaucggcaagcccugccccaagccccacagacugaaccacaugggcaucugcagcugcggccuguacaagcaccccggcgugcccgugaaguggaagagaugaggacuaguaauaaggaaacuguaugaaugucugugggcaggaagugaagagauccuucuguaaagguuuuuggaauuaugucugcugaauaauaaacuuuuuugaaauaauaaaucugguagaaaaaugagaucuaaaaaaaaaaaaaaaaaaaaaaaaaaaaaaaaaaaaaaaaaaaaaaaaaaaaaaaaaaaaaaaaaaaaaaaaaaaaaaaaaaaaaaaaaaaaaaaaaaaa

SEQ ID NO: 29301 - RNA, 1785 nt, Artificial Sequence
  mRNA product Design b-4 (A100) comprising derived and/or modified sequence from LASV(LASV1000-NIG-2009;Clade II)__AIT17782__GPCmut5 (opt4)
aggagagucccgcagucggcguccagcggcucugcuuguucgugugugugucguugcaggccuuauucaagcuuaccaugggccagaucaucaccuucuuccaggaggugccccacgugaucgaggaggugaugaacaucgugcugaucgcccugagccugcuggccauccugaagggcaucuacaacguggccaccugcggccuguucggccuggugagcuuccugcugcugugcggcagaagcugcagcaccaccuacaagggcguguacgagcugcagacccuggagcuggacauggccagccugaacaugaccaugccccugagcugcaccaagaacaacagccaccacuacaucauggugggcaacgagaccggccuggagcugacccugaccaacaccagcaucaucaaccacaaguucugcaaccugagcgacgcccacaagaagaaccuguacgaccacgcccugaugagcaucaucagcaccuuccaccugagcauccccaacuucaaccaguacgaggccaugagcugcgacuucaacggcggcaagaucagcgugcaguacaaccugagccacaccuacgccguggacgccgccaaccacugcggcaccaucgccaacggcgugcugcagaccuucaugagaauggccuggggcggcagcuacaucgcccuggacagcggcugcggcagcugggacugcaucaugaccagcuaccaguaccugaucauccagaacaccaccugggaggaccacugccaguucagcagacccagccccaucggcuaccugggccugcugagccagagaaccagagacaucuacaucagcagaagacugcugggcaccuucaccuggacccugagcgacagcgagggcaacgagacccccggcggcuacugccugaccagauggaugcugaucgaggccgagcugaagugcuucggcaacaccgccguggccaagugcaacgagaagcacgacgaggaguucugcgacaugcugagacuguucgacuucaacaagcaggccaucaagagacugaagacccccgcccagaugagcauccagcugaucaacaaggccgugaacgcccugaucaacgaccagcugaucaugaagaaccaccugagagacaucaugugcauccccuacugcaacuacagcaaguacugguaccugaaccacaccgugaccggcaagaccagccugcccagaugcuggcuggugagcaacggcagcuaccugaacgagacccacuucagcgacgacaucgagcagcaggccgacaacaugaucaccgagcugcugcagaaggaguacaucgacagacagggcaagaccccccugggccugguggaccuguucguguucagcaccagcuucuaccugaucagcaucuuccugcaccuggugaagauccccacccacagacacguggugggcaagcccugccccaagccccacagacugaaccacaugggcaucugcagcugcggccuguacaagcaccccggcgugcccgugaaguggaagagaugaggacuaguaauaaggaaacuguaugaaugucugugggcaggaagugaagagauccuucuguaaagguuuuuggaauuaugucugcugaauaauaaacuuuuuugaaauaauaaaucugguagaaaaaugagaucuaaaaaaaaaaaaaaaaaaaaaaaaaaaaaaaaaaaaaaaaaaaaaaaaaaaaaaaaaaaaaaaaaaaaaaaaaaaaaaaaaaaaaaaaaaaaaaaaaaaa

SEQ ID NO: 29302 - RNA, 1785 nt, Artificial Sequence
  mRNA product Design b-4 (A100) comprising derived and/or modified sequence from LASV(LASV221-NIG-2010;Clade II)__AIT17624__GPCmut5 (opt4)
aggagagucccgcagucggcguccagcggcucugcuuguucgugugugugucguugcaggccuuauucaagcuuaccaugggccagaucaucaccuucuuccaggaggugccccacgugaucgaggaggugaugaacaucgugcugaucgcccugagccugcuggccauccugaagggcaucuacaacguggccaccugcggccuguucggccuggugagcuuccugcugcugugcggcagaagcugcagcaccaccuacaagggcguguacgagcugcagacccuggagcuggacauggccagccugaacaugaccaugccccugagcugcaccaagaacaacagccaccacuacaucauggugggcaacgagaccggccuggagcugacccugaccaacaccagcaucaucaaccacaaguucugcaaccugagcgacgcccacaagaagaaccuguacgaccacgcccugaugagcaucaucagcaccuuccaccugagcauccccaacuucaaccaguacgaggccaugagcugcgacuucaacggcggcaagaucagcgugcaguacaaccugagccacaccuacgccaucgacgccgccaaccacugcggcaccaucgccaacggcgugcugcagaccuucaugagaauggccuggggcggcagcuacaucgcccuggacagcggcugcggcagcugggacugcaucaugaccagcuaccaguaccugaucauccagaacaccaccugggaggaccacugccaguucagcagacccagccccaucggcuaccugggccugcugagccagagaaccagagacaucuacaucagcagaagacugcugggcaccuucaccuggacccugagcgacagcgagggcaacgagacccccggcggcuacugccugaccagauggaugcugaucgaggccgagcugaagugcuucggcaacaccgccguggccaagugcaacgagaagcacgacgaggaguucugcgacaugcugagacuguucgacuucaacaagcaggccaucagaagacugaagacccccgcccagaugagcauccagcugaucaacaaggccgugaacgcccugaucaacgaccagcugaucaugaagaaccaccugagagacaucaugugcauccccuacugcaacuacagcaaguacugguaccugaaccacaccgugaccggcaagaccagccugcccagaugcuggcuggugagcaacggcagcuaccugaacgagacccacuucagcgacgacaucgagcagcaggccgacaacaugaucaccgagaugcugcagaaggaguacauggacagacagggcaagaccccccugggccugguggaccuguucguguucagcaccagcuucuaccugaucagcaucuuccugcaccuggugaagauccccacccacagacacgugaucggcaagcccugccccaagccccacagacugaaccacaugggcaucugcagcugcggccuguacaagcaccccggcgugcccgugaaguggaagagaugaggacuaguaauaaggaaacuguaugaaugucugugggcaggaagugaagagauccuucuguaaagguuuuuggaauuaugucugcugaauaauaaacuuuuuugaaauaauaaaucugguagaaaaaugagaucuaaaaaaaaaaaaaaaaaaaaaaaaaaaaaaaaaaaaaaaaaaaaaaaaaaaaaaaaaaaaaaaaaaaaaaaaaaaaaaaaaaaaaaaaaaaaaaaaaaaa

SEQ ID NO: 29303 - RNA, 1785 nt, Artificial Sequence
  mRNA product Design b-4 (A100) comprising derived and/or modified sequence from LASV(LASV237-NIG-2010;Clade II)__AIT17638__GPCmut5 (opt4)
aggagagucccgcagucggcguccagcggcucugcuuguucgugugugugucguugcaggccuuauucaagcuuaccaugggccagaucaucaccuucuuccaggaggugccccacgugaucgaggaggugaugaacaucgugcugaucgcccugagccugcuggccauccugaagggcaucuacaacguggccaccugcggccuguucggccuggugagcuuccugcugcugugcggcagaagcugcagcaccaccuacaagggcguguacgagcugcagacccuggagcuggacauggccagccugaacaugaccaugccccugagcugcaccaagaacaacagccaccacuacaucauggugggcaacgagaccggccuggagcugacccugaccaacaccagcaucaucaaccacaaguucugcaaccugagcgacgcccacaagaaggaccuguacgaccacgcccugaugagcaucaucagcaccuuccaccugagcauccccaacuucaaccaguacgaggccaugagcugcgacuucaacggcggcaagaucagcgugcaguacaaccugagccacaccuacgccguggacgccgccaaccacugcggcaccaucgccaacggcgugcugcagaccuucaugagaauggccuggggcggcagcuacaucgcccuggacagcggcugcggcagcugggacugcaucaugaccagcuaccaguaccugaucauccagaacaccaccugggaggaccacugccaguucagcagacccagccccaucggcuaccugggccugcugagccagagaaccagagacaucuacaucagcagaagacugcugggcaccuucaccuggacccugagcgacagcgagggcaacgagacccccggcggcuacugccugaccagauggaugcugaucgaggccgagcugaagugcuucggcaacaccgccguggccaagugcaacgagaagcacgacgaggaguucugcgacaugcugagacuguucgacuucaacaagcaggccaucagaagacugaagacccccgcccagaugagcauccagcugaucaacaaggccgugaacgcccugaucaacgaccagcugaucaugaagaaccaccugagagacaucaugugcauccccuacugcaacuacagcaaguacugguaccugaaccacaccgugaccggcaagaccagccugcccagaugcuggcuggugagcaacggcagcuaccugaacgagacccacuucagcgacgacaucgagcagcaggccgacaacaugaucaccgagcugcugcagaaggaguacauggacagacagggcaagaccccccugggccugguggaccuguucguguucagcaccagcuucuaccugaucagcaucuuccugcaccugaucaagauccccacccacagacacaucaccggcaagcccugccccaagccccacagacugaaccacaugggcaucugcagcugcggccuguacaagcaccccggcgugcccgugaaguggaagagaugaggacuaguaauaaggaaacuguaugaaugucugugggcaggaagugaagagauccuucuguaaagguuuuuggaauuaugucugcugaauaauaaacuuuuuugaaauaauaaaucugguagaaaaaugagaucuaaaaaaaaaaaaaaaaaaaaaaaaaaaaaaaaaaaaaaaaaaaaaaaaaaaaaaaaaaaaaaaaaaaaaaaaaaaaaaaaaaaaaaaaaaaaaaaaaaaa

SEQ ID NO: 29304 - RNA, 1785 nt, Artificial Sequence
  mRNA product Design b-4 (A100) comprising derived and/or modified sequence from LASV(LASV253-NIG-2011;Clade II)__AIT17670__GPCmut5 (opt4)
aggagagucccgcagucggcguccagcggcucugcuuguucgugugugugucguugcaggccuuauucaagcuuaccaugggccagaucaucaccuucuuccaggaggugccccacgugaucgaggaggugaugaacaucgugcugaucgcccugagccugcuggccauccugaagggcaucuacaacguggccaccugcggccuguucggccuggugagcuuccugcugcugugcggcagaagcugcagcaccaccuacaagggcguguacgagcugcagacccuggagcuggacauggccagccugaacaugaccaugccccugagcugcaccaagaacaacagccaccacuacaucauggugggcaacgagaccggccuggagcugacccugaccaacaccagcaucaucaaccacaaguucugcaaccugagcgacgcccacaagaagaaccuguacgaccacgcccugaugagcaucaucagcaccuuccaccugagcauccccaacuucaaccaguacgaggccaugagcugcgacuucaacggcggcaagaucagcgugcaguacaaccugagccacaccuacgccguggacgccgccaaccacugcggcaccaucgccaacggcgugcugcagaccuucaugagaauggccuggggcggcagcuacaucgcccuggacagcggcugcggcagcugggacugcaucaugaccagcuaccaguaccugaucauccagaacaccaccugggaggaccacugccaguucagcagacccagccccaucggcuaccugggccugcugagccagagaaccagagacaucuacaucagcagaagacugcugggcaccuucaccuggacccugagcgacagcgagggcaacgagacccccggcggcuacugccugaccagauggaugcugaucgaggccgagcugaagugcuucggcaacaccgccguggccaagugcaacgagaagcacgacgaggaguucugcgacaugcugagacuguucgacuucaacaagcaggccaucagaagacugaaggcccccgcccagaugagcauccagcugaucaacaaggccgugaacgcccugaucaacgaccagcugaucaugaagaaccaccugagagacaucaugugcauccccuacugcaacuacagcaaguacugguaccugaaccacaccgugaccggcagaaccagccugcccagaugcuggcuggugagcaacggcagcuaccugaacgagacccacuucagcgacgacaucgagcagcaggccgacaacaugaucaccgagcugcugcagaaggaguacaucgacagacagggcaagaccccccugggccugguggaccuguucguguucagcaccagcuucuaccugaucagcaucuuccugcaccuggugaagauccccacccacagacacaucaucggcaagcccugccccaagccccacagacugaaccacaugggcaucugcagcugcggccuguacaagcaccccggcgugcccgugaaguggaagagaugaggacuaguaauaaggaaacuguaugaaugucugugggcaggaagugaagagauccuucuguaaagguuuuuggaauuaugucugcugaauaauaaacuuuuuugaaauaauaaaucugguagaaaaaugagaucuaaaaaaaaaaaaaaaaaaaaaaaaaaaaaaaaaaaaaaaaaaaaaaaaaaaaaaaaaaaaaaaaaaaaaaaaaaaaaaaaaaaaaaaaaaaaaaaaaaaa

SEQ ID NO: 29305 - RNA, 1785 nt, Artificial Sequence
  mRNA product Design b-4 (A100) comprising derived and/or modified sequence from LASV(LASV254-NIG-2011;Clade II)__AIT17674__GPCmut5 (opt4)
aggagagucccgcagucggcguccagcggcucugcuuguucgugugugugucguugcaggccuuauucaagcuuaccaugggccagaucaucaccuucuuccaggaggugccccacgugaucgaggaggugaugaacaucgugcugaucgcccugagccugcuggccauccugaagggcaucuacaacguggccaccugcggccuguucggccuggugagcuuccugcugcugugcggcagaagcugcagcaccaccuacaagggcguguacgagcugcagacccuggagcuggacaugaccaaccugaacaugaccaugccccugagcugcaccaagaacaacagccaccacuacaucauggugggcaacgagaccggccuggagcugacccugaccaacaccagcaucaucaaccacaaguucugcaaccugagcgacgcccacaagaagaaccuguacaaccacgcccugaugagcaucaucagcaccuuccaccugagcauccccaacuucaaccaguacgaggccaugagcugcgacuucaacggcggcaagaucagcgugcaguacaaccugagccacagcuacgccguggacgccgccaaccacugcggcaccaucgccaacggcgugcugcagaccuucaugagaauggccuggggcggcagcuacaucgcccuggacagcggcugcggcaacugggacugcaucaugaccagcuaccaguaccugaucauccagaacaccaccugggaggaccacugccaguucagcagacccagccccaucggcuaccugggccugcugagccagagaaccagagacaucuacaucagcagaagacugcugggcaccuucaccuggacccugagcgacagcgagggcaacgagacccccggcggcuacugccugaccagauggaugcugaucgaggccgagcugaagugcuucggcaacaccgccguggccaagugcaacgagaagcacgacgaggaguucugcgacaugcugagacuguucgacuucaacaagcaggccaucagaagacugaagacccccgcccaggccaacauccagcugaucaacaaggccgugaacgcccugaucaacgaccagcugaucaugaagaaccaccugagagacaucaugugcauccccuacugcaacuacagcaaguacugguaccugaaccacaccgugaccggcaagaccagccugcccagaugcuggcuggugagcaacggcagcuaccugaacgagacccacuucagcgacgacaucgagcagcaggccgacaacaugaucaccgagcugcugcagaaggaguacauggacagacagggcaagaccccccugggccugguggaccuguucguguucagcaccagcuucuaccugaucagcaucuuccugcaccuggugaagauccccacccacagacacgugaucggcaagcccugccccaagccccacagacugaaccacaugggcaucugcagcugcggccuguacaagcaccccggcgugcccgugaaguggaagagaugaggacuaguaauaaggaaacuguaugaaugucugugggcaggaagugaagagauccuucuguaaagguuuuuggaauuaugucugcugaauaauaaacuuuuuugaaauaauaaaucugguagaaaaaugagaucuaaaaaaaaaaaaaaaaaaaaaaaaaaaaaaaaaaaaaaaaaaaaaaaaaaaaaaaaaaaaaaaaaaaaaaaaaaaaaaaaaaaaaaaaaaaaaaaaaaaa

SEQ ID NO: 29306 - RNA, 1785 nt, Artificial Sequence
  mRNA product Design b-4 (A100) comprising derived and/or modified sequence from LASV(Nig08-A19;Clade III)__ADU56618__GPCmut5 (opt4)
aggagagucccgcagucggcguccagcggcucugcuuguucgugugugugucguugcaggccuuauucaagcuuaccaugggccagaucgugaccuucuuccaggaggugccccacgugaucgaggaggugaugaacaucgugcugaucgcccugagcauccuggccauccugaagggccuguacaacaucgccaccugcggccugaucggccuggugaccuuccugcugcugagcggcagaagcugcagcaugaccuacaagggcguguacgagcugcagacccuggagcugaacaugaacacccugaacaugaccaugccccugagcugcaccaagaacaacagccaccacuacaucauggugggcaacgagaccggccuggagcugacccugaccaacaccagccugcugcaccacaaguucugcaaccugagcgacgcccacaagaagaaccuguacgaccacacccugaugagcaucaucagcaccuuccaccugagcauccccaacuucaaccaguacgaggccaugagcugcgacuucaacggcggcaagaucaccgugcaguacaaccugagccacagcuacgccaucgacgccgccaaccacugcggcaccguggccaacggcgugcugcagaccuucaugagaauggccuggggcggcagcuacaucgcccuggacagcggcugcggcaagugggacugcaucaugaccagcuaccaguaccugaucauccagaacaccaccugggaggaccacugccaguucagcagacccagccccaucggcuaccugggccugcugagccagagaaccagagacaucuacaucagcagaagacugcugggcaccuucaccuggacccugagcgacagcgagggcaacgagacccccggcggcuacugccugaccagauggaugcugaucgaggccgagcugaagugcuucggcaacaccgccguggccaagugcaacgagaagcacgacgaggaguucugcgacaugcugagacuguucgacuucaacaagcaggccaucagaagacugaaggcccccgcccagaugagcauccagcugaucaacaaggccgugaacgcccugaucaacgaccagcugaucaugaagaaccaccugagagacaucaugugcauccccuacugcaacuacagcaaguacugguaccugaaccacaccagcaccggcagaaccagccugcccagaugcuggcuggugagcaacggcagcuaccugaacgagacccacuucagcgacgacaucgagcagcaggccgacaacaugaucaccgagaugcugcagaaggaguaccuggacagacagggcaagaccccccugggccugguggaccuguucguguucagcaccagcuucuaccugaucagcaucuuccugcaccuggugaagauccccacccacagacacaucgugggcaagcccugccccaagccccacagacugaaccacaugggcaucugcagcugcggccuguacaagcagcccggcgugcccgugagauggaagagaugaggacuaguaauaaggaaacuguaugaaugucugugggcaggaagugaagagauccuucuguaaagguuuuuggaauuaugucugcugaauaauaaacuuuuuugaaauaauaaaucugguagaaaaaugagaucuaaaaaaaaaaaaaaaaaaaaaaaaaaaaaaaaaaaaaaaaaaaaaaaaaaaaaaaaaaaaaaaaaaaaaaaaaaaaaaaaaaaaaaaaaaaaaaaaaaaa

SEQ ID NO: 29307 - RNA, 1788 nt, Artificial Sequence
  mRNA product Design b-4 (A100) comprising derived and/or modified sequence from LASV(G1180-SLE-2010;Clade IV)__AIT17168__GPCmut5 (opt4)
aggagagucccgcagucggcguccagcggcucugcuuguucgugugugugucguugcaggccuuauucaagcuuaccaugggccagaucgugaccuucuuccaggaggugccccacgugaucgaggaggugaugaacaucgugcugaucgcccugagcauccuggccgugcugaagggccuguacaacuucgccaccugcggccuggugggccugcugaccuuccugcugcugugcggcagaagcugcaccgccagcagauacaagggcguguacgagcugcagacccuggagcugaacauggagacccugaacaugaccaugccccugagcugcaccaagaacaacagccaccacuacaucauggugggcaacgagaccggccuggagcugacccugaccaacaccagcaucaucaaccacaaguucugcaaccugagcgacgcccacaagaagaaccuguacgaccacgcccugaugagcaucaucagcaccuuccaccugagcauccccaacuucaaccaguacgaggccaugagcugcgacuucaacggcggcaagaucagcgugcaguacaaccugagccacagcuacgccggcgacgccgccaaccacugcggcaccguggccaacggcgugcugcagaccuucaugagaauggccuggggcggcagcuacaucgcccuggacagcggcugcggcagcugggacugcaucaugaccagcuaccaguaccugaucauccagaacaccaccugggaggaccacugccaguucagcagacccagccccaucggcuaccugggccugcugagccagagaaccagagacaucuacaucagcagaagacugcugggcaccuucaccuggacccugagcgacagcgagggcaaggacacccccggcggcuacugccugaccagauggaugcugaucgaggccgagcugaagugcuucggcaacaccgccguggccaagugcaacgagaagcacgacgaggaguucugcgacaugcugagacuguucgacuucaacaagcaggccauccagagacugaaggcccccgcccagaugagcauccagcugaucaacaaggccgugaacgcccugaucaacgaccagcugaucaugaagaaccaccugagagacaucaugugcauccccuacugcaacuacagcaaguacugguaccugaaccacaccaccaccggcaagaccagccugcccaagugcuggcuggugagcaacggcagcuaccugaacgagacccacuucagcgacgacaucgagcagcaggccgacaacaugaucaccgagaugcugcagaaggaguacauggagagacagggcaagaccccccugggccugguggaccuguucguguucagcaccagcuucuaccugaucagcaucuuccugcaccuggugaagauccccacccacagacacaucgugggcaagagcugccccaagccccacagacugaaccacaugggcaucugcagcugcggccuguacaagcagcccggcgugcccgugaaguggaagagaugaggacuaguaauaaggaaacuguaugaaugucugugggcaggaagugaagagauccuucuguaaagguuuuuggaauuaugucugcugaauaauaaacuuuuuugaaauaauaaaucugguagaaaaaugagaucuaaaaaaaaaaaaaaaaaaaaaaaaaaaaaaaaaaaaaaaaaaaaaaaaaaaaaaaaaaaaaaaaaaaaaaaaaaaaaaaaaaaaaaaaaaaaaaaaaaaa

SEQ ID NO: 29308 - RNA, 1788 nt, Artificial Sequence
  mRNA product Design b-4 (A100) comprising derived and/or modified sequence from LASV(G1442-SLE-2011;Clade IV)__AIT17180__GPCmut5 (opt4)
aggagagucccgcagucggcguccagcggcucugcuuguucgugugugugucguugcaggccuuauucaagcuuaccaugggccagaucgugaccuucuuccaggaggugccccacgugaucgaggaggugaugaacaucgugcugaucgcccugagcauccuggccgugcugaagggccuguacaacguggccaccugcggccugaucggccuggugaccuuccugcugcugugcggcagaagcugcaccaccacccuguacaagggcguguacgagcugcagacccuggagcugaacauggagacccugaacaugaccaugccccugagcugcaccaagaacaacagccaccacuacaucagagugggcaacgagaccggccuggagcugacccugaccaacaccagcaucaucaaccacaaguucugcaaccugagcgacgcccacaagaagaaccuguacgaccacgcccugaugagcaucaucagcaccuuccaccugagcauccccaacuucaaccaguacgaggccaugagcugcgacuucaacggcggcaagaucagcgugcaguacaaccugagccacagcuacgccggcgacgccgccaaccacugcggcaccguggccaacggcgugcugcagaccuucaugagaauggccuggggcggcagcuacaucgcccuggacagcggcugcggcaacugggacugcaucaugaccagcuaccaguaccugaucauccagaacaccaccugggacgaccacugccaguucagcagacccagccccaucggcuaccugggccugcugagccagagaaccagagacguguacaucagcagaagacugcugggcaccuucaccuggacccugagcgacagcgagggcaaggacacccccggcggcuacugccugaccagauggaugcugaucgaggccgagcugaagugcuucggcaacaccgccguggccaagugcaacgagaagcacgacgaggaguucugcgacaugcugagacuguucgacuucaacaagcaggccauccagagacugaaggcccccgcccagaugagcauccagcugaucaacaaggccgugaacgcccugaucaacgaccagcugaucaugaagaaccaccugagagacaucaugugcauccccuacugcaacuacagcaaguacugguaccugaacaacaccgccaccggcaagaccagccugcccaagugcuggcugaucagcaacggcagcuaccugaacgagacccacuucagcgacgacaucgagcaggaggccgacaacaugaucaccgagaugcugcagaaggaguacauggagagacagggcaagaccccccugggccugguggaccuguucguguucagcaccagcuucuaccugaucagcaucuuccugcaccuggugaagauccccacccacagacacaucgugggcaagagcugccccaagccccacagacugaaccacaugggcaucugcagcugcggccuguacaagcagcccggcgugcccgugagauggaagagaugaggacuaguaauaaggaaacuguaugaaugucugugggcaggaagugaagagauccuucuguaaagguuuuuggaauuaugucugcugaauaauaaacuuuuuugaaauaauaaaucugguagaaaaaugagaucuaaaaaaaaaaaaaaaaaaaaaaaaaaaaaaaaaaaaaaaaaaaaaaaaaaaaaaaaaaaaaaaaaaaaaaaaaaaaaaaaaaaaaaaaaaaaaaaaaaaa

SEQ ID NO: 29309 - RNA, 1788 nt, Artificial Sequence
  mRNA product Design b-4 (A100) comprising derived and/or modified sequence from LASV(G3010-SLE-2013;Clade IV)__AIT17344__GPCmut5 (opt4)
aggagagucccgcagucggcguccagcggcucugcuuguucgugugugugucguugcaggccuuauucaagcuuaccaugggccagaucgugaccuucuuccaggaggugccccacgugaucgaggaggugaugaacaucgugcugaucgcccugagcauccuggccgugcugaagggccuguacaacuucgccaccugcggccuggugggccuggugaccuuccugcugcugugcggcagaagcugcaccaccagccuguacaagggcguguacgagcugcagacccuggagcugaacauggagacccugaacaugaccaugccccugagcugcaccaagaacaacagccaccacuacaucauggugggcaacgagaccggccuggagcugacccugaccaacaccagcaucaucaaccacaaguucugcaaccugagcgacgcccacaagaagaaccuguacaaccacgcccugaugagcaucaucagcaccuuccaccugagcauccccaacuucaaccaguacgaggccaugagcugcgacuucaacggcggcaagaucagcgugcaguacaaccugagccacagcuacgccggcgacgccgccagccacugcggcaccguggccaacggcgugcugcagaccuucaugagaauggccuggggcggcagcuacaucgcccuggacagcggcugcggcaagugggacugcaucaugaccagcuaccaguaccugaucauccagaacaccaccugggaggaccacugccaguucagcagacccagccccaucggcuaccugggccugcugagccagagaaccagagacaucuacaucagcagaagacugcugggcaccuucaccuggacccugagcgacagcgagggcaaggacacccccggcggcuacugccugaccagauggaugcugaucgaggccgagcugaagugcuucggcaacaccgccguggccaagugcaacgagaagcacgacgaggaguucugcgacaugcugagacuguucgacuucaacaagcaggccauccagagacugaagacccccgcccagaugagcauccagcugaucaacaaggccgugaacgcccugaucaacgaccagcugaucaugaagaaccaccugagagacaucaugugcauccccuacugcaacuacagcaaguacugguaccugaaccacaccaccaccggcaagaccagccugcccaagugcuggcuggugagcaacggcagcuaccugaacgagacccacuucagcgacgacaucgagcagcaggccgacaacaugaucaccgagaugcugcagaaggaguacauggagagacagggcaagaccccccugggccugguggaccuguucguguucagcaccagcuucuaccugaucagcaucuuccugcaccuggugaagauccccacccacagacacaucgugggcaagagcugccccaagccccacagacugaaccacaugggcaucugcagcugcggccuguacaagcagcccggcgugcccgugagauggaagagaugaggacuaguaauaaggaaacuguaugaaugucugugggcaggaagugaagagauccuucuguaaagguuuuuggaauuaugucugcugaauaauaaacuuuuuugaaauaauaaaucugguagaaaaaugagaucuaaaaaaaaaaaaaaaaaaaaaaaaaaaaaaaaaaaaaaaaaaaaaaaaaaaaaaaaaaaaaaaaaaaaaaaaaaaaaaaaaaaaaaaaaaaaaaaaaaaa

SEQ ID NO: 29310 - RNA, 1788 nt, Artificial Sequence
  mRNA product Design b-4 (A100) comprising derived and/or modified sequence from LASV(G502-SLE-2009;Clade IV)__AIT17126__GPCmut5 (opt4)
aggagagucccgcagucggcguccagcggcucugcuuguucgugugugugucguugcaggccuuauucaagcuuaccaugggccagaucgugaccuucuuccaggaggugccccacgugaucgaggaggugaugaacaucgugcugaucgcccugagcauccuggccgugcugaagggccuguacaacuucgccaccugcggccuggugggccugcugaccuuccugcugcugugcggcagaagcugcaccaccggccuguacaagggcguguacgagcugcagacccuggagcugaacauggagacccugaacaugaccaugccccugagcugcaccaagaacaacagccaccacuacaucauggugggcaacgagaccggccuggagcugacccugaccaacaccagcaucaucaaccacaaguucugcaaccugagcgacgcccacaagaagaaccuguacgaccacgcccugaugagcaucaucagcaccuuccaccugagcauccccaacuucaaccaguacgaggccaugagcugcgacuucaacggcggcaagaucagcgugcaguacaaccugagccacagcuacgccggcgacgccgccgaccacugcggcaccguggccaacggcgugcugcagaccuucaugagaauggccuggggcggcagcuacaucgcccuggacagcggcugcggcagaugggacugcaucaugaccagcuaccaguaccugaucauccagaacaccaccugggaggaccacugccaguucagcagacccagccccaucggcuaccugggccugcugagccagagaaccagagacaucuacaucagcagaagacugcugggcaccuucaccuggacccugagcgacagcgagggcaaggacacccccggcggcuacugccugaccagauggaugcugaucgaggccgagcugaagugcuucggcaacaccgccguggccaagugcaacgagaagcacgacgaggaguucugcgacaugcugagacuguucgacuucaacaagcaggccauccagagacugaaggcccccgcccagaugagcauccagcugaucaacaaggccgugaacgcccugaucaacgaccagcuggugaugaagaaccaccugagagacaucaugugcauccccuacugcaacuacagcagauacugguaccugaaccacaccaccaccggcagaaccagccugcccaagugcuggcuggugagcaacggcagcuaccugaacgagacccacuucagcgacgacaucgagcagcaggccgacaacaugaucaccgagaugcugcagaaggaguacauggagagacagggcaagaccccccugggccugguggaccuguucguguucagcaccagcuucuaccugaucagcaucuuccugcaccuggugaagauccccacccacagacacaucgugggcaagagcugccccaagccccacagacugaaccacaugggcaucugcagcugcggccuguacaagcagcccggcgugcccgugaaguggaagagaugaggacuaguaauaaggaaacuguaugaaugucugugggcaggaagugaagagauccuucuguaaagguuuuuggaauuaugucugcugaauaauaaacuuuuuugaaauaauaaaucugguagaaaaaugagaucuaaaaaaaaaaaaaaaaaaaaaaaaaaaaaaaaaaaaaaaaaaaaaaaaaaaaaaaaaaaaaaaaaaaaaaaaaaaaaaaaaaaaaaaaaaaaaaaaaaaa

SEQ ID NO: 29311 - RNA, 1788 nt, Artificial Sequence
  mRNA product Design b-4 (A100) comprising derived and/or modified sequence from LASV(G733-SLE-2010;Clade IV)__AIT17154__GPCmut5 (opt4)
aggagagucccgcagucggcguccagcggcucugcuuguucgugugugugucguugcaggccuuauucaagcuuaccaugggccagaucgugaccuucuuccaggaggugccccacgugaucgaggaggugaugaacaucgugcugaucgcccugagcauccuggccgugcugaagggccuguacaacuucgccaccugcggcaucgugggccuggugagcuuccugcugcugugcggcagaagcugcaccaccagccuguacaagggcguguacgagcugcagacccuggagcugaacauggagacccugaacaugaccaugccccugagcugcaccaagaacaacagccaccacuacaucauggugggcaacgagaccggccuggagcugacccugaccaacaccagcaucaucaaccacaaguucugcaaccugagcgacgcccacaagaagaaccuguacgaccacgcccugaugagcaucaucagcaccuuccaccugagcauccccaacuucaaccaguacgaggccaugagcugcgacuucaacggcggcaagaucagcgugcaguacaaccugagccacagcuacgccggcgacgccgccaaccacugcggcaccaucgccaacggcgugcugcagaccuucaugagaauggccuggggcggcagcuacaucgcccuggacagcggcugcgacagaugggacugcaucaugaccagcuaccaguaccugaucauccagaacaccaccugggaggaccacugccaguucagcagacccagccccaucggcuaccugggccugcugagccagagaaccagagacaucuacaucagcagaagacugcugggcaccuucaccuggacccugagcgacagcgagggcaaggacacccccggcggcuacugccugaccagauggaugcugaucgaggccgagcugaagugcuucggcaacaccgccguggccaagugcaacgagaagcacgacgaggaguucugcgacaugcugagacuguucgacuucaacaagcaggccauccagagacugaaggcccccgcccagaugagcauccagcugaucaacaaggccgugaacgcccugaucaacgaccagcugaucaugaagaaccaccugagagacaucaugugcauccccuacugcaacuacagcaaguacugguaccugaaccacaccaccaccggcaagaccagccugcccaagugcuggcuggugagcaacggcagcuaccugaacgagacccacuucagcgacgacaucgagcagcaggccgacaacaugaucaccgagaugcugcagaaggaguacauggagagacagggcaagaccccccugggccugguggaccuguucguguucagcaccagcuucuaccugaucagcaucuuccugcaccuggugaagauccccacccacagacacguggugggcaagagcugccccaagccccacagacugaaccacaugggcaucugcagcugcggccuguacggccagcccggcgugcccgugaaguggaagagaugaggacuaguaauaaggaaacuguaugaaugucugugggcaggaagugaagagauccuucuguaaagguuuuuggaauuaugucugcugaauaauaaacuuuuuugaaauaauaaaucugguagaaaaaugagaucuaaaaaaaaaaaaaaaaaaaaaaaaaaaaaaaaaaaaaaaaaaaaaaaaaaaaaaaaaaaaaaaaaaaaaaaaaaaaaaaaaaaaaaaaaaaaaaaaaaaa

SEQ ID NO: 29312 - RNA, 1788 nt, Artificial Sequence
  mRNA product Design b-4 (A100) comprising derived and/or modified sequence from MOPV/LASV reassortant(IGS-1;Clade IV)__AFY05576__GPCmut5 (opt4)
aggagagucccgcagucggcguccagcggcucugcuuguucgugugugugucguugcaggccuuauucaagcuuaccaugggccagaucgugaccuucuuccaggaggugccccacgugaucgaggaggugaugaacaucgugcugaucgcccugagcgugcuggccgugcugaagggccuguacaacuucgccaccugcggccuggugggccuggugaccuuccugcugcugugcggcagaagcugcaccaccagccuguacaagggcguguacgagcugcagacccuggagcugaacauggagacccugaacaugaccaugccccugagcugcaccaagaacaacagccaccacuacaucauggugggcaacgagaccggccuggagcugacccugaccaacaccagcaucaucaaccacaaguucugcaaccugagcgacgcccacaagaagaaccuguacgaccacgcccugaugagcaucaucagcaccuuccaccugagcauccccaacuucaaccaguacgaggccaugagcugcgacuucaacggcggcaagaucagcgugcaguacaaccugagccacagcuacgccggcgacgccgccaaccacugcggcaccguggccaacggcgugcugcagaccuucaugagaauggccuggggcggcagcuacaucgcccuggacagcggcugcggcaacugggacugcaucaugaccagcuaccaguaccugaucauccagaacaccaccugggaggaccacugccaguucagcagacccagccccaucggcuaccugggccugcugagccagagaaccagagacaucuacaucagcagaagacugcugggcaccuucaccuggacccugagcgacagcgagggcgaggacacccccggcggcuacugccugaccagauggaugcugaucgaggccgagcugaagugcuucggcaacaccgccguggccaagugcaacgagaagcacgacgaggaguucugcgacaugcugagacuguucgacuucaacaagcaggccauccagagacugaaggcccccgcccagaugagcauccagcugaucaacaaggccgugaacgcccugaucaacgaccagcugaucaugaagaaccaccugagagacaucaugugcauccccuacugcaacuacagcaaguacugguaccugaaccacaccaccaccggcagaaccagccugcccaagugcuggcuggugagcaacggcagcuaccugaacgagacccacuucagcgacgacaucgagcagcaggccgacaacaugaucaccgagaugcugcagaaggaguacauggagagacagggcaagaccccccugggccugguggaccuguucguguucagcaccagcuucuaccugaucagcaucuuccugcaccuggugaagauccccacccacagacacaucgugggcaagagcugccccaagccccacagacugaaccacaugggcaucugcagcugcggccuguacaagcagcccggcgugcccgugaaguggaagagaugaggacuaguaauaaggaaacuguaugaaugucugugggcaggaagugaagagauccuucuguaaagguuuuuggaauuaugucugcugaauaauaaacuuuuuugaaauaauaaaucugguagaaaaaugagaucuaaaaaaaaaaaaaaaaaaaaaaaaaaaaaaaaaaaaaaaaaaaaaaaaaaaaaaaaaaaaaaaaaaaaaaaaaaaaaaaaaaaaaaaaaaaaaaaaaaaa

SEQ ID NO: 29313 - RNA, 1788 nt, Artificial Sequence
  mRNA product Design b-4 (A100) comprising derived and/or modified sequence from LASV(LM765-SLE-2012;Clade IV)__AIT17814__GPCmut5 (opt4)
aggagagucccgcagucggcguccagcggcucugcuuguucgugugugugucguugcaggccuuauucaagcuuaccaugggccagaucgugaccuucuuccaggaggugccccacgugaucgaggaggugaugaacaucgugcugaucgcccugagcauccuggccgugcugaagggccuguacaacuucgccaccugcggccuggugggccuggugaccuuccugcugcugugcggcagaagcugcaccaccagccuguacaagggcguguacgagcugcagacccuggagcugaacauggagacccugaacaugaccaugccccugagcugcaccaagaacaacagccaccacuacaucauggugggcaacgagaccggccuggagcugacccugaccaacaccagcaucaucgaccacaaguucugcaaccugagcgacgcccacagaaagaaccuguacgaccacgcccugaugagcaucaucagcaccuuccaccugagcauccccaacuucaaccaguacgaggccaugagcugcgacuucaacggcggcaagaucagcgugcaguacaaccugagccacagcuacgccaaggacgccgccgaccacugcggcaccguggccaacggcgugcugcagaccuucaugagaauggccuggggcggcagcuacaucgcccuggacagcggcugcggcagaugggacugcaucaugaccagcuaccaguaccugaucauccagaacaccaccugggaggaccacugccaguucagcagacccagccccaucggcuaccugggccugcugagccagagaaccagagacaucuacaucagcagaagacugcugggcaccuucaccuggacccugagcgacagcgagggcaaggacacccccggcggcuacugccugaccagauggaugcugaucgaggccgagcugaagugcuucggcaacaccgccguggccaagugcaacgagaagcacgacgaggaguucugcgacaugcugagacuguucgacuucaacaagcaggccauccagagacugaaggcccccgcccagaugagcauccagcugaucaacaaggccgugaacgcccugaucaacgaccagcugaucaugaagaaccaccugagagacaucaugugcauccccuacugcaacuacagcaaguacugguaccugaaccacaccaccaccggcaagaccagccugcccaagugcuggcuggugagcaacggcagcuaccugaacgagacccacuucagcgacgacaucgagcagcaggccgacaacaugaucaccgagaugcugcagaaggaguacauggagagacagggcaagaccccccugggccugguggaccuguucguguucagcaccagcuucuaccugaucagcaucuuccugcaccuggugaagauccccacccacagacacaucgugggcaagcccugccccaagccccacagacugaaccacaugggcaucugcagcugcggccuguacaagcagcccggcgugcccgugaaguggaagagaugaggacuaguaauaaggaaacuguaugaaugucugugggcaggaagugaagagauccuucuguaaagguuuuuggaauuaugucugcugaauaauaaacuuuuuugaaauaauaaaucugguagaaaaaugagaucuaaaaaaaaaaaaaaaaaaaaaaaaaaaaaaaaaaaaaaaaaaaaaaaaaaaaaaaaaaaaaaaaaaaaaaaaaaaaaaaaaaaaaaaaaaaaaaaaaaaa

SEQ ID NO: 29314 - RNA, 1788 nt, Artificial Sequence
  mRNA product Design b-4 (A100) comprising derived and/or modified sequence from LASV(LM776-SLE-2012;Clade IV)__AIT17824__GPCmut5 (opt4)
aggagagucccgcagucggcguccagcggcucugcuuguucgugugugugucguugcaggccuuauucaagcuuaccaugggccagaucgugaccuucuuccaggaggugccccacgugaucgaggaggugaugaacaucgugcugaucgcccugagcauccuggccgugcugaagggccuguacaacuucgccaccugcggccuggugggccuggugaccuuccugcugcugugcggcagaagcugcaccaccagcguguacaagggcguguacgagcugcagacccuggagcugaacauggagacccugaacaugaccaugccccugagcugcaccaagaacaacagccaccacuacaucauggugggcaacgagaccggccuggagcugacccugaccaacaccagcaucaucaaccacaaguucugcaaccugagcgacgcccacaagaagaaccuguacgaccacgcccugaugagcaucaucagcaccuuccaccugagcauccccaacuucaaccaguacgaggccaugagcugcgacuucaacggcggcaagaucagcgugcaguacaaccugagccacagcuacgccggcgacgccgccaaccacugcggcaccguggccaacggcgugcugcagaccuucaugagaauggccuggggcggcagcuacaucgcccuggacagcggcugcggcaagugggacugcaucaugaccagcuaccaguaccugaucauccagaacaccaccugggaggaccacugccaguucagcagacccagccccaucggcuaccugggccugcugagccagagaaccagagacaucuacaucagcagaagacugcugggcaccuucaccuggacccugagcgacagcgagggcaaggacacccccggcggcuacugccugaccagauggaugcugaucgaggccgagcugaagugcuucggcaacaccgccguggccaagugcaacgagaagcacgacgaggaguucugcgacaugcugagacuguucgacuucaacaagcaggccauccagagacugaaggcccccgcccagaugagcauccagcugaucaacaaggccgugaacgcccugaucaacgaccagcugaucaugaagaaccaccugagagacaucaugugcauccccuacugcaacuacagcaaguacugguaccugaaccacaccaccaccggcaagaccagccugcccaagugcuggcuggugagcaacggcagcuaccugaacgagacccacuucagcgacgacaucgagcagcaggccgacaacaugaucaccgagaugcugcagaaggaguacauggagagacagggcaagaccccccugggccugguggaccuguucguguucagcaccagcuucuaccugaucagcaucuuccugcaccuggugaagauccccacccacagacacaucgugggcaagagcugccccaagccccacagacugaaccacaugggcaucugcagcugcggccuguacaagcagcccggcgugcccgugagauggaagagaugaggacuaguaauaaggaaacuguaugaaugucugugggcaggaagugaagagauccuucuguaaagguuuuuggaauuaugucugcugaauaauaaacuuuuuugaaauaauaaaucugguagaaaaaugagaucuaaaaaaaaaaaaaaaaaaaaaaaaaaaaaaaaaaaaaaaaaaaaaaaaaaaaaaaaaaaaaaaaaaaaaaaaaaaaaaaaaaaaaaaaaaaaaaaaaaaa

SEQ ID NO: 29315 - RNA, 1788 nt, Artificial Sequence
  mRNA product Design b-4 (A100) comprising derived and/or modified sequence from LASV(Mad39;Clade IV)__ANH09722__GPCmut5 (opt4)
aggagagucccgcagucggcguccagcggcucugcuuguucgugugugugucguugcaggccuuauucaagcuuaccaugggccagaucgugaccuucuuccaggaggugccccacgugaucgaggaggugaugaacaucgugcugaucgcccugagcauccuggccgugcugaagggccuguacaacguggccaccugcggccugaucggccuggugaccuuccugcugcugugcggcagaagcugcaccaccacccuguacaagggcguguacgagcugcaggcccuggagcugaacauggagacccugaacaugaccaugccccugagcugcaccaagaacaacagccaccacuacaucagagugggcaacgagaccggccuggagcugacccugaccaacaccagccugaucaaccacaaguucugcaaccugagcgacgcccacaagaagaaccuguacgaccacgcccugaugagcaucaucagcaccuuccaccugagcauccccaacuucaaccaguacgaggccaugagcugcgacuucaacgacggcaagaucagcgugcaguacaaccugagccacaccuacgccggcgacaccgccaaccacugcggcaccguggccaacggcgugcugcagaccuucaugagaauggccuggggcggcagcuacaucgcccuggacagcggcugcggcggcugggacugcaucaugaccagcuaccaguaccugaucauccagaacaccaccugggaggaccacugccaguucagcagacccagccccaucggcuaccugggccugcugagccagagaaccagagacaucuacaucagcagaagacugcugggcaccuucaccuggacccugagcgacagcgagggcaaggacacccccggcggcuacugccugaccagauggaugcugaucgaggccgagcugaagugcuucggcaacaccgccguggccaagugcaacgagaagcacgacgaggaguucugcgacaugcugagacuguucgacuucaacaagcaggccauccagagacugaaggcccccgcccagaugagcauccagcugaucaacaaggccgugaacgcccugaucaacgaccagcugaucaugaagaaccaccugagagacaucaugugcauccccuacugcaacuacagcaaguacugguaccugaaccacaccgugaccggcaagaccagccugcccaagugcuggcuggugagcaacggcagcuaccugaacgagacccacuucagcgacgacaucgagcagcaggccgacaacaugaucaccgagaugcugcagaaggaguacauggagagacagggcaagaccccccugggccugguggaccuguucguguucagcaccagcuucuaccugaucagcaucuuccugcaccuggugaagauccccacccacagacacguggugggcaagcccugccccaagccccacagacugaaccacaugggcaucugcagcugcggcuucuacaagcagcccggcgugcccgugagauggaagagaugaggacuaguaauaaggaaacuguaugaaugucugugggcaggaagugaagagauccuucuguaaagguuuuuggaauuaugucugcugaauaauaaacuuuuuugaaauaauaaaucugguagaaaaaugagaucuaaaaaaaaaaaaaaaaaaaaaaaaaaaaaaaaaaaaaaaaaaaaaaaaaaaaaaaaaaaaaaaaaaaaaaaaaaaaaaaaaaaaaaaaaaaaaaaaaaaa

SEQ ID NO: 29316 - RNA, 1788 nt, Artificial Sequence
  mRNA product Design b-4 (A100) comprising derived and/or modified sequence from LASV(Z0947-SLE-2011;Clade IV)__AIT17840__GPCmut5 (opt4)
aggagagucccgcagucggcguccagcggcucugcuuguucgugugugugucguugcaggccuuauucaagcuuaccaugggccagaucgugaccuucuuccaggaggugccccacgugaucgaggaggugaugaacaucgugcugaucgcccugagcauccuggccgugcugaagggccuguacaacuucgccaccugcggccuggugggccuggugaccuuccugcugcugugcggcagaagcugcaccaucagccuguacaagggcguguacgagcugcagacccuggagcugaacauggagacccugaacaugaccaugccccugagcugcaccaagaacaacagccaccacuacaucauggugggcaacgagaccggccuggagcugacccugaccaacaccagcaucaucaaccacaaguucugcaaccugagcgacgcccacaagaagaaccuguacgaccacgcccugaugagcaucaucagcaccuuccaccugagcauccccaacuucaaccaguacgaggccaugagcugcgacuucaacggcggcaagaucagcgugcaguacaaccugagccacagcuacgccggcgacgccgccaaccacugcggcaccguggccaacggcgugcugcagaccuucaugagaauggccuggggcggcagcuacaucgcccuggacagcggcugcgacagaugggacugcaucaugaccagcuaccaguaccugaucauccagaacaccaccugggaggaccacugccaguucagcagacccagccccaucggcuaccugggccugcugagccagagaaccagagacaucuacaucagcagaagacugcugggcaccuucaccuggacccugagcgacagcgagggcaaggacacccccggcggcuacugccugaccagauggaugcugaucgaggccgagcugaagugcuucggcaacaccgccguggccaagugcaacgagaagcacgacgaggaguucugcgacaugcugagacuguucgacuucaacaagcaggccauccagagacugaaggcccccgcccagaugagcauccagcugaucaacaaggccgugaacgcccugaucaacgaccagcugaucaugaagaaccaccugagagacaucaugugcauccccuacugcaacuacagcaaguacugguaccugaaccacaccaccaccggcaagaccagccugcccaagugcuggcuggugagcaacggcagcuaccugaacgagacccacuucagcgacgacaucgagcagcaggccgacaacaugaucaccgagaugcugcagaaggaguacauggagagacagggcaagaccccccugggccugguggaccuguucguguucagcaccagcuucuaccugaucagcaucuuccugcaccuggugaagauccccacccacagacacaucgugggcaagcccugccccaagccccacagacugaaccacaugggcaucugcagcugcggccuguacaagcagcccggcgugcccgugaaguggaagagaugaggacuaguaauaaggaaacuguaugaaugucugugggcaggaagugaagagauccuucuguaaagguuuuuggaauuaugucugcugaauaauaaacuuuuuugaaauaauaaaucugguagaaaaaugagaucuaaaaaaaaaaaaaaaaaaaaaaaaaaaaaaaaaaaaaaaaaaaaaaaaaaaaaaaaaaaaaaaaaaaaaaaaaaaaaaaaaaaaaaaaaaaaaaaaaaaa

SEQ ID NO: 29317 - RNA, 1788 nt, Artificial Sequence
  mRNA product Design b-4 (A100) comprising derived and/or modified sequence from LASV(Josiah;Clade IV)__NP_694870__GPCmut5 (opt5)
aggagagucccgcagucggcguccagcggcucugcuuguucgugugugugucguugcaggccuuauucaagcuuaccaugggccagaucgugaccuucuuucaagaggucccccacguuauugaagaggugaugaacaucgugcugauugcccucagcguccuggcugugcuuaaggggcuguacaauuucgccacaugcggacucguuggccuggugacguuucuucugcucugugggagauccugcaccacaucucuguauaaaggagucuacgaacugcagacccucgagcugaacauggaaacacuuaauaugaccaugccucugagcuguacaaagaacaauucccaucacuauaucauggugggcaacgagaccgggcucgagcugacgcuuaccaauacaucuauuaucaaccauaaauucugcaaucugagcgacgcgcacaagaaaaaccucuacgaucaugcucugauguccaucauuucuaccuuucaccugagcaucccgaauuucaaccaguaugaagccauguccugugacuuuaauggaggcaagauuagcguucaguacaaccucucucacuccuaugccggcgaugcugccaaucauugcgggacaguggcuaacggaguccugcaaaccuucaugcggauggccuggggcgggagcuacaucgcgcuugacucuggauguggcaacugggauugcauuaugacguccuaccaguaucugaucauucagaauacaaccugggaggaccacugucaguuuagccgccccucuccuaucggguaccucggacugcuuucccaaagaacacgggauaucuauauuagccgcagacugcucggcaccuucaccuggacacuguccgacucugaaggcaaggauacgcccgggggauacugccugacccgguggaugcucaucgaggccgagcugaaauguuuuggcaacacagcuguggccaagugcaaugaaaaacaugacgaggaguucugcgauaugcuucgccuguuugacuucaacaagcaggcuauucagagacucaaagccccugcgcagaugagcauccaacugauuaauaaggccgugaacgcucuuaucaaugaucagcugaucaugaagaaccaccuccgggacauuauguguauccccuauugcaauuacuccaaauauugguaccugaaccacaccacaaccgggcgcacgagccugccuaaguguuggcucgucucuaauggauccuaccugaacgaaacacauuucagcgacgauauugaacagcaagccgacaauaugaucaccgagaugcuucagaaagaguauauggaaagacagggcaagaccccgcuggggcucguugaucuguuuguguucucuaccagcuuuuaccugauuuccaucuuccuucaccucgugaaaauccccacacaucggcacauugucggaaagucuugcccuaaaccccaucgccugaaccacaugggcaucuguagcugcggccuguauaagcagccuggggugcccguuaaguggaaaagaugaggacuaguaauaaggaaacuguaugaaugucugugggcaggaagugaagagauccuucuguaaagguuuuuggaauuaugucugcugaauaauaaacuuuuuugaaauaauaaaucugguagaaaaaugagaucuaaaaaaaaaaaaaaaaaaaaaaaaaaaaaaaaaaaaaaaaaaaaaaaaaaaaaaaaaaaaaaaaaaaaaaaaaaaaaaaaaaaaaaaaaaaaaaaaaaaa

SEQ ID NO: 29318 - RNA, 1785 nt, Artificial Sequence
  mRNA product Design b-4 (A100) comprising derived and/or modified sequence from LASV(LP;Clade I)__AAF86701__GPCmut5 (opt5)
aggagagucccgcagucggcguccagcggcucugcuuguucgugugugugucguugcaggccuuauucaagcuuaccaugggccagaucauuaccuucuuucaagaggugccccacgucaucgaagagguuaugaacauugugcugaucgcccucagccugcuugcuauucugaaggggcucuacaauaucgccacaugcggaaucauuggccugguggcguuccuuuuucugugugggaaauccugcucucucacgcugaagggaggcuaugaacugcagacccucgagcugaacauggaaacacuuaauaugaccaugccucugagcuguaccaaaaacuccucucaucacuacaucagagucgggaaugagacaggacucgagcugacacuuaccaacacgagcauuaucaaucauaaguucugcaaccuguccgacgcucacaaaaagaaucucuaugaucaugcccugaugucuauuaucagcaccuuucaccuguccauuccgaacuucaaucaguacgaagccaugagcugugacuuuaacggcggcaagaucucugugcaguauaaucucucccacagcuacgcuggggaugccgcugagcauugcggaacaguugccaacggcgugcugcaaaccuucaugcggauggcguggggagggcgcuauaucgcccuugacucuggcugugggaauugggauugcauuaugacauccuaccaguaccugaucauucagaacaccacgugggaagaccacugucaguuuagcagacccucuccuaucggauaucucggccugcuuucccaacggacacgcgauauuuacaucagcagacggcugcucggcaccuucacauggacccuguccgacucugaggggaacgagacccccggaggcuauugccugacacgcuggaugcucaucgaagcugagcugaaauguuuugggaauacggccgucgcuaagugcaacgaaaaacaugaugaggaguucugcgacaugcuuagacuguuugauuucaauaagcaggccauucggcgccucaaagcgccugcccagaugagcauccagcugauuaacaaggcugugaaugcccuuaucaacgaccaacugauuaugaagaaucaccucagagauaucauguguauccccuacugcaacuauuccaaauacugguaucugaaucacaccagcucuggacggacaucccugccuaaguguuggcucauuagcaacggcucuuaccugaaugaaacccaguucagcgacgacaucgagcagcaagcugauaacaugauuacagaaaugcuucagaaagaguacaucgaacgccaggggaagaccccgcugggacucguugacauuuuuaucuucuccacgucuuuuuaucugauuagcaucuuccugcaucuuaucaaaauucccacacacagacauaucgugggcaagccuugccccaaaccucaccggcucaaucauaugggcgucuguuccugcgggcuguacaagcaccccggagugccgaccaaguggaaacgcugaggacuaguaauaaggaaacuguaugaaugucugugggcaggaagugaagagauccuucuguaaagguuuuuggaauuaugucugcugaauaauaaacuuuuuugaaauaauaaaucugguagaaaaaugagaucuaaaaaaaaaaaaaaaaaaaaaaaaaaaaaaaaaaaaaaaaaaaaaaaaaaaaaaaaaaaaaaaaaaaaaaaaaaaaaaaaaaaaaaaaaaaaaaaaaaaa

SEQ ID NO: 29319 - RNA, 1785 nt, Artificial Sequence
  mRNA product Design b-4 (A100) comprising derived and/or modified sequence from LASV(803213;Clade II)__AAF86703__GPCmut5 (opt5)
aggagagucccgcagucggcguccagcggcucugcuuguucgugugugugucguugcaggccuuauucaagcuuaccaugggccagaucauuaccuucuuucaagaggugccccacgucaucgaagagguuaugaacauugugcugaucgcccucagccugcuugcuauucugaaggggaucuacaauguggccacaugcggacucuucggccugaucuccuuucuucugcucugugggagaucuugcagcgucacguauaaaggaguguacgaacugcagacccuggagcucaacauggcgaaucugaacaugacaaugccucuuuccuguaccaagaauaacucucaucacuauauuaugguuggcaaugaaacagggcuggagcucacccugacaaacaccagcaucauuaaucauaaauucugcaaccuuuccgacgcucacaagaaaaaucuguacgaucaugcccucaugucuaucauuagcacguuucaccuguccaucccgaacuucaaucaguaugaggccaugagcugugacuuuaacggaggcaagauuucugugcaguacaaucugucccacagcuucgcugucgaugccgcuaaccauugcggcaccaucgccaacggggugcuccaaacauuuaugcggauggcguggggaggcucuuauaucgcccuggacuccggguguggaaauugggauugcauuaugaccagcuaccaguaccuuaucauucagaacacaaccugggaagaccacugucaguucucucgccccuccccuaucggcuaucuggggcuccugagccaaagaacgcgggauauuuacaucucccgcagacuucugggaacauuuaccuggacacucucugacagcgagggcaaugaagcucccggcggguauugccugacccgguggaugcugaucgaggccgagcucaaguguuucggaaacaccgcuguugccaaaugcaaugaaaagcaugaugaggaauuuugcgacaugcugcgccuuuucgauuucaacaaacaggcgauuaagagacugaaaacgccugcccagauguccauccagcucauuaauaaggcugugaacgcccugaucaaugaccaacuuauuaugaagaaccaucugcgggauaucauguguauccccuacugcaauuauagccgcuacugguaucucaaccacacagucaccggcaaaacaucucugccuagauguuggcugguguccaaugggagcuaccucaacgagacccacuuuucugacgacauugaacagcaggcugauaauaugaucacagagaugcugcaaaaggaguacauggaccggcagggaaaaaccccgcuuggccugguggaucucuucgucuuuagcacguccuucuaucugauuucuaucuuucugcaccuuguuaagauucccacacaucgccacaucguggggaaaccuugccccaagccucauagacucaaccacaugggaauuuguagcugcggccuguacaaacaccccggcgugccggucaaguggaagcggugaggacuaguaauaaggaaacuguaugaaugucugugggcaggaagugaagagauccuucuguaaagguuuuuggaauuaugucugcugaauaauaaacuuuuuugaaauaauaaaucugguagaaaaaugagaucuaaaaaaaaaaaaaaaaaaaaaaaaaaaaaaaaaaaaaaaaaaaaaaaaaaaaaaaaaaaaaaaaaaaaaaaaaaaaaaaaaaaaaaaaaaaaaaaaaaaa

SEQ ID NO: 29320 - RNA, 1785 nt, Artificial Sequence
  mRNA product Design b-4 (A100) comprising derived and/or modified sequence from LASV(GA391;Clade III)__CAA36645__GPCmut5 (opt5)
aggagagucccgcagucggcguccagcggcucugcuuguucgugugugugucguugcaggccuuauucaagcuuaccaugggccagaucgugaccuucuuucaagaggucccccacguuauugaagaggugaugaacaucgugcugauugcccucagcauccuggcuauucuuaaggggcuguacaaugucgccacaugcggacucaucggccuggugacguuccuucugcucuccgggagaucuuguagccugaucuauaaaggaaccuacgaacugcagacacucgagcugaacauggaaacccuuaauaugacaaugccucuguccugcaccaagaacaauucucaucacuauauucggguuggcaacgagacagggcucgagcugacccuuacgaauaccagcauccugaaccauaaauuuuguaaucucuccgacgcgcacaagcgcaaccuguacgaucauucucugaugagcauuaucuccacauuccaccucagcauuccgaauuuuaaccaguaugaagcuaugucuugcgacuucaauggaggcaaaaucaccgugcaguacaaccugucccacagcuuugccgucgaugccgcuggccauugugggacacuugccaauggagugcugcaaaccuucaugagaauggcuuggggcgggucuuauauugcccucgacuccggaugcggcaacugggauuguaucaugacgagcuaccaguaccugaucauucagaacacaaccugggacgaucacugccaguuuucucggcccuccccuaucggguaucuuggacugcucagccaacgcacaagagacauuuacaucucccggcgccugcugggcaccuucaccuggacacucucugauagcgagggcaaugaaacgcccgggggauauugucugaccagauggaugcuuauugaggcggagcugaagugcuuuggcaacacagccguugcuaaguguaaugaaaaacaugacgaggaguucugcgauaugcuccggcuguuugacuucaacaagcaggccauccgcagacuuaaaaccccugcucagauguccauccagcugauuaauaaggccgugaacgcgcucaucaaugaucaacugauuaugaaaaaccaucugcgggacaucaugugcauucccuacuguaauuauagccgcuacugguaucucaaccacacaucuaccgggaagacgucccugccuagaugcuggcuuaucagcaauggaucuuaccugaacgaaacaaaguucagcgacgauaucgaacagcaggccgacaauaugauuaccgagaugcuccaaaaagaguacaucgaucggcagggcaagaccccgcuggggcuggucgaccuuuuuguguucuccacaucuuuuuaucucauuagcaucuuccugcaccuggugaaaauucccacccaccgccauaucgucggaaagccuugucccaaaccucacagacucaaccauaugggcauuugcuccuguggccuguacaagcagcccgggguuccggugcgguggaaaagaugaggacuaguaauaaggaaacuguaugaaugucugugggcaggaagugaagagauccuucuguaaagguuuuuggaauuaugucugcugaauaauaaacuuuuuugaaauaauaaaucugguagaaaaaugagaucuaaaaaaaaaaaaaaaaaaaaaaaaaaaaaaaaaaaaaaaaaaaaaaaaaaaaaaaaaaaaaaaaaaaaaaaaaaaaaaaaaaaaaaaaaaaaaaaaaaaa

SEQ ID NO: 29321 - RNA, 1788 nt, Artificial Sequence
  mRNA product Design b-4 (A100) comprising derived and/or modified sequence from LASV(AV;Clade V)__CCA30314__GPCmut5 (opt5)
aggagagucccgcagucggcguccagcggcucugcuuguucgugugugugucguugcaggccuuauucaagcuuaccaugggccagaucgugaccuucuuucaagaggucccccacguuauugaagaggugaugaacaucgugcugauugcccucagcauccuggcuguccuuaaggggcuguacaauauugccacaugcggacucaucggccugaucacguuccuucugcucugugggagauccugcucuagcaaccuguauaaaggaguguacgaacugcagucccucgaccugaauauggagacccuuaacaugacaaugccucugucuuguaccaagaauaacagccaucacuauauucggguuggcaaugauacagggcucgaacugacccuuacaaacaccuccauccugaaucauaaauuuugcaaccucucugacgcgcacaagaaagaucuguacgaccaugcucugaugagcauuaucuccacguuccaccucagcauuccgaauuuuaaccaguaugaggccaugucuugugauuucaauggaggcaagaucuccgugcaguacaaccugagccacucuuaugccauugacgcugccaaucauugcggcaccgucgcuaacgggauccuucaaacauuuaugcgcauggccuggggaggcuccuacaucgcgcuggauagcggguguggaaacugggacugcauuaugaccucuuaccaguaucucaucauucagaauacaaccugggagaaccacugucaguucuccagacccagcccuaucggcuaccuggggcuucugucccaacggacgcgcgauauuuauaucucuagacggcuccugggaacauuuaccuggacacugagcgacuccgaaggcaaugccacccccggcggguacugccucacccgcuggaugcugaucgaggcugaacuuaaguguuucggaaacacagccguggcuaaaugcaaugagaagcaugaugaggaauuuugcgacaugcugagacucuucgauuuuaacaaacaggccauuagccggcugaagucuccugcgcagauguccauccagcuuauuaauaaagccguuaacgcucugaucaaugaccaacucauuaugaagaaccaucugcgcgacaucauguguauccccuauugcaauuacagcaaguauugguaccugaaccacacgauuaccggcaaaacaucucucccuaaguguuggcuggugagcaauggguccuaccuuaacgagacccacuucucugaugacaucgaacagcaggccgauaauaugauuacagagaugcugcaaaaagaauauauggagagacagggaaagaccccgcucggccuggucgaccuguucguguuuagcacguccuucuaccuuaucagcauuuuucuccggcuggugaaaauccccacacaccgccauauugucgggaagccuugccccaaaccucacagacugaaccauaugggaaucuguucuugcggccucuauaagcagcccggcguuccggugcgguggaagcgcugaggacuaguaauaaggaaacuguaugaaugucugugggcaggaagugaagagauccuucuguaaagguuuuuggaauuaugucugcugaauaauaaacuuuuuugaaauaauaaaucugguagaaaaaugagaucuaaaaaaaaaaaaaaaaaaaaaaaaaaaaaaaaaaaaaaaaaaaaaaaaaaaaaaaaaaaaaaaaaaaaaaaaaaaaaaaaaaaaaaaaaaaaaaaaaaaa

SEQ ID NO: 29322 - RNA, 1785 nt, Artificial Sequence
  mRNA product Design b-4 (A100) comprising derived and/or modified sequence from LASV(Togo/2016/7082;Clade VI)__AMR44577__GPCmut5 (opt5)
aggagagucccgcagucggcguccagcggcucugcuuguucgugugugugucguugcaggccuuauucaagcuuaccaugggccagaucauuaccuucuuucaagaggugccccacgucaucgaagagguuaugaacauugugcugaucgcccucagccugcuugcuauucugaaggggguguacaaugucgccacaugcggaaucaucggccucgugacguuccuguuucuuugugggagauccugcucucugauuuauaaaggaagcuacgaacuccagacccuggagcugaacauggaaacacucaauaugaccaugccucuguccuguacaaagaacucuagccaucacuauauccggguuggcaaugagaccgggcuugagcugacacucaccaacacguccauuaucaaucauaaauucugcaaccugucugacgcgcacaagcgcaaucuuuacgaucaugcucugaugagcauucucuccaccuuucaccugagcaucccgaacuucaaucaguaugaagccaugucuugugacuuuaacggaggcaaaauuuccgugcaguacaaucugagccacgccuaugcugucgaugccgcugagcauugcggcacaguggccaacgggguucuccaaaccuucaugagaauggcguggggaggcucuuacaucgcccuggacuccggguguggaaauugggauugcaucaugacaagcuaccaguaucuuauuauccagaacaccacgugggaagaccacugucaguuuucucggcccuccccuauuggcuaccuggggcuccugagccaacgcacaagagauaucuauauuucccggcgccuucugggaaccuucacauggacccucucugacagcgagggcaacgagacccccggcggguacugccugacaagauggaugcugaucgaagcugagcucaaguguuuuggaaauacggccguggcuaagugcaacgaaaaacaugaugaggaguucugcgacaugcugcggcuuuuugauuucaauaagcaggccauccagcgccugaaauccccugcgcagaugagcauucaacucaucaacaaggccgucaaugcucugauuaacgaccagcuuaucaugaaaaaucaccugagagauaugauguguauucccuauugcaacuacucuaaguauugguaccucaaucacaccuccagcggccggacaucucugccuaaguguuggcuggugagcaacggguccuaccucaaugaaacccauuucucugacgacaucgagcagcaagccgauaacaugaucacagaaaugcugcagaaagaguauauugaccgccagggaaagaccccgcuuggccugguggaucucuuugucuucagcacguccuuuuaccugaucagcauuuuccugcaccuuaucaaaauucccacacauagacacaucguugggaagccuugccccaaaccucaucggcucaaucacaugggaauuuguucuugcggccuguauaagcagcccggcgugccgacccgcuggaaaagaugaggacuaguaauaaggaaacuguaugaaugucugugggcaggaagugaagagauccuucuguaaagguuuuuggaauuaugucugcugaauaauaaacuuuuuugaaauaauaaaucugguagaaaaaugagaucuaaaaaaaaaaaaaaaaaaaaaaaaaaaaaaaaaaaaaaaaaaaaaaaaaaaaaaaaaaaaaaaaaaaaaaaaaaaaaaaaaaaaaaaaaaaaaaaaaaaa

SEQ ID NO: 29323 - RNA, 1785 nt, Artificial Sequence
  mRNA product Design b-4 (A100) comprising derived and/or modified sequence from LASV(KAK-428;Clade n.d. (VII))__ANH09740__GPCmut5 (opt5)
aggagagucccgcagucggcguccagcggcucugcuuguucgugugugugucguugcaggccuuauucaagcuuaccaugggccagaucgugaccuucuuucaagaggucccccacguuauugaagaggugaugaacaucgugcugauugcccucagccugcuugcuauccugaaggggcucuacaauuucgccacaugcggagucauuggccugaucacguuucuucugcucugugggagauccugcucugcgaccuauaaaggacaguacgaacugcagacacuggagcucaacauggaaagccugaauaugaccaugccucuuuccuguacaaagaacaauucucaucacuauauccgggcuggcaacaauaccgggcuggagcucacacugaccaacacgagcauuaucucccauaaauucugcaaucuuucugacgcccacaagaaaaaccuguacgaucauacccucaugagcauuaucacaaccuuucaccuguccauuccgaauuucaaccaguaugaggccaugagcugugacuuuaauggaggcaagaucucuauucaauacaaccugucccacagcuaugcuggcgaugccgcucagcauugcgggacaguggccaauggaguucuccagaccuucaugcgcauggcguggggcgggucuuaccuggcccuugacuccggauguagaggcugggauugcaucaucagcucuuaccaguaucugauuauccaaaacacgacaugggacgaucacugucaguuuucccggcccagcccuauuggguaccucggauucgugucccagaagacccgcgacaucuauauuucuagacggcugcuuggcacauuuaccuggacccugagcgauuccgaaggccaugacaugcccgggggauacugccucacacgcuggaugcugaucgaggcugaucugaaauguuucggcaacacggccgucgcuaagugcaaugaaaaacacgacgaggaguuuugcgauauguggagacucuucgacuucaacaagcaggccauccaacggcugaaagcgccugcccagaugaauauucagcuuaucaacaaggcugugaaugcccugauuaacgaccaacucaugaugaagaaucaucugcgcgauaucauguguauucccuauugcaacuacagcaaauuuugguaucuuaauaacaccacaaccgggagaacaucucugccucgguguuggcucaucuccaauggaagcuaccugaacgaaacccacuucucugacgauaucgagcagcaggcugacaauaugauuacggaaaugcugcagaaggaguacauggaucgccaaggcaaaacaccgcucgggcugguugaccuuuuuguguucagcaccuccuuuuaucugaucaccauuuuccuccaccuggucaagauccccacacauagacacauugugggaaaaccuugccccaagccucaucggcugaaccacaugggcaucuguucuugcggccuuuacaaacagcccggggugccgguccgcuggaagagaugaggacuaguaauaaggaaacuguaugaaugucugugggcaggaagugaagagauccuucuguaaagguuuuuggaauuaugucugcugaauaauaaacuuuuuugaaauaauaaaucugguagaaaaaugagaucuaaaaaaaaaaaaaaaaaaaaaaaaaaaaaaaaaaaaaaaaaaaaaaaaaaaaaaaaaaaaaaaaaaaaaaaaaaaaaaaaaaaaaaaaaaaaaaaaaaaa

SEQ ID NO: 29324 - RNA, 1785 nt, Artificial Sequence; identical to SEQ ID NO: 29318
  mRNA product Design b-4 (A100) comprising derived and/or modified sequence from LASV(Pinneo-NIG-1969;Clade I)__AIT17836__GPCmut5 (opt5)

SEQ ID NO: 29325 - RNA, 1785 nt, Artificial Sequence
  mRNA product Design b-4 (A100) comprising derived and/or modified sequence from LASV(ISTH0009-NIG-2011;Clade II)__AIT17404__GPCmut5 (opt5)
aggagagucccgcagucggcguccagcggcucugcuuguucgugugugugucguugcaggccuuauucaagcuuaccaugggccagaucauuaccuucuuucaagaggugccccacgucaucgaagagguuaugaacauugugcugaucgcccucagccugcuugcuauucugaaggggaucuacaauguggccacaugcggacucuucggccuggucuccuuucuucugcucugugggagaucuugcagcacgaccuauaaaggaguguacgaacugcagacacuggagcucgacauggcgucccugaacaugaccaugccucuuucuuguacaaagaauaacagccaucacuauaucaugguuggcaaugaaaccgggcuggagcucacacugaccaacacguccauuaucaaucauaaauucugcaaccuuucugaugcucacaagaaaaaucuguacgaccaugcccucaugagcauuaucuccaccuuucaccugagcauuccgaacuucaaucaguaugaggccaugucuugugauuuuaacggaggcaagaucuccgugcaguacaaucugagccacgcuuaugccgucgacgcugccaaccauugcggcacaauugcgaauggggugcuccaaaccuucaugcggauggccuggggaggcucuuacaucgcucuggauuccggguguggaagcugggacugcaucaugacaucuuaccaguaucuuauuauccagaacaccacgugggaagaucacugucaguuuucccgccccagcccuauuggcuaccuggggcuccugucccaaagaacacgggacaucuauauuucucgcagacuucugggaaccuucacauggacccucagcgauuccgagggcaacgaaacccccggcggguacugccugacacgguggaugcugaucgaggccgagcucaaguguuuuggaaauacggcuguugccaaaugcaacgaaaagcaugacgaggaguucugcgauaugcugcgccuuuuugacuucaauaaacaggcgaucagacggcugaagaccccugcccagaugagcauucagcucaucaacaaagcugugaaugcccugauuaacgaucaacuuaucaugaagaaucaucugcgcgacauuauguguauccccuauugcaacuacucuaaguauugguaccucaaucacacagucaccggcaaaacaucccugccuagauguuggcuggugagcaacgggucuuaccucaaugaaacccacuucagcgacgauaucgaacagcaggcugacaacaugauuacggagcugcuucaaaaggaguauauggaucggcagggaaaaacaccgcugggccucguggaccuguuugucuucuccaccucuuuuuaccugaucagcauuuuccuucaccucaucaagauucccacccaucgccacaucacagggaaaccuugccccaagccucauagacugaaucacaugggaauuuguuccugcggccuguauaaacaccccggcguuccggugaaguggaagcggugaggacuaguaauaaggaaacuguaugaaugucugugggcaggaagugaagagauccuucuguaaagguuuuuggaauuaugucugcugaauaauaaacuuuuuugaaauaauaaaucugguagaaaaaugagaucuaaaaaaaaaaaaaaaaaaaaaaaaaaaaaaaaaaaaaaaaaaaaaaaaaaaaaaaaaaaaaaaaaaaaaaaaaaaaaaaaaaaaaaaaaaaaaaaaaaaa

SEQ ID NO: 29326 - RNA, 1785 nt, Artificial Sequence
  mRNA product Design b-4 (A100) comprising derived and/or modified sequence from LASV(ISTH2010-NIG-2012;Clade II)__AIT17482__GPCmut5 (opt5)
aggagagucccgcagucggcguccagcggcucugcuuguucgugugugugucguugcaggccuuauucaagcuuaccaugggccagaucauuaccuucuuucaagaggugccccacgucaucgaagagguuaugaacauugugcugaucgcccucagccugcuugcuauucugaaggggaucuacaauguggccacaugcggacucuucggccuggucuccuuucuucugcucugugggagaucuugcagcacgaccuauaaaggaguguacgaacugcagacacuggagcucgacauggcgucccugaacaugaccaugccucuuucuuguacaaagaauaacagccaucacuauaucaugguuggcaaugaaaccgggcuggagcucacacugaccaacacguccauuaucaaucauaaauucugcaaccuuucugaugcucacaagaaaaaucuguacgaccaugcccucaugagcauuaucuccaccuuucaccugagcauuccgaacuucaaucaguaugaggccaugucuugugauuuuaacggaggcaagaucuccgugcaguacaaucugagccacgcuuaugccgucgacgcugccaaccauugcggcacaauugcgaauggggugcuccaaaccuucaugcggauggccuggggaggcucuuacaucgcucuggauuccggguguggaagcugggacugcaucaugacaucuuaccaguaucuuauuauccagaacauuaccugggaagaucacugucaguuuucccgccccagcccuaucggcuaccuggggcuccugucccaaagaacgcgggacauuuauaucucucgcagacuucugggaacauucaccuggacacucagcgauuccgagggcaacgaaacccccggcggguacugccugacccgguggaugcugaucgaggccgagcucaaguguuuuggaaauacagcuguugccaaaugcaacgaaaagcaugacgaggaguucugcgauaugcugcgccuuuuugacuucaauaaacaggcgauuagacggcugaagacgccugcccagaugagcauccagcucauuaacaaagcugugaaugcccugaucaacgaucaacuuauuaugaagaaucaucugcgcgacaucauguguauccccuauugcaacuacucuaaguauugguaccucaaucacaccgucacaggcaaaaccucccugccuagauguuggcuggugagcaacgggucuuaccucaaugaaacacacuucagcgacgauauugaacagcaggcugacaacaugaucaccgagcugcuucaaaaggaguauauugaucggcagggaaaaacgccgcugggccucguggaccuguuugucuucuccacaucuuuuuaccugaucagcauuuuccuucaccucguuaagauccccacccaucgccacgugguggggaaaccuugccccaagccucauagacugaaucacaugggaauuuguuccugcggccuguauaaacaccccggcgucccggugaaguggaagcggugaggacuaguaauaaggaaacuguaugaaugucugugggcaggaagugaagagauccuucuguaaagguuuuuggaauuaugucugcugaauaauaaacuuuuuugaaauaauaaaucugguagaaaaaugagaucuaaaaaaaaaaaaaaaaaaaaaaaaaaaaaaaaaaaaaaaaaaaaaaaaaaaaaaaaaaaaaaaaaaaaaaaaaaaaaaaaaaaaaaaaaaaaaaaaaaaa

SEQ ID NO: 29327 - RNA, 1785 nt, Artificial Sequence
  mRNA product Design b-4 (A100) comprising derived and/or modified sequence from LASV(Lassa virus/H.sapiens-wt/NGA/2015/ISTH_0543;Clade II)__AVO03639__GPCmut5 (opt5)
aggagagucccgcagucggcguccagcggcucugcuuguucgugugugugucguugcaggccuuauucaagcuuaccaugggccagaucauuaccuucuuucaagaggugccccacgucaucgaagagguuaugaacauugugcugaucgcccucagccugcuugcuauucugaaggggaucuacaauguggccacaugcggacucuucggccuggucuccuuucuucugcucugugggagaucuugcagcacgaccuauaaaggaguguacgaacugcagacacuggagcucgacauggcgaaccugaauaugaccaugccucuuuccuguacaaagaacaauucucaucacuauaucaugguuggcaacgaaaccgggcuggagcucacacugaccaauacgagcauuaucaaccauaaauucugcaaucuuuccgaugcucacaagaaaaaccuguacgaccaugcccucaugucuauuaucagcaccuuucaccuguccauuccgaauuucaaccaguaugaggccaugagcugugauuuuaauggaggcaagaucucugugcaguacaaccugucccacacauaugcugucgacgccgcuaaucauugcggcaccauugccaacggggugcuccaaacauucaugcggauggcguggggaggcagcuacaucgcccuggauucuggguguggauccugggacugcaucaugaccagcuaccaguaucuuguuauucagaacacgacaugggaagaucacugucaguuuucucgccccuccccuaucggcuaccuggggcuccugagccaaagaacccgggacauuuauaucucccgcagacuucugggaacauucaccuggacccucucugauagcgagggcaaugaaacacccggcggguacugccugacgcgguggaugcugauugaggcugagcucaaguguuuuggaaacaccgccguggcuaaaugcaaugaaaagcaugacgaggaguucugcgauaugcugcgccuuuuugacuucaacaaacaggccaucagacggcugaagaccccugcgcagauguccauccagcucauuaauaaagccgucaacgcucugaucaaugaucaacuuauuaugaagaaccaucugcgcgacaucauguguauucccuauugcaauuacagcaaguauugguaccucaaccacacagugacaggcaaaaccucucugccuagauguuggcugguguccaaugggagcuaccucaacgaaacgcacuucucugacgauaucgaacagcaggccgacaauaugaucacagagcugcuucaaaaggaguauauugaucggcagggaaaaaccccgcugggccucgucgaccuguuuguuuucagcaccuccuuuuaccugaucucuauuuuccuucaccucgugaagauccccacacaucgccacauuaccgggaaaccuugccccaagccucauagacugaaccacaugggaaucuguagcugcggccuguauaaacaccccggcgugccggucaaguggaagcggugaggacuaguaauaaggaaacuguaugaaugucugugggcaggaagugaagagauccuucuguaaagguuuuuggaauuaugucugcugaauaauaaacuuuuuugaaauaauaaaucugguagaaaaaugagaucuaaaaaaaaaaaaaaaaaaaaaaaaaaaaaaaaaaaaaaaaaaaaaaaaaaaaaaaaaaaaaaaaaaaaaaaaaaaaaaaaaaaaaaaaaaaaaaaaaaaa

SEQ ID NO: 29328 - RNA, 1785 nt, Artificial Sequence
  mRNA product Design b-4 (A100) comprising derived and/or modified sequence from LASV(Lassa virus/H.sapiens-wt/NGA/2016/ISTH_0009;Clade II)__AVO03571__GPCmut5 (opt5)
aggagagucccgcagucggcguccagcggcucugcuuguucgugugugugucguugcaggccuuauucaagcuuaccaugggccagaucauuaccuucuuucaagaggugccccacgucaucgaagagguuaugaacauugugcugaucgcccucagccugcuugcuauucugaaggggaucuacaauguggccacaugcggacuccugggccuugucuccuuccugcuccugugugggagaucuugcagcacgaccuauaaaggaguguacgaacugcagacacucgagcuggacauggcgucccuuaacaugaccaugccucugucuuguacaaagaauaacagccaucacuauaucaugguuggcaaugaaaccgggcucgagcugacacuuaccaacacguccauuaucaaucauaaauuuugcaaccugucugaugcucacaagaaaaaucucuacgaccaugcccugaugagcauuaucuccaccuuccaccugagcauuccgaacuuuaaucaguaugaggccaugucuugugauuucaacggaggccggaucuccgugcaguacaaucucagccacucuuaugcugucgacgccgcuaaccauugcggcacaauugccaauggggugcugcaaaccuuuaugcgcauggcguggggaggcuccuacaucgcccuugauagcggguguggaucuugggacugcaucaugacauccuaccaguaucugauuauccagaacaccacgugggaagaucacugucaguucagcagacccuccccuauuggcuaccucgggcugcuuucucaacggacacgcgacaucuauauuagcagacggcugcucggaaccuuuacauggacccuguccgauagcgagggcaacgaaacccccggcggguacugccugacacgcuggaugcucaucgaggcugagcugaaguguuucggaaauacggccguugcuaagugcaacgaaaaacaugacgaggaauuuugcgauaugcuuagacuguucgacuuuaauaagcaggccauccggcgccucaaaaccccugcgcagaugucuauucagcugaucaacaaggccgugaaugcucuuauuaacgaucaacugaucaugaaaaaucaccucagagacauuauguguauccccuauugcaacuacuccaaguauugguaccugaaucacacagucaccggcaagacaagccugccucgguguuggcucgugucuaacgggagcuaccugaaugagacccauuucuccgacgauaucgaacagcaggccgacaacaugauuacggagcuucugcaaaaagaguauaucgaucgccagggaaagacaccgcucggccugguggaccuguucgucuuuucuaccagcuucuaccuuauuuccaucuuucuccaccugguuaaaauucccacccauagacacaucacagggaagccuugccccaaaccucaucggcugaaucacaugggaauuuguagcugcggccucuauaaccaccccggcgugccggugaaguggaaacgcugaggacuaguaauaaggaaacuguaugaaugucugugggcaggaagugaagagauccuucuguaaagguuuuuggaauuaugucugcugaauaauaaacuuuuuugaaauaauaaaucugguagaaaaaugagaucuaaaaaaaaaaaaaaaaaaaaaaaaaaaaaaaaaaaaaaaaaaaaaaaaaaaaaaaaaaaaaaaaaaaaaaaaaaaaaaaaaaaaaaaaaaaaaaaaaaaa

SEQ ID NO: 29329 - RNA, 1785 nt, Artificial Sequence
  mRNA product Design b-4 (A100) comprising derived and/or modified sequence from LASV(Lassa virus/H.sapiens-wt/NGA/2016/ISTH_0017;Clade II)__AVO03567__GPCmut5 (opt5)
aggagagucccgcagucggcguccagcggcucugcuuguucgugugugugucguugcaggccuuauucaagcuuaccaugggccagaucauuaccuucuuucaagaggugccccacgucaucgaagagguuaugaacauugugcugaucgcccucagccugcuugcuauucugaaggggaucuacaauguggccacaugcggacucuucggccuggucuccuuucuucugcucugugggagaucuugcagcacgaccuauaaaggaguguacgaacugcagacacuggagcucgacauggcgucccugaacaugaccaugccucuuucuuguacaaagaauaacagccaucacuauaucaugguuggcaaugaaaccgggcuggagcucacacugaccaacacguccauuaucaaucauaaauucugcaaccuuucugaugcucacaagaaaaaucuguacgaccaugcccucaugagcauuaucuccaccuuucaccugagcauuccgaacuucaaucaguaugaggccaugucuugugauuuuaacggaggcaagaucuccgugcaguacaaucugagccacacauaugcuauugacgccgcuaaccauugcggcaccaucgccaaugggguccuccaaacauucaugcggauggcguggggaggcucuuacaucgcccuggauuccggguguggaagcugggacugcauuaugaccucuuaccaguaucuuaucauucagaacacgacaugggaagaucacugucaguuuucccgccccagcccuaucggcuaccuggggcuccugucccaaagaacccgggacauuuauaucucucgcagacuucugggaacauucaccuggacccucagcgauuccgagggcaacgaaacacccggcggguacugccugacgcgguggaugcugaucgaggcugagcucaaguguuuuggaaauaccgccguggcuaaaugcaacgaaaagcaugacgaggaguucugcgauaugcugcgccuuuuugacuucaauaaacaggccauuagacggcugaagaccccugcgcagaugagcauccagcucauuaacaaagccguuaaugcucugaucaacgaucaacuuauuaugaagaaucaucugcgcgacaucauguguauccccuauugcaacuacucuaaguauugguaccucaaucacacagugacaggcaaaaccucccugccuagauguuggcuggucagcaacgggucuuaccucaaugaaacgcacuucagcgacgauauugaacagcaggccgacaacaugaucacagagcugcuucaaaaggaguauauggaucggcagggaaaaaccccgcugggccucguggaccuguuuguguucuccaccucuuuuuaccugauuagcaucuuccuucaccucguccgcauucccacacauagacacguuaucgggaagccuugccccaaaccucaucggcugaaucacaugggaauuuguuccugcggccuguauaagcaccccggcgugccggugaaauggaagcgcugaggacuaguaauaaggaaacuguaugaaugucugugggcaggaagugaagagauccuucuguaaagguuuuuggaauuaugucugcugaauaauaaacuuuuuugaaauaauaaaucugguagaaaaaugagaucuaaaaaaaaaaaaaaaaaaaaaaaaaaaaaaaaaaaaaaaaaaaaaaaaaaaaaaaaaaaaaaaaaaaaaaaaaaaaaaaaaaaaaaaaaaaaaaaaaaaa

SEQ ID NO: 29330 - RNA, 1785 nt, Artificial Sequence
  mRNA product Design b-4 (A100) comprising derived and/or modified sequence from LASV(Lassa virus/H.sapiens-wt/NGA/2018/ISTH_0959;Clade II)__AVV65099__GPCmut5 (opt5)
aggagagucccgcagucggcguccagcggcucugcuuguucgugugugugucguugcaggccuuauucaagcuuaccaugggccagaucauuaccuucuuucaagaggugccccacgucaucgaagagguuaugaacauugugcugaucgcccucagccugcuugcuauucugaaggggaucuacaauguggucacaugcggacucuucggccugguguccuuucuucugcucugugggagaucuugcagcacgaccuauaaaggaguuuacgaacugcagacacuggagcucgacauggccucccugaacaugaccaugccucuuucuuguacaaagaauaacagccaucacuauaucauggugggcaaugaaaccgggcuggagcucacacugaccaacacguccauuaucaaucauaaauucugcaaccuuucugaugcgcacaagaaaaaucuguacgaccaugcucucaugagcauuaucuccaccuuucaccugagcauuccgaacuucaaucaguaugaggccaugucuugugauuuuaacggaggcaagaucuccguccaguacaaucugagccacgccuaugcuauugacgccgcuaaccauugcggcacaaucgccaauggggugcuccaaaccuucaugcggauggcguggggaggcucuuacaucgcccuggauuccggguguggaagcugggacugcauuaugacaucuuaccaguaucuuaucauucagaacaccacgugggaagaucacugucaguuuucccgccccagcccuaucggcuaccuggggcuccugucccaaagaacacgggacauuuauaucucucgcagacuucugggaaccuucacauggacccucagcgauuccgagggcaacgaaacccccggcggguacugccugacacgguggaugcugaucgaggcugagcucaaguguuuuggaaauacggccguugcuaaaugcaacgaaaagcaugacgaggaguucugcgauaugcugcgccuuuuugacuucaauaaacaggccauuagacggcugaagaccccugcgcagaugagcauccagcucauuaacaaagccgugaaugcucugaucaacgaucaacuuauuaugaagaaucaucugcgcgacaucauguguauccccuauugcaacuacucuaaguauugguaccucaaucacacagucaccggcaaaacaucccugccuagauguuggcuggugagcaacgggucuuaccucaaugaaacccacuucagcgacgauauugaacagcaggccgacaacaugaucacggagcugcuucaaaaggaguauauugaucggcagggaaaaacaccgcugggccucguggaccuguuugucuucuccaccucuuuuuaccugaucagcauuuuccuucaccucguuaagauccccacccaucgccacgugauugggaaaccuugccccaagccucauagacugaaucacaugggaaucuguuccugcggccuguauaaacaccccggcgugccggucaaguggaagcggugaggacuaguaauaaggaaacuguaugaaugucugugggcaggaagugaagagauccuucuguaaagguuuuuggaauuaugucugcugaauaauaaacuuuuuugaaauaauaaaucugguagaaaaaugagaucuaaaaaaaaaaaaaaaaaaaaaaaaaaaaaaaaaaaaaaaaaaaaaaaaaaaaaaaaaaaaaaaaaaaaaaaaaaaaaaaaaaaaaaaaaaaaaaaaaaaa

SEQ ID NO: 29331 - RNA, 1785 nt, Artificial Sequence
  mRNA product Design b-4 (A100) comprising derived and/or modified sequence from LASV(LASV003-NIG-2008;Clade II)__AIT17580__GPCmut5 (opt5)
aggagagucccgcagucggcguccagcggcucugcuuguucgugugugugucguugcaggccuuauucaagcuuaccaugggccagaucauuaccuucuuucaagaggugccccacgucaucgaagagguuaugaacauugugcugaucgcccucagccugcuugcuauucugaaggggaucuacaauguggccacaugcggacucuucggccuggucuccuuucuucugcucugugggagaucuugcagcacgaccuauaaaggaguguacgaacugcagacacuggagcucgacauggcgucccugaacaugaccaugccucuuucuuguacaaagaauaacagccaucacuauaucaugguuggcaaugaaaccgggcuggagcucacacugaccaacacguccauuaucaaucauaaauucugcaaccuuucugaugcucacaagaaaaaucuguacgaccaugcccucaugagcauuaucuccaccuuucaccugagcauuccgaacuucaaucaguaugaggccaugucuugugauuuuaacggaggcaagaucuccgugcaguacaaucugagccacacauaugcugucgacgccgcuaaccauugcggcaccauugccaauggggugcuccaaacauucaugcggauggcguggggaggcucuuacaucgcccuggauuccggguguggaagcugggacugcaucaugaccucuuaccaguaucuuauuauccagaacacgacaugggaagaucacugucaguuuucccgccccagcccuauuggcuaccuggggcuccugucccaaagaacccgggacaucuauauuucucgcagacuucugggaacauucaccuggacccucagcgauuccgagagcaacgaaacacccggcggcuacugccugacgcgguggaugcugaucgaggcugagcucaaguguuuugggaauaccgccguugcuaaaugcaacgaaaagcaugacgaggaguucugcgauaugcugcgccuuuuugacuucaauaaacaggccaucagacggcugaaggcgccugcccagaugucuauucagcucaucaacaaagcugugaaugcccugauuaacgaucaacuuaucaugaagaaucaucugcgcgacauuauguguauccccuauugcaacuacuccaaguauugguaccucaaucacacagucaccggaagaacaagccugccucgguguuggcuggugucuaacggcagcuaccucaaugaaacccacuucuccgacgauaucgaacagcaggcugacaacaugauuacggagcugcuucaaaaagaguauauggaucgccaggggaagacaccgcugggacucguggaccuguuugucuucucuaccagcuuuuaccugaucuccauuuuccuucaccucguuaaaauccccacccauagacacgugauuggcaagccuugccccaaaccucaucggcugaaucacauggggaucuguagcugcggacuguauaagcaccccggcgugccggucaaauggaagcgcugaggacuaguaauaaggaaacuguaugaaugucugugggcaggaagugaagagauccuucuguaaagguuuuuggaauuaugucugcugaauaauaaacuuuuuugaaauaauaaaucugguagaaaaaugagaucuaaaaaaaaaaaaaaaaaaaaaaaaaaaaaaaaaaaaaaaaaaaaaaaaaaaaaaaaaaaaaaaaaaaaaaaaaaaaaaaaaaaaaaaaaaaaaaaaaaaa

SEQ ID NO: 29332 - RNA, 1785 nt, Artificial Sequence
  mRNA product Design b-4 (A100) comprising derived and/or modified sequence from LASV(LASV035-NIG-2009;Clade II)__AIT17588__GPCmut5 (opt5)
aggagagucccgcagucggcguccagcggcucugcuuguucgugugugugucguugcaggccuuauucaagcuuaccaugggccagaucauuaccuucuuucaagaggugccccacgucaucgaagagguuaugaacauugugcugaucgcccucagccugcuugcuauucugaaggggaucuacaauguggccacaugcggacucuucggccuggucuccuuucuucugcucugugggagaucuugcagcacgaccuauaaaggaguguacgaacugcagacacuggagcucgacauggcgucccugaacaugaccaugccucuuucuuguacaaagaauaacagccaucacuauaucaugguuggcaaugaaaccgggcuggagcucacacugaccaacacguccauuaucaaucauaaauucugcaaccuuucugaugcucacaagaaaaaucuguacgaccaugcccucaugagcauuaucuccaccuuucaccugagcauuccgaacuucaaucaguaugaggccaugucuugugauuuuaacggaggcaagaucuccgugcaguacaaucugagccacgcuuaugccgucgacgcugccaaccauugcggcacaauugcgaauggggugcuccaaaccuucaugcggauggccuggggaggcucuuacaucgcucuggauuccggguguggaagcugggacugcaucaugacaucuuaccaguaucuuauuauccagaacaccacgugggaagaucacugucaguuuucccgccccagcccuauuggcuaccuggggcuccugucccaaagaacacgggacaucuauauuucucgcagacuucugggaaccuucacauggacccucagcgauuccgagggcaacgaaacccccggcggguacugccugacacgguggaugcugaucgaggccgagcucaaguguuuuggaaauacggcuguugccaaaugcaacgaaaagcaugacgaggaguucugcgauaugcugcgccuuuuugacuucaauaaacaggcgaucagacggcugaaggccccugcucagaugagcauucagcucaucaacaaagccgugaaugcucugauuaacgaucaacuuaucaugaagaaucaucugcgcgacauuauguguauccccuauugcaacuacucuaaguauugguaccucaaucacaccgucacaggcaaaaccucccugccuagauguuggcuggugagcaacgggucuuaccucaaugaaacacacuucagcgacgauaucgaacagcaggccgacaacaugauuaccgagcugcuucaaaaggaguauaucgaucggcagggaaaaacgccgcugggccucguggaccuguuugucuucuccacaucuuuuuaccugauuagcaucuuccuucaccucguuaagauucccacccaucgccacgugaucgggaaaccuugccccaagccucauagacugaaucacaugggaauuuguuccugcggccuguauaaacaccccggcgugccggucaaguggaagcggugaggacuaguaauaaggaaacuguaugaaugucugugggcaggaagugaagagauccuucuguaaagguuuuuggaauuaugucugcugaauaauaaacuuuuuugaaauaauaaaucugguagaaaaaugagaucuaaaaaaaaaaaaaaaaaaaaaaaaaaaaaaaaaaaaaaaaaaaaaaaaaaaaaaaaaaaaaaaaaaaaaaaaaaaaaaaaaaaaaaaaaaaaaaaaaaaa

SEQ ID NO: 29333 - RNA, 1785 nt, Artificial Sequence
  mRNA product Design b-4 (A100) comprising derived and/or modified sequence from LASV(LASV1000-NIG-2009;Clade II)__AIT17782__GPCmut5 (opt5)
aggagagucccgcagucggcguccagcggcucugcuuguucgugugugugucguugcaggccuuauucaagcuuaccaugggccagaucauuaccuucuuucaagaggugccccacgucaucgaagagguuaugaacauugugcugaucgcccucagccugcuugcuauucugaaggggaucuacaauguggccacaugcggacucuucggccuggucuccuuucuucugcucugugggagaucuugcagcacgaccuauaaaggaguguacgaacugcagacacuggagcucgacauggcgucccugaacaugaccaugccucuuucuuguacaaagaauaacagccaucacuauaucaugguuggcaaugaaaccgggcuggagcucacacugaccaacacguccauuaucaaucauaaauucugcaaccuuucugaugcucacaagaaaaaucuguacgaccaugcccucaugagcauuaucuccaccuuucaccugagcauuccgaacuucaaucaguaugaggccaugucuugugauuuuaacggaggcaagaucuccgugcaguacaaucugagccacacauaugcugucgacgccgcuaaccauugcggcaccauugccaauggggugcuccaaacauucaugcggauggcguggggaggcucuuacaucgcccuggauuccggguguggaagcugggacugcaucaugaccucuuaccaguaucuuauuauccagaacacgacaugggaagaucacugucaguuuucccgccccagcccuauuggcuaccuggggcuccugucccaaagaacccgggacaucuauauuucucgcagacuucugggaacauucaccuggacccucagcgauuccgagggcaacgaaacacccggcggguacugccugacgcgguggaugcugaucgaggcugagcucaaguguuuuggaaauaccgccguugcuaaaugcaacgaaaagcaugacgaggaguucugcgauaugcugcgccuuuuugacuucaauaaacaggccaucaagagacugaaaaccccugcgcagaugagcauucagcucaucaacaaggccgugaaugcucugauuaacgaucaacuuaucaugaagaaucaucugcgggacauuauguguauccccuauugcaacuacucuaaauauugguaccucaaucacacagucacaggcaagaccucccugccucgcuguuggcuggugagcaacgggucuuaccucaaugaaacgcacuucagcgacgauaucgaacagcaggccgacaacaugauuacagagcugcuucaaaaagaguauaucgauagacagggaaagaccccgcugggccucguggaccuguuugucuucuccaccucuuuuuaccugauuagcaucuuccuucaccucguuaaaauucccacacaucggcacgugguggggaagccuugccccaaaccucaucgccugaaucacaugggaaucuguuccugcggccuguauaagcaccccggcgucccggugaaguggaaaagaugaggacuaguaauaaggaaacuguaugaaugucugugggcaggaagugaagagauccuucuguaaagguuuuuggaauuaugucugcugaauaauaaacuuuuuugaaauaauaaaucugguagaaaaaugagaucuaaaaaaaaaaaaaaaaaaaaaaaaaaaaaaaaaaaaaaaaaaaaaaaaaaaaaaaaaaaaaaaaaaaaaaaaaaaaaaaaaaaaaaaaaaaaaaaaaaaa

SEQ ID NO: 29334 - RNA, 1785 nt, Artificial Sequence
  mRNA product Design b-4 (A100) comprising derived and/or modified sequence from LASV(LASV221-NIG-2010;Clade II)__AIT17624__GPCmut5 (opt5)
aggagagucccgcagucggcguccagcggcucugcuuguucgugugugugucguugcaggccuuauucaagcuuaccaugggccagaucauuaccuucuuucaagaggugccccacgucaucgaagagguuaugaacauugugcugaucgcccucagccugcuugcuauucugaaggggaucuacaauguggccacaugcggacucuucggccuggucuccuuucuucugcucugugggagaucuugcagcacgaccuauaaaggaguguacgaacugcagacacuggagcucgacauggcgucccugaacaugaccaugccucuuucuuguacaaagaauaacagccaucacuauaucaugguuggcaaugaaaccgggcuggagcucacacugaccaacacguccauuaucaaucauaaauucugcaaccuuucugaugcucacaagaaaaaucuguacgaccaugcccucaugagcauuaucuccaccuuucaccugagcauuccgaacuucaaucaguaugaggccaugucuugugauuuuaacggaggcaagaucuccgugcaguacaaucugagccacacauaugcuauugacgccgcuaaccauugcggcaccaucgccaaugggguccuccaaacauucaugcggauggcguggggaggcucuuacaucgcccuggauuccggguguggaagcugggacugcauuaugaccucuuaccaguaucuuaucauucagaacacgacaugggaagaucacugucaguuuucccgccccagcccuaucggcuaccuggggcuccugucccaaagaacccgggacauuuauaucucucgcagacuucugggaacauucaccuggacccucagcgauuccgagggcaacgaaacacccggcggguacugccugacgcgguggaugcugaucgaggcugagcucaaguguuuuggaaauaccgccguggcuaaaugcaacgaaaagcaugacgaggaguucugcgauaugcugcgccuuuuugacuucaauaaacaggccauuagacggcugaagaccccugcgcagaugagcauccagcucauuaacaaagccguuaaugcucugaucaacgaucaacuuauuaugaagaaucaucugcgcgacaucauguguauccccuauugcaacuacucuaaguauugguaccucaaucacacagugacaggcaaaaccucccugccuagauguuggcuggucagcaacgggucuuaccucaaugaaacgcacuucagcgacgauauugaacagcaggccgacaacaugaucacagagaugcugcaaaaggaguauauggaucggcagggaaaaaccccgcuuggccugguggaccucuuuguguucuccaccucuuuuuaccugauuagcaucuuccugcaccuugucaagauucccacacaucgccacguuaucgggaaaccuugccccaagccucauagacucaaucacaugggaauuuguuccugcggccuguauaaacaccccggcgugccggugaaguggaagcggugaggacuaguaauaaggaaacuguaugaaugucugugggcaggaagugaagagauccuucuguaaagguuuuuggaauuaugucugcugaauaauaaacuuuuuugaaauaauaaaucugguagaaaaaugagaucuaaaaaaaaaaaaaaaaaaaaaaaaaaaaaaaaaaaaaaaaaaaaaaaaaaaaaaaaaaaaaaaaaaaaaaaaaaaaaaaaaaaaaaaaaaaaaaaaaaaa

SEQ ID NO: 29335 - RNA, 1785 nt, Artificial Sequence
  mRNA product Design b-4 (A100) comprising derived and/or modified sequence from LASV(LASV237-NIG-2010;Clade II)__AIT17638__GPCmut5 (opt5)
aggagagucccgcagucggcguccagcggcucugcuuguucgugugugugucguugcaggccuuauucaagcuuaccaugggccagaucauuaccuucuuucaagaggugccccacgucaucgaagagguuaugaacauugugcugaucgcccucagccugcuugcuauucugaaggggaucuacaauguggccacaugcggacucuucggccuggucuccuuucuucugcucugugggagaucuugcagcacgaccuauaaaggaguguacgaacugcagacacuggagcucgacauggcgucccugaacaugaccaugccucuuucuuguacaaagaauaacagccaucacuauaucaugguuggcaaugaaaccgggcuggagcucacacugaccaacacguccauuaucaaucauaaauucugcaaccuuucugaugcucacaagaaagaccuguacgaucaugcccucaugagcauuaucuccaccuuucaccugagcauuccgaauuucaaccaguaugaggccaugucuugugacuuuaauggaggcaagaucuccgugcaguacaaccugagccacacauaugcugucgaugccgcuaaucauugcggcaccauugccaacggggugcuccaaacauucaugcggauggcguggggaggcucuuacaucgcccuggacuccggguguggaagcugggauugcaucaugaccucuuaccaguaucuuauuauccagaauacgacaugggaagaccacugucaguuuucccgccccagcccuauuggcuaccuggggcuccugucccaaagaacccgggauaucuauauuucucgcagacuucugggaacauucaccuggacccucagcgacuccgagggcaacgaaacacccggcggguacugccugacgcgguggaugcugaucgaggcugagcucaaguguuuuggaaacaccgccguugcuaaaugcaaugaaaagcaugaugaggaguucugcgacaugcugcgccuuuuugauuucaacaaacaggccaucagacggcugaagaccccugcgcagaugagcauucagcucaucaauaaagccgugaacgcucugauuaaugaccaacuuaucaugaagaaccaucugcgcgacauuauguguauccccuauugcaauuacucuaaguauugguaccucaaccacacagucacaggcaaaaccucccugccuagauguuggcuggugagcaaugggucuuaccucaacgaaacgcacuucagcgaugacaucgaacagcaggccgauaauaugauuacagagcugcuucaaaaggaguauauggaccggcagggaaaaaccccgcugggccucguggaucuguuugucuucuccaccucuuuuuaccugaucagcauuuuccuucaccucaucaagauucccacacaucgccacaucaccgggaaaccuugccccaagccucauagacugaaccacaugggaauuuguuccugcggccuguauaaacaccccggcguuccggugaaguggaagcggugaggacuaguaauaaggaaacuguaugaaugucugugggcaggaagugaagagauccuucuguaaagguuuuuggaauuaugucugcugaauaauaaacuuuuuugaaauaauaaaucugguagaaaaaugagaucuaaaaaaaaaaaaaaaaaaaaaaaaaaaaaaaaaaaaaaaaaaaaaaaaaaaaaaaaaaaaaaaaaaaaaaaaaaaaaaaaaaaaaaaaaaaaaaaaaaaa

SEQ ID NO: 29336 - RNA, 1785 nt, Artificial Sequence
  mRNA product Design b-4 (A100) comprising derived and/or modified sequence from LASV(LASV253-NIG-2011;Clade II)__AIT17670__GPCmut5 (opt5)
aggagagucccgcagucggcguccagcggcucugcuuguucgugugugugucguugcaggccuuauucaagcuuaccaugggccagaucauuaccuucuuucaagaggugccccacgucaucgaagagguuaugaacauugugcugaucgcccucagccugcuugcuauucugaaggggaucuacaauguggccacaugcggacucuucggccuggucuccuuucuucugcucugugggagaucuugcagcacgaccuauaaaggaguguacgaacugcagacacuggagcucgacauggcgucccugaacaugaccaugccucuuucuuguacaaagaauaacagccaucacuauaucaugguuggcaaugaaaccgggcuggagcucacacugaccaacacguccauuaucaaucauaaauucugcaaccuuucugaugcucacaagaaaaaucuguacgaccaugcccucaugagcauuaucuccaccuuucaccugagcauuccgaacuucaaucaguaugaggccaugucuugugauuuuaacggaggcaagaucuccgugcaguacaaucugagccacacauaugcugucgacgccgcuaaccauugcggcaccauugccaauggggugcuccaaacauucaugcggauggcguggggaggcucuuacaucgcccuggauuccggguguggaagcugggacugcaucaugaccucuuaccaguaucuuauuauccagaacacgacaugggaagaucacugucaguuuucccgccccagcccuauuggcuaccuggggcuccugucccaaagaacccgggacaucuauauuucucgcagacuucugggaacauucaccuggacccucagcgauuccgagggcaacgaaacacccggcggguacugccugacgcgguggaugcugaucgaggcugagcucaaguguuuuggaaauaccgccguugcuaaaugcaacgaaaagcaugacgaggaguucugcgauaugcugcgccuuuuugacuucaauaaacaggccaucagacggcugaaggcgccugcccagaugagcauucagcucaucaacaaagcugugaaugcccugauuaacgaucaacuuaucaugaagaaucaucugcgcgacauuauguguauccccuauugcaacuacucuaaguauugguaccucaaucacacagucaccggcagaacaucccugccucgguguuggcuggugagcaacgggucuuaccucaaugaaacccacuucagcgacgauaucgaacagcaggcugacaacaugauuacggagcugcuucaaaaagaguauaucgaucgccagggaaagacaccgcugggccucguggaccuguuugucuucuccaccucuuuuuaccugauuagcaucuuccuucaccucguuaaaauucccacccauagacacaucauugggaagccuugccccaaaccucaucggcugaaucacaugggaaucuguuccugcggccuguauaagcaccccggcgugccggugaaauggaagcgcugaggacuaguaauaaggaaacuguaugaaugucugugggcaggaagugaagagauccuucuguaaagguuuuuggaauuaugucugcugaauaauaaacuuuuuugaaauaauaaaucugguagaaaaaugagaucuaaaaaaaaaaaaaaaaaaaaaaaaaaaaaaaaaaaaaaaaaaaaaaaaaaaaaaaaaaaaaaaaaaaaaaaaaaaaaaaaaaaaaaaaaaaaaaaaaaaa

SEQ ID NO: 29337 - RNA, 1785 nt, Artificial Sequence
  mRNA product Design b-4 (A100) comprising derived and/or modified sequence from LASV(LASV254-NIG-2011;Clade II)__AIT17674__GPCmut5 (opt5)
aggagagucccgcagucggcguccagcggcucugcuuguucgugugugugucguugcaggccuuauucaagcuuaccaugggccagaucauuaccuucuuucaagaggugccccacgucaucgaagagguuaugaacauugugcugaucgcccucagccugcuugcuauucugaaggggaucuacaauguggccacaugcggacucuucggccuggucuccuuucuucugcucugugggagaucuugcagcacgaccuauaaaggaguguacgaacugcagacacuggagcucgacaugaccaaccugaauaugacaaugccucuuuccuguaccaagaacaauucucaucacuauaucaugguuggcaacgaaacagggcuggagcucacccugacgaauaccagcauuaucaaccauaaauucugcaaucuuuccgaugcgcacaagaaaaaccuguacaaucaugcucucaugucuauuaucagcacauuucaccuguccauuccgaacuucaaucaguaugaggccaugagcugugacuuuaacggaggcaagaucucugugcaguacaaucugucccacagcuaugccgucgaugcugccaaccauugcggcaccauugcuaacggggugcuccaaacauucaugcggauggccuggggaggcucuuacaucgcgcuggacuccggguguggaaauugggauugcaucaugaccagcuaccaguaucuuauuauccagaacacgacaugggaagaccacugucaguuuucucgccccuccccuauuggcuaccuggggcuccugagccaaagaacccgggauaucuauauuucccgcagacuucugggaacauucaccuggacccucucugacagcgagggcaaugaaacacccggcggguacugccugacgcgguggaugcugaucgaggccgagcucaaguguuuuggaaacaccgcuguugccaaaugcaaugaaaagcaugaugaggaguucugcgacaugcugcgccuuuuugauuucaacaaacaggcuaucagacggcugaagaccccugcccaggcgaauauucagcucaucaacaaagccgugaaugcucugauuaacgaccaacuuaucaugaagaaucaucugcgcgauauuauguguauccccuauugcaacuacuccaaguauugguaccucaaucacacagucacaggcaaaaccagccugccuagauguuggcuggugucuaacggguccuaccucaaugaaacgcacuucagcgacgacaucgaacagcaggccgauaacaugauuacagagcugcuucaaaaggaguauauggaccggcagggaaaaaccccgcugggccucguggaucuguuugucuucucuaccagcuuuuaccugaucuccauuuuccuucaccucguuaagauccccacacaucgccacgugauugggaaaccuugccccaagccucauagacugaaccacaugggaaucuguucuugcggccuguauaaacaccccggcgugccggucaaguggaagcggugaggacuaguaauaaggaaacuguaugaaugucugugggcaggaagugaagagauccuucuguaaagguuuuuggaauuaugucugcugaauaauaaacuuuuuugaaauaauaaaucugguagaaaaaugagaucuaaaaaaaaaaaaaaaaaaaaaaaaaaaaaaaaaaaaaaaaaaaaaaaaaaaaaaaaaaaaaaaaaaaaaaaaaaaaaaaaaaaaaaaaaaaaaaaaaaaa

SEQ ID NO: 29338 - RNA, 1785 nt, Artificial Sequence
  mRNA product Design b-4 (A100) comprising derived and/or modified sequence from LASV(Nig08-A19;Clade III)__ADU56618__GPCmut5 (opt5)
aggagagucccgcagucggcguccagcggcucugcuuguucgugugugugucguugcaggccuuauucaagcuuaccaugggccagaucgugaccuucuuucaagaggucccccacguuauugaagaggugaugaacaucgugcugauugcccucagcauccuggcuauucuuaaggggcuguacaauaucgccacaugcggacucaucggccuggucacguuccuucugcucuccgggagaucuuguagcaugaccuauaaaggaguguacgaacugcagacacuggagcucaacaugaauacccugaacaugacaaugccucuuuccugcaccaagaauaacucucaucacuauauuaugguuggcaaugaaacagggcuggagcucacccugacgaacaccagccuucugcaucacaaauuuuguaaucucuccgacgcgcauaagaaaaaccuguacgaucacacacugaugucuaucauuagcaccuuccaccucuccaucccgaauuuuaaccaguaugaggcuaugagcugcgacuucaauggaggcaagauuacagugcaguacaaccugucucauuccuaugccaucgaugccgcuaaucacuguggcaccgucgccaacggggugcuucaaacguuuaugcggauggcuuggggaggcagcuacauugcccuggacucugggugcggaaagugggauuguaucaugacauccuaccaguaucucaucauucagaacaccacaugggaagaccauugccaguucagccgccccucuccuaucggcuaccuggggcuucugucccaaagaacccgggauauuuauaucagccgcagacuccugggaaccuuuacauggacgcuguccgacucugagggcaaugaaacccccggcggguacugucucacacgguggaugcugauugaggcggagcuuaaaugcuucggaaacaccgccguugcuaaguguaaugaaaaacacgaugaggaauuuugcgacaugcugcgccucuucgauuuuaacaagcaggccaucagacggcugaaagcuccugcccagaugagcauccagcuuauuaauaaggcggugaacgcccugaucaaugaccaacucauuaugaagaaccaucugcgcgauaucaugugcauucccuauuguaauuacuccaaauauugguaccugaaccacacaagcaccggcagaacgucucucccucggugcuggcuggucuccaaugggagcuaccuuaacgagacacacuucucugacgacaucgaacagcaggcugauaauaugaucaccgagaugcugcaaaaggaguaucucgaccgccagggaaaaaccccgcugggccugguggaucuuuucguguuuagcacauccuucuaccucauuucuaucuuucugcaucuggucaagauucccacccacagacauaucguugggaaaccuugucccaagccucaccggcucaaccacaugggaauuugcagcuguggccuguauaaacagcccggcgugccggugcgcuggaagagaugaggacuaguaauaaggaaacuguaugaaugucugugggcaggaagugaagagauccuucuguaaagguuuuuggaauuaugucugcugaauaauaaacuuuuuugaaauaauaaaucugguagaaaaaugagaucuaaaaaaaaaaaaaaaaaaaaaaaaaaaaaaaaaaaaaaaaaaaaaaaaaaaaaaaaaaaaaaaaaaaaaaaaaaaaaaaaaaaaaaaaaaaaaaaaaaaa

SEQ ID NO: 29339 - RNA, 1788 nt, Artificial Sequence
  mRNA product Design b-4 (A100) comprising derived and/or modified sequence from LASV(G1180-SLE-2010;Clade IV)__AIT17168__GPCmut5 (opt5)
aggagagucccgcagucggcguccagcggcucugcuuguucgugugugugucguugcaggccuuauucaagcuuaccaugggccagaucgugaccuucuuucaagaggucccccacguuauugaagaggugaugaacaucgugcugauugcccucagcauccuggcuguccuuaaggggcuguacaauuucgccacaugcggacucgugggccugcuuacguuucugcuccugugugggagauccugcaccgcgucucgguauaaaggaguuuacgaacugcagacacucgagcugaacauggaaacccuuaauaugacaaugccucugagcuguaccaagaacaauucccaucacuauauuauggugggcaacgagacagggcucgagcugacccuuacgaauaccucuaucaucaaccauaaauucugcaaucugagcgacgcucacaagaaaaaccucuacgaucaugcccugauguccauuaucucuacauuucaccugagcauuccgaauuucaaccaguaugaagccauguccugugacuuuaauggaggcaagaucagcguccaguacaaccucucucacuccuaugcuggcgaugccgcuaaucauugcgggaccguggccaacggaguucugcaaacauucaugcgcauggcguggggcgggagcuacauugcccuugacucuggauguggcuccugggauugcaucaugaccagcuaccaguaucugauuauccagaacacgacaugggaggaccacugucaguuuucuagacccuccccuaucggguaccucggacugcuuagccaacggacccgcgauauuuauaucuccagacggcugcucggcacauucaccuggacccugucugacagcgaaggcaaggauacacccgggggauacugccugacgcgcuggaugcucauugaggcugagcugaaauguuuuggcaauaccgccguggcuaagugcaacgaaaaacaugacgaggaguucugcgauaugcuuagacuguuugacuucaauaagcaggccauccagcggcucaaagcgccugcccagauguccauucaacugaucaacaaggcugucaaugcccuuaucaacgaucagcugauuaugaagaaucaccuccgcgacaucauguguauucccuauugcaacuacagcaaauauugguaccugaaucacacaaccacagggaagaccucucugccuaaauguuggcucguguccaacggaagcuaccugaaugaaacgcauuucucugacgauaucgaacagcaagcugacaacaugauuacagagaugcuucagaaggaguauauggaaagacagggcaaaaccccgcuggggcucguggaucuguuugucuucagcaccuccuuuuaccugaucucuaucuuccuucaccucguuaagauucccacacaucggcacaucgugggaaaaagcugcccuaagccccaucgccugaaucacaugggcauuuguuccugcggccuguauaagcagccuggggugcccgucaaauggaagagaugaggacuaguaauaaggaaacuguaugaaugucugugggcaggaagugaagagauccuucuguaaagguuuuuggaauuaugucugcugaauaauaaacuuuuuugaaauaauaaaucugguagaaaaaugagaucuaaaaaaaaaaaaaaaaaaaaaaaaaaaaaaaaaaaaaaaaaaaaaaaaaaaaaaaaaaaaaaaaaaaaaaaaaaaaaaaaaaaaaaaaaaaaaaaaaaaa

SEQ ID NO: 29340 - RNA, 1788 nt, Artificial Sequence
  mRNA product Design b-4 (A100) comprising derived and/or modified sequence from LASV(G1442-SLE-2011;Clade IV)__AIT17180__GPCmut5 (opt5)
aggagagucccgcagucggcguccagcggcucugcuuguucgugugugugucguugcaggccuuauucaagcuuaccaugggccagaucgugaccuucuuucaagaggucccccacguuauugaagaggugaugaacaucgugcugauugcccucagcauccuggcuguccuuaaggggcuguacaauguggccacaugcggacucauuggccugguuacguuccuucugcucugugggagauccugcaccacaacccuguauaaaggaguguacgaacugcagacacucgagcugaacauggaaacccuuaauaugacaaugccucugucuuguaccaagaacaauagccaucacuauauccgggucggcaacgagacggggcucgagcugacccuuacaaauaccuccaucauuaaccauaaauuuugcaaucugucugacgcgcacaagaaaaaccucuacgaucaugcucugaugagcaucauuuccacauuccaccugucuaucccgaauuuuaaccaguaugaagccaugagcugugacuucaauggaggcaagauuuccgugcaguacaaccucagccacucuuaugccggcgaugcugccaaucauugcgggaccguugcuaacggagugcugcaaacguuuaugcgcauggccuggggcggguccuacaucgcgcuugacagcggauguggcaacugggauugcauuaugacaucuuaccaguaucugaucauccagaauaccacaugggacgaucacugucaguucuccagacccagcccuauuggguaccucggacugcuuucucaacggacccgcgacgucuauaucuccagacggcugcucggcaccuuuacauggacgcugagcgauuccgagggcaaggacacccccgggggauacugccugacacgcuggaugcucauugaagccgagcugaaauguuucggcaacaccgcuguggccaagugcaaugagaaacaugaugaagaguuuugcgacaugcuuagacuguucgauuuuaacaagcaggcuauccagcggcucaaagccccugcgcagaugucuauucaacugaucaauaaggccgugaacgcucuuaucaaugaccagcugauuaugaagaaccaccuccgcgacaucauguguauucccuauugcaauuacagcaaauauugguaccugaacaauacagccaccgggaagacgucccugccuaaauguuggcucaucagcaacggaucuuaccugaaugaaacacacuucuccgaugacauugagcaggaagcugauaacaugaucaccgagaugcuucaaaaggaguauauggaaagacagggcaaaaccccgcuggggcucgucgaccuguucguuuuuagcacaucuuucuaccugaucagcauuuuucuucaucucgugaagauccccacccaccggcauauugugggaaaauccugcccuaagccccaccgccugaaucauaugggcaucuguucuugcggccuguauaagcagccugggguccccgugagauggaaacggugaggacuaguaauaaggaaacuguaugaaugucugugggcaggaagugaagagauccuucuguaaagguuuuuggaauuaugucugcugaauaauaaacuuuuuugaaauaauaaaucugguagaaaaaugagaucuaaaaaaaaaaaaaaaaaaaaaaaaaaaaaaaaaaaaaaaaaaaaaaaaaaaaaaaaaaaaaaaaaaaaaaaaaaaaaaaaaaaaaaaaaaaaaaaaaaaa

SEQ ID NO: 29341 - RNA, 1788 nt, Artificial Sequence
  mRNA product Design b-4 (A100) comprising derived and/or modified sequence from LASV(G3010-SLE-2013;Clade IV)__AIT17344__GPCmut5 (opt5)
aggagagucccgcagucggcguccagcggcucugcuuguucgugugugugucguugcaggccuuauucaagcuuaccaugggccagaucgugaccuucuuucaagaggucccccacguuauugaagaggugaugaacaucgugcugauugcccucagcauccuggcuguccuuaaggggcuguacaauuucgccacaugcggacucgugggccugguuacguuucuucugcucugugggagauccugcaccacaucucuguauaaaggaguguacgaacugcagacccucgagcugaacauggaaacacuuaauaugaccaugccucugagcuguacaaagaacaauucccaucacuauauuauggucggcaacgagaccgggcucgagcugacgcuuaccaauacaucuaucaucaaccauaaauucugcaaucugagcgacgcgcacaagaaaaaccucuacaaucaugcucugauguccauuaucucuaccuuucaccugagcauuccgaacuucaaucaguaugaagccauguccugugauuuuaacggaggcaagaucagcgugcaguacaaucucucucacuccuaugccggcgacgcugccagccauugcgggacaguugcuaacggagugcugcaaaccuucaugcggauggccuggggcgggucuuacauugcgcuugauuccggauguggcaagugggacugcaucaugacgagcuaccaguaucugauuauccagaacacaaccugggaggaucacugucaguuuucucgccccuccccuaucggguaccucggacugcuuagccaaagaacacgggacauuuauaucucccgcagacugcucggcaccuucaccuggacacugucugauagcgaaggcaaagacacgcccgggggauacugccugacccgguggaugcucauugaggccgagcugaaguguuuuggcaauacagcugucgccaaaugcaacgaaaagcaugaugaggaguucugcgacaugcuucgccuguuugauuucaauaaacaggcuauccagagacucaagaccccugcccagauguccauucaacugaucaacaaggcggugaaugcccuuaucaacgaccagcugauuaugaaaaaucaccuccgggauaucauguguauucccuauugcaacuacagcaaguauugguaccugaaucacacaaccacggggaaaacaucucugccuaaguguuggcucguguccaacggaagcuaccugaaugaaacccauuucucugacgacaucgaacagcaagcugauaacaugauuaccgagaugcuucagaaagaguauauggaacgccagggcaagacaccgcuggggcucgucgaccuguuuguuuucagcaccuccuuuuaccugaucucuaucuuccuucaccucgugaaaauucccacacauagacacaucgugggaaagagcugcccuaagccccaucggcugaaucacaugggcauuuguuccugcggccuguauaaacagccugggguccccgugcgcuggaagagaugaggacuaguaauaaggaaacuguaugaaugucugugggcaggaagugaagagauccuucuguaaagguuuuuggaauuaugucugcugaauaauaaacuuuuuugaaauaauaaaucugguagaaaaaugagaucuaaaaaaaaaaaaaaaaaaaaaaaaaaaaaaaaaaaaaaaaaaaaaaaaaaaaaaaaaaaaaaaaaaaaaaaaaaaaaaaaaaaaaaaaaaaaaaaaaaaa

SEQ ID NO: 29342 - RNA, 1788 nt, Artificial Sequence
  mRNA product Design b-4 (A100) comprising derived and/or modified sequence from LASV(G502-SLE-2009;Clade IV)__AIT17126__GPCmut5 (opt5)
aggagagucccgcagucggcguccagcggcucugcuuguucgugugugugucguugcaggccuuauucaagcuuaccaugggccagaucgugaccuucuuucaagaggucccccacguuauugaagaggugaugaacaucgugcugauugcccucagcauccuggcuguccuuaaggggcuguacaauuucgccacaugcggacucgugggccugcuuacguuucugcuccugugugggagauccugcaccacaggacuguauaaaggcguuuacgaacuccagacccuggagcuuaacauggaaacacugaauaugaccaugccucucucuuguacaaagaacaauagccaucacuauauuaugguggggaacgagaccggacuggagcuuacgcugaccaauacauccaucaucaaccauaaauucugcaaucucucugacgcgcacaagaaaaaccuguacgaucaugcucugaugagcauuaucuccaccuuucaccucucuauuccgaauuucaaccaguaugaagccaugagcugugacuuuaauggcggcaagaucuccguccaguacaaccugagccacucuuaugccggggaugcugccgaccauugcggaacaguggcuaauggcguucuucaaaccuucaugcggauggccuggggaggguccuacauugcgcuggauagcggcugugggcgcugggacugcaucaugacgucuuaccaguaucucauuauccagaacacaaccugggaggaucacugucaguuuuccagacccagcccuaucggauaccugggccuucugucucaacggacacgcgacauuuauaucuccagacggcuccugggcaccuucaccuggacacugagcgauuccgaagggaaggacacgcccggaggcuacugccucacccgcuggaugcugauugaggccgagcuuaaauguuuugggaacacagcuguggccaagugcaaugaaaaacaugaugaggaguucugcgacaugcugagacucuuugauuucaacaagcaggcuauccagcggcugaaagccccugcgcagaugucuauucaacuuaucaauaaggccgucaacgcucugaucaaugaccagcucgugaugaagaaccaucugcgcgacauuauguguauccccuauugcaauuacagcagauauugguaccugaaccacaccacaaccggacggacgucccucccuaaauguuggcuggugagcaauggcucuuaccuuaacgaaacacacuucuccgaugacauugaacagcaagccgauaauaugaucaccgagaugcugcagaaggaguauauggaacgccaggggaaaaccccgcucggacuggucgaccuguuuguuuucagcacaucuuuuuaccuuauuagcaucuuccuccaccuggugaagauccccacccauagacacauugugggcaaauccugcccuaagccccaucggcugaaccacaugggcaucuguucuugcgggcucuauaaacagccuggaguccccgugaaguggaagcgcugaggacuaguaauaaggaaacuguaugaaugucugugggcaggaagugaagagauccuucuguaaagguuuuuggaauuaugucugcugaauaauaaacuuuuuugaaauaauaaaucugguagaaaaaugagaucuaaaaaaaaaaaaaaaaaaaaaaaaaaaaaaaaaaaaaaaaaaaaaaaaaaaaaaaaaaaaaaaaaaaaaaaaaaaaaaaaaaaaaaaaaaaaaaaaaaaa

SEQ ID NO: 29343 - RNA, 1788 nt, Artificial Sequence
  mRNA product Design b-4 (A100) comprising derived and/or modified sequence from LASV(G733-SLE-2010;Clade IV)__AIT17154__GPCmut5 (opt5)
aggagagucccgcagucggcguccagcggcucugcuuguucgugugugugucguugcaggccuuauucaagcuuaccaugggccagaucgugaccuucuuucaagaggucccccacguuauugaagaggugaugaacaucgugcugauugcccucagcauccuggcuguccuuaaggggcuguacaauuucgccacaugcggaauugugggccucguuuccuuucugcuucugugugggagaucuugcacgaccagccucuauaaaggaguguacgaacugcagacacuggagcucaacauggaaacccugaauaugacaaugccucuuuccuguaccaagaacaauucucaucacuauaucauggucggcaacgagacagggcuggagcucacccugacgaauaccagcaucauuaaccauaaauucugcaaucuuuccgacgcgcacaagaaaaaccuguacgaucaugcucucaugucuaucauuagcacauuucaccuguccaucccgaauuucaaccaguaugaagccaugagcugugacuuuaauggaggcaagauuucugugcaguacaaccugucccacagcuaugccggcgaugcugccaaucauugcgggaccaucgcuaacggaguucuccaaacauucaugcggauggccuggggcgggucuuacauugcgcuggacuccggaugugaucgcugggacugcaucaugaccagcuaccaguaucuuaucauucagaacacgacaugggaggaucacugucaguuuucuagacccuccccuaucggcuaccuggggcuccugagccaacggacccgcgacauuuauaucuccagacggcuucugggaacauucaccuggacccucucugauagcgaaggcaaggacacacccggcggguacugccugacgcgcuggaugcugauugaggccgagcucaaauguuuuggaaauaccgcuguggccaagugcaacgaaaaacaugaugaggaguucugcgacaugcugagacuuuuugauuucaauaagcaggcuauccagcggcugaaagccccugcgcagauguccauccaacucauuaacaaggccgucaaugcucugaucaacgaccagcuuauuaugaagaaucaucugcgcgacaucauguguauucccuauugcaacuacagcaaauauugguaccucaaucacacaaccacaggcaagaccucucugccuaaauguuggcugguguccaacgggagcuaccucaaugaaacgcacuucucugaugacaucgaacagcaagccgauaacaugaucacagagaugcugcagaaggaguauauggaaagacagggaaaaaccccgcuuggccugguggaccucuuugucuucagcaccuccuuuuaccugauuucuaucuuccugcaccuuguuaagauucccacacaucggcacgugguggggaaaagcugcccuaagccccaucgccucaaucacaugggaaucuguuccugcggccuguauggccagccugggguccccgugaaguggaaaagaugaggacuaguaauaaggaaacuguaugaaugucugugggcaggaagugaagagauccuucuguaaagguuuuuggaauuaugucugcugaauaauaaacuuuuuugaaauaauaaaucugguagaaaaaugagaucuaaaaaaaaaaaaaaaaaaaaaaaaaaaaaaaaaaaaaaaaaaaaaaaaaaaaaaaaaaaaaaaaaaaaaaaaaaaaaaaaaaaaaaaaaaaaaaaaaaaa

SEQ ID NO: 29344 - RNA, 1788 nt, Artificial Sequence
  mRNA product Design b-4 (A100) comprising derived and/or modified sequence from MOPV/LASV reassortant(IGS-1;Clade IV)__AFY05576__GPCmut5 (opt5)
aggagagucccgcagucggcguccagcggcucugcuuguucgugugugugucguugcaggccuuauucaagcuuaccaugggccagaucgugaccuucuuucaagaggucccccacguuauugaagaggugaugaacaucgugcugauugcccucagcguccuggcugugcuuaaggggcuguacaauuucgccacaugcggacucguuggccuggugacguuucuucugcucugugggagauccugcaccacaucucuguauaaaggagucuacgaacugcagacccucgagcugaacauggaaacacuuaauaugaccaugccucugagcuguacaaagaacaauucccaucacuauaucauggugggcaacgagaccgggcucgagcugacgcuuaccaauacaucuauuaucaaccauaaauucugcaaucugagcgacgcgcacaagaaaaaccucuacgaucaugcucugauguccaucauuucuaccuuucaccugagcaucccgaauuucaaccaguaugaagccauguccugugacuuuaauggaggcaagauuagcguucaguacaaccucucucacuccuaugccggcgaugcugccaaucauugcgggacaguggcuaacggaguccugcaaaccuucaugcggauggccuggggcgggagcuacaucgcgcuugacucuggauguggcaacugggauugcauuaugacguccuaccaguaucugaucauucagaauacaaccugggaggaccacugucaguuuagccgccccucuccuaucggguaccucggacugcuuucccaaagaacacgggauaucuauauuagccgcagacugcucggcaccuucaccuggacacuguccgacucugaaggcgaggauacgcccgggggauacugccugacccgguggaugcucaucgaggccgaacugaaguguuuuggcaacacagcuguggccaaaugcaaugagaagcaugacgaagaguucugcgauaugcuucgccuguuugacuucaacaaacaggcuauucagagacucaaggccccugcgcagaugagcauccaacugauuaauaaagccgugaacgcucuuaucaaugaucagcugaucaugaagaaccaccuccgggacauuauguguauccccuauugcaauuacuccaaguauugguaccugaaccacaccacaaccgggcgcacgagccugccuaaauguuggcucgucucuaauggauccuaccugaacgaaacacauuucagcgacgauauugagcagcaagccgacaauaugaucaccgagaugcuucagaaggaauauauggagagacagggcaaaaccccgcuggggcucguugaucuguuuguguucucuaccagcuuuuaccugauuuccaucuuccuucaccucgugaagauccccacacaucggcacauugucggaaaaucuugcccuaagccccaucgccugaaccacaugggcaucuguagcugcggccuguauaaacagccuggggugcccguuaaguggaagagaugaggacuaguaauaaggaaacuguaugaaugucugugggcaggaagugaagagauccuucuguaaagguuuuuggaauuaugucugcugaauaauaaacuuuuuugaaauaauaaaucugguagaaaaaugagaucuaaaaaaaaaaaaaaaaaaaaaaaaaaaaaaaaaaaaaaaaaaaaaaaaaaaaaaaaaaaaaaaaaaaaaaaaaaaaaaaaaaaaaaaaaaaaaaaaaaaa

SEQ ID NO: 29345 - RNA, 1788 nt, Artificial Sequence
  mRNA product Design b-4 (A100) comprising derived and/or modified sequence from LASV(LM765-SLE-2012;Clade IV)__AIT17814__GPCmut5 (opt5)
aggagagucccgcagucggcguccagcggcucugcuuguucgugugugugucguugcaggccuuauucaagcuuaccaugggccagaucgugaccuucuuucaagaggucccccacguuauugaagaggugaugaacaucgugcugauugcccucagcauccuggcuguccuuaaggggcuguacaauuucgccacaugcggacucgugggccugguuacguuucuucugcucugugggagauccugcaccacaucucuguauaaaggaguguacgaacugcagacccucgagcugaacauggaaacacuuaauaugaccaugccucugagcuguacaaagaacaauucccaucacuauauuauggucggcaacgagaccgggcucgagcugacgcuuaccaauacaucuaucaucgaccauaaauucugcaaccugagcgaugcgcaccggaagaaucucuacgaccaugcucugauguccauuaucucuaccuuucaccugagcauuccgaacuucaaucaguaugaagccauguccugugauuuuaacggaggcaaaaucagcgugcaguacaaucucucucacuccuaugccaaggacgcugccgaucauugcggcacaguugcuaacggggugcugcaaaccuucaugcgcauggccuggggaggcagcuacauugcgcuugacucuggguguggaagaugggauugcaucaugacguccuaccaguaucugauuauccagaauacaaccugggaggaccacugucaguuuagccggcccucuccuaucggcuaccucgggcugcuuucccaacgcacaagagauauuuauaucagccggcgccugcucggaaccuucaccuggacacuguccgacucugaaggcaaggauacgcccggcggguacugccugaccagauggaugcucauugaggccgagcugaaauguuuuggaaacacagcugucgccaagugcaacgaaaaacaugacgaggaguucugcgauaugcuucggcuguuugacuucaauaagcaggcuauccagcgccucaaagccccugcgcagaugagcauucaacugaucaacaaggccgugaaugcucuuaucaacgaccagcugauuaugaagaaucaccucagagauaucauguguauucccuauugcaacuacuccaaauauugguaccugaaucacaccacaaccggcaagacgagccugccuaaauguuggcucgugucuaacggguccuaccugaaugaaacacauuucagcgacgauaucgaacagcaagccgacaacaugauuaccgagaugcuucagaaggaguauauggaacggcagggaaaaaccccgcugggccucgucgaucuguuuguuuucucuaccagcuuuuaccugaucuccaucuuccuucaccucgugaagauucccacacaucgccacaucguggggaaaccuugccccaagccucauagacugaaucacaugggaauuuguucuugcggccuguauaagcagcccggcgucccggugaaauggaagcggugaggacuaguaauaaggaaacuguaugaaugucugugggcaggaagugaagagauccuucuguaaagguuuuuggaauuaugucugcugaauaauaaacuuuuuugaaauaauaaaucugguagaaaaaugagaucuaaaaaaaaaaaaaaaaaaaaaaaaaaaaaaaaaaaaaaaaaaaaaaaaaaaaaaaaaaaaaaaaaaaaaaaaaaaaaaaaaaaaaaaaaaaaaaaaaaaa

SEQ ID NO: 29346 - RNA, 1788 nt, Artificial Sequence
  mRNA product Design b-4 (A100) comprising derived and/or modified sequence from LASV(LM776-SLE-2012;Clade IV)__AIT17824__GPCmut5 (opt5)
aggagagucccgcagucggcguccagcggcucugcuuguucgugugugugucguugcaggccuuauucaagcuuaccaugggccagaucgugaccuucuuucaagaggucccccacguuauugaagaggugaugaacaucgugcugauugcccucagcauccuggcuguccuuaaggggcuguacaauuucgccacaugcggacucgugggccugguuacguuucuucugcucugugggagauccugcaccacaucuguguauaaaggagucuacgaacugcagacccuggagcucaacauggaaacacugaauaugaccaugccucuuagcuguacaaagaacaauucccaucacuauauuauggugggcaacgagaccgggcuggagcucacgcugaccaauacaucuaucaucaaccauaaauucugcaaucuuagcgacgcgcacaagaaaaaccuguacgaucaugcucucauguccauuaucucuaccuuucaccugagcauuccgaauuucaaccaguaugaagccauguccugugacuuuaauggaggcaagaucagcguucaguacaaccugucucacuccuaugccggcgaugcugccaaucauugcgggacaguggcuaacggaguccuccaaaccuucaugcggauggccuggggcgggagcuacauugcgcuggacucuggauguggcaagugggauugcaucaugacguccuaccaguaucuuauuauccagaacacaaccugggaggaccacugucaguuuagccgccccucuccuaucggguaccugggacuccugucccaaagaacacgggauauuuauaucagccgcagacuucugggcaccuucaccuggacacucuccgacucugaaggcaaagauacgcccgggggauacugccugacccgguggaugcugauugaggccgagcucaaguguuuuggcaauacagcuguggccaaaugcaacgaaaagcaugacgaggaguucugcgauaugcugcgccuuuuugacuucaauaaacaggcuauccagagacugaaggccccugcgcagaugagcauucaacucaucaacaaggccgugaaugcucugaucaacgaucagcuuauuaugaaaaaucaucugcgggacaucauguguauucccuauugcaacuacuccaaguauugguaccucaaucacaccacaaccgggaaaacgagccugccuaaguguuggcuggucucuaacggauccuaccucaaugaaacacacuucagcgacgauaucgaacagcaagccgacaacaugauuaccgagaugcugcagaaagaguauauggaacgccagggcaagaccccgcuugggcugguugaucucuuuguguucucuaccagcuuuuaccugaucuccaucuuccugcaccuugugaaaauucccacacauagacacaucgucggaaagucuugcccuaagccccaucggcucaaucacaugggcauuuguagcugcggccuguauaaacagccuggggugcccguucgcuggaagagaugaggacuaguaauaaggaaacuguaugaaugucugugggcaggaagugaagagauccuucuguaaagguuuuuggaauuaugucugcugaauaauaaacuuuuuugaaauaauaaaucugguagaaaaaugagaucuaaaaaaaaaaaaaaaaaaaaaaaaaaaaaaaaaaaaaaaaaaaaaaaaaaaaaaaaaaaaaaaaaaaaaaaaaaaaaaaaaaaaaaaaaaaaaaaaaaaa

SEQ ID NO: 29347 - RNA, 1788 nt, Artificial Sequence
  mRNA product Design b-4 (A100) comprising derived and/or modified sequence from LASV(Mad39;Clade IV)__ANH09722__GPCmut5 (opt5)
aggagagucccgcagucggcguccagcggcucugcuuguucgugugugugucguugcaggccuuauucaagcuuaccaugggccagaucgugaccuucuuucaagaggucccccacguuauugaagaggugaugaacaucgugcugauugcccucagcauccuggcuguccuuaaggggcuguacaauguggccacaugcggacucauuggccugguuacguuccuucugcucugugggagauccugcaccacaacccuguauaaaggaguguacgaacugcaggcgcucgagcugaacauggaaacacuuaauaugaccaugccucugucuuguacaaagaacaauagccaucacuauauccgggucggcaacgagaccgggcucgagcugacgcuuaccaauacaucccugaucaaccauaaauuuugcaaucucucugacgcucacaagaaaaaccuguacgaucaugcccugaugagcauuaucuccaccuuccaccucucuauuccgaauuuuaaccaguaugaagccaugagcugugacuucaaugauggaaagaucuccgugcaguacaaccugagccacacauaugcuggcgacaccgccaaucauugcggcacgguugcuaacggggugcuucaaacauuuaugcgcauggccuggggaggcucuuacauugcgcuggauuccggguguggaggcugggacugcaucaugaccagcuaccaguaucucauuauccagaacacaaccugggaggaucacugucaguucucuagacccuccccuaucggguaccugggacuucugagccaacggacccgcgacauuuauaucucuagacggcuccugggcacauuuacguggacccuguccgauagcgaaggcaaggacacacccgggggauacugccucacccgcuggaugcugauugaggccgagcuuaaauguuucggcaauacagcugucgccaagugcaacgaaaaacaugaugaggaauuuugcgacaugcugagacucuucgauuuuaauaagcaggcuauccagcggcugaaagccccugcgcagauguccauucaacuuaucaacaaggccgugaaugcucugaucaacgaccagcucauuaugaagaaucaucugcgcgacaucauguguauucccuauugcaacuacucuaaauauugguaccugaaucacaccgugacggggaagacaagccucccuaaauguuggcuggucuccaacggaagcuaccuuaaugagacccacuucucugaugacaucgaacagcaagccgauaacaugauuaccgagaugcugcagaaggaguauauggaaagacagggcaaaacaccgcucgggcugguugaccuguucguguuuuccaccagcuucuaccuuaucucuaucuuucuccaccuggugaagauucccacacaucggcacgucgugggaaaaccuugccccaagccucaucgccugaaucacaugggcaucuguagcugcggcuucuauaagcagcccgggguuccggugagauggaaacggugaggacuaguaauaaggaaacuguaugaaugucugugggcaggaagugaagagauccuucuguaaagguuuuuggaauuaugucugcugaauaauaaacuuuuuugaaauaauaaaucugguagaaaaaugagaucuaaaaaaaaaaaaaaaaaaaaaaaaaaaaaaaaaaaaaaaaaaaaaaaaaaaaaaaaaaaaaaaaaaaaaaaaaaaaaaaaaaaaaaaaaaaaaaaaaaaa

SEQ ID NO: 29348 - RNA, 1788 nt, Artificial Sequence
  mRNA product Design b-4 (A100) comprising derived and/or modified sequence from LASV(Z0947-SLE-2011;Clade IV)__AIT17840__GPCmut5 (opt5)
aggagagucccgcagucggcguccagcggcucugcuuguucgugugugugucguugcaggccuuauucaagcuuaccaugggccagaucgugaccuucuuucaagaggucccccacguuauugaagaggugaugaacaucgugcugauugcccucagcauccuggcuguccuuaaggggcuguacaauuucgccacaugcggacucgugggccugguuacguuucuucugcucugugggagauccugcaccauuucucuguauaaaggaguguacgaacugcagacacucgagcugaacauggaaacccuuaauaugacaaugccucugagcuguaccaagaacaauucccaucacuauaucauggucggcaacgagacagggcucgagcugacccuuacgaauaccucuaucauuaaccauaaauucugcaaucugagcgacgcgcacaagaaaaaccucuacgaucaugcucugauguccaucauuucuacauuucaccugagcaucccgaauuucaaccaguaugaagccauguccugugacuuuaauggaggcaagauuagcgugcaguacaaccucucucacuccuaugccggcgaugcugccaaucauugcgggaccguugcuaacggagugcugcaaacauucaugcggauggccuggggcgggagcuacaucgcgcuugacucuggaugugaucgcugggacugcauuaugaccuccuaccaguaucugaucauccagaacacgacaugggaggaucacugucaguuuagcagacccucuccuauuggcuaccucgggcugcuuucccaacggacccgcgacaucuauauuagcagacggcugcucggaacauucaccuggacccuguccgauucugaaggcaaggacacacccggcggguacugccugacgcgcuggaugcucaucgaggccgagcugaaauguuuuggaaauaccgcugucgccaagugcaacgaaaaacaugaugaggaguucugcgacaugcuuagacuguuugauuucaauaagcaggcuauucagcggcucaaagccccugcgcagaugagcauccaacugaucaacaaggccgugaaugcucuuauuaacgaccagcugaucaugaagaaucaccuccgcgacauuauguguauccccuauugcaacuacuccaaauauugguaccugaaucacacaaccacaggcaagaccagccugccuaaauguuggcucgugucuaacggguccuaccugaaugaaacgcauuucagcgaugacauugaacagcaagccgauaacaugaucacagagaugcuucagaaggaguauauggaaagacagggaaaaaccccgcugggccucgucgaccuguuuguuuucucuaccagcuuuuaccugaucuccauuuuccuucaccucgugaagauccccacacaucggcacauuguggggaaaccuugccccaagccucaucgccugaaucacaugggaaucuguucuugcggccuguauaagcagcccggcgucccggugaaauggaagagaugaggacuaguaauaaggaaacuguaugaaugucugugggcaggaagugaagagauccuucuguaaagguuuuuggaauuaugucugcugaauaauaaacuuuuuugaaauaauaaaucugguagaaaaaugagaucuaaaaaaaaaaaaaaaaaaaaaaaaaaaaaaaaaaaaaaaaaaaaaaaaaaaaaaaaaaaaaaaaaaaaaaaaaaaaaaaaaaaaaaaaaaaaaaaaaaaa

SEQ ID NO: 29349 - RNA, 1658 nt, Artificial Sequence
  mRNA product Design i-3 (hSL-A64-N5) comprising derived and/or modified sequence from LASV(Josiah;Clade IV)__NP_694870__GPCmut5 (opt1)
aggagaaagcuuaccaugggccagaucgugaccuucuuccaggaggucccccacgugaucgaggaggugaugaacaucguccugaucgcccucagcgugcuggccgugcugaaggggcucuacaacuucgcgaccugcggccuggucgggcuggugacguuccuccugcugugcggccgcuccugcaccaccagccucuacaaggggguguacgagcugcagacccuggagcucaacauggagacgcugaacaugaccaugccgcuguccugcaccaagaacaacagccaccacuacaucauggucggcaacgagaccggccucgagcugacgcugaccaacaccuccaucaucaaccacaaguucugcaaccucagcgacgcccacaagaagaaccuguacgaccacgcccugauguccaucaucagcaccuuccaccucuccauccccaacuucaaccaguacgaggccaugagcugcgacuucaacgggggcaagaucuccgugcaguacaaccugagccacuccuacgccggggacgcggccaaccacugcggcacgguggccaacgggguccugcagaccuucaugcggauggccuggggcggcagcuacaucgcgcucgacuccgggugcggcaacugggacugcaucaugaccagcuaccaguaccugaucauccagaacaccacgugggaggaccacugccaguucucccggcccagccccaucggguaccugggccuccugucccagcgcacccgggacaucuacaucagccgccggcugcucggcaccuucaccuggacgcugagcgacuccgaggggaaggacaccccgggcggguacugccugacccgcuggaugcucaucgaggccgagcugaagugcuucggcaacaccgccguggccaagugcaacgagaagcacgacgaggaguucugcgacaugcugcggcuguucgacuucaacaagcaggccauccagcgccugaaggcgcccgcccagaugagcauccagcugaucaacaaggccgugaacgcccucaucaacgaccagcugaucaugaagaaccaccuccgggacaucaugugcauccccuacugcaacuacuccaaguacugguaccucaaccacacgaccaccggccgcaccagccugcccaagugcuggcuggucuccaacggcagcuaccucaacgagacgcacuucuccgacgacaucgagcagcaggccgacaacaugaucaccgagaugcugcagaaggaguacauggagcggcaggggaagacgccccugggccucguggaccuguucguguucagcaccuccuucuaccugaucagcaucuuccugcaccucgucaagaucccgacccaccgccacaucguggggaaguccugccccaagccccaccggcugaaccacaugggcaucugcagcugcgggcuguacaagcagcccggcgugccggucaaguggaagcgcugaggacuaguuauaagacugacuagcccgaugggccucccaacgggcccuccuccccuccuugcaccgagauuaaucaaaggcucuuuucagagccaccaaaaaaaaaaaaaaaaaaaaaaaaaaaaaaaaaaaaaaaaaaaaaaaaaaaaaaaaaaaaaaaaagaauu

SEQ ID NO: 29350 - RNA, 1655 nt, Artificial Sequence
  mRNA product Design i-3 (hSL-A64-N5) comprising derived and/or modified sequence from LASV(LP;Clade I)__AAF86701__GPCmut5 (opt1)
aggagaaagcuuaccaugggccagaucaucaccuucuuccaggaggugccccacgucaucgaggaggugaugaacaucgugcugaucgcccucagccugcuggccauccucaaggggcuguacaacaucgcgaccugcggcaucaucgggcuggucgccuuccucuuccugugcggcaaguccugcagccugacgcucaagggcggguacgagcugcagacccuggagcucaacauggagacccugaacaugaccaugccgcuguccugcacgaagaacagcucccaccacuacauccgcgugggcaacgagaccgggcucgagcugacccugaccaacacgagcaucaucaaccacaaguucugcaaccucuccgacgcccacaagaagaaccuguacgaccacgcccugaugagcaucaucuccaccuuccaccucagcauccccaacuucaaccaguacgaggccauguccugcgacuucaacggcgggaagaucagcgugcaguacaaccugucccacagcuacgcgggcgacgccgccgagcacugcgggaccgucgccaacggcgugcugcagaccuucaugcggauggcguggggcgggcgcuacaucgcccucgacuccggcugcgggaacugggacugcaucaugacgagcuaccaguaccugaucauccagaacaccaccugggaggaccacugccaguucucccggcccagccccaucggcuaccugggccuccugucccagcgcacccgggacaucuacaucagccgccggcugcucgggacguucaccuggacccugagcgacuccgagggcaacgagacccccgggggcuacugccugacgcgcuggaugcucaucgaggccgagcugaagugcuucgggaacaccgccguggccaagugcaacgagaagcacgacgaggaguucugcgacaugcugcggcuguucgacuucaacaagcaggcgauccgccggcugaaggcccccgcccagaugagcauccagcugaucaacaaggccgucaacgcccucaucaacgaccagcugaucaugaagaaccaccuccgcgacaucaugugcauccccuacugcaacuacuccaaguacugguaccucaaccacaccagcuccggccggaccagccugcccaagugcuggcugaucuccaacgggagcuaccucaacgagacgcaguucuccgacgacaucgagcagcaggcggacaacaugaucaccgagaugcugcagaaggaguacaucgagcgccagggcaagaccccgcuggggcucguggacaucuucaucuucagcaccuccuucuaccugaucagcaucuuccugcaccugaucaagaucccgacgcaccggcacaucgugggcaagcccugccccaagccccaccgccucaaccacaugggggucugcuccugcggccuguacaagcacccgggcgugcccaccaaguggaagcggugaggacuaguuauaagacugacuagcccgaugggccucccaacgggcccuccuccccuccuugcaccgagauuaaucaaaggcucuuuucagagccaccaaaaaaaaaaaaaaaaaaaaaaaaaaaaaaaaaaaaaaaaaaaaaaaaaaaaaaaaaaaaaaaaagaauu

SEQ ID NO: 29351 - RNA, 1655 nt, Artificial Sequence
  mRNA product Design i-3 (hSL-A64-N5) comprising derived and/or modified sequence from LASV(803213;Clade II)__AAF86703__GPCmut5 (opt1)
aggagaaagcuuaccaugggccagaucaucaccuucuuccaggaggugccccacgucaucgaggaggugaugaacaucgugcugaucgcccucagccugcuggccauccucaaggggaucuacaacgucgcgaccugcggccuguucgggcugaucuccuuccuccugcugugcggccgcagcugcuccgugacguacaaggggguguacgagcuccagacccuggagcugaacauggccaaccucaacaugaccaugccgcugagcugcaccaagaacaacucccaccacuacaucauggucggcaacgagacgggccuggagcucacccugaccaacaccagcaucaucaaccacaaguucugcaaccuguccgacgcccacaagaagaaccucuacgaccacgcccugaugagcaucaucuccacguuccaccugagcauccccaacuucaaccaguacgaggccauguccugcgacuucaacgggggcaagaucagcgugcaguacaaccucucccacagcuucgcgguggacgccgccaaccacugcgggaccaucgccaacggcguccugcagaccuucaugcggauggcguggggcggguccuacaucgcccuggacagcggcugcgggaacugggacugcaucaugaccuccuaccaguaccucaucauccagaacacgaccugggaggaccacugccaguucagccgccccucccccaucggcuaccuggggcugcucagccagcggacccgcgacaucuacaucagccggcgccugcugggcaccuucacguggacccucuccgacagcgagggcaacgaggcccccgggggcuacugccugacccgguggaugcugaucgaggccgagcucaagugcuucgggaacaccgccguggcgaagugcaacgagaagcacgacgaggaguucugcgacaugcugcgccuguucgacuucaacaagcaggccaucaagcggcucaagacgcccgcccagauguccauccagcugaucaacaaggccgugaacgcccugaucaacgaccagcucaucaugaagaaccaccuccgcgacaucaugugcauccccuacugcaacuacagccgguacugguaccugaaccacaccgucaccgggaagaccucccugccccgcugcuggcuggugagcaacggcuccuaccugaacgagacgcacuucagcgacgacaucgagcagcaggcggacaacaugaucaccgagaugcuccagaaggaguacauggaccggcagggcaagaccccgcuggggcugguggaccucuucgucuucuccaccagcuucuaccugaucuccaucuuccugcaccuggugaagaucccgacgcaccgccacaucgugggcaagcccugccccaagccccaccggcucaaccacauggggaucugcagcugcggccuguacaagcacccggggguccccgugaaguggaagcgcugaggacuaguuauaagacugacuagcccgaugggccucccaacgggcccuccuccccuccuugcaccgagauuaaucaaaggcucuuuucagagccaccaaaaaaaaaaaaaaaaaaaaaaaaaaaaaaaaaaaaaaaaaaaaaaaaaaaaaaaaaaaaaaaaagaauu

SEQ ID NO: 29352 - RNA, 1655 nt, Artificial Sequence
  mRNA product Design i-3 (hSL-A64-N5) comprising derived and/or modified sequence from LASV(GA391;Clade III)__CAA36645__GPCmut5 (opt1)
aggagaaagcuuaccaugggccagaucgugaccuucuuccaggaggucccccacgugaucgaggaggugaugaacaucguccugaucgcccucagcauccuggccauccugaaggggcucuacaacguggcgaccugcggccugaucgggcuggugacguuccuccugcuguccggccgcagcugcucccucaucuacaaggggaccuacgagcugcagacccuggagcucaacauggagacccugaacaugacgaugccgcugagcugcaccaagaacaacucccaccacuacauccgggucggcaacgagaccggccucgagcugacccugacgaacaccagcauccucaaccacaaguucugcaaccuguccgacgcccacaagcgcaaccuguacgaccacagccucauguccaucaucagcaccuuccaccuguccauccccaacuucaaccaguacgaggccaugagcugcgacuucaacgggggcaagaucaccgugcaguacaaccugucccacagcuucgccguggacgccgcggggcacugcggcacgcucgccaacgggguccugcagaccuucaugcggauggccuggggcggcuccuacaucgcccuggacagcgggugcggcaacugggacugcaucaugaccuccuaccaguaccucaucauccagaacaccacgugggacgaccacugccaguucagccggcccucccccaucggguaccugggccugcucagccagcgcacccgggacaucuacaucagccgccggcugcugggcaccuucaccuggacgcucuccgacagcgaggggaacgagaccccgggcggguacugccugacccgcuggaugcugaucgaggcggagcucaagugcuucggcaacaccgccguggccaagugcaacgagaagcacgacgaggaguucugcgacaugcugcggcuguucgacuucaacaagcaggccauccgccggcucaagacgcccgcccagauguccauccagcugaucaacaaggcggugaacgcccugaucaacgaccagcucaucaugaagaaccaccuccgcgacaucaugugcauccccuacugcaacuacagccgguacugguaccugaaccacaccuccaccggcaagaccagccugccccgcugcuggcugaucuccaacggcagcuaccugaacgagacgaaguucuccgacgacaucgagcagcaggccgacaacaugaucaccgagaugcuccagaaggaguacaucgaccggcaggggaagacgccccugggccuggucgaccuguucguguucagcaccuccuucuaccucaucagcaucuuccugcaccuggugaagaucccgacccaccgccacaucgucgggaagcccugccccaagccccaccggcucaaccacaugggcaucugcuccugcgggcuguacaagcagccgggcgugcccgugcgcuggaagcggugaggacuaguuauaagacugacuagcccgaugggccucccaacgggcccuccuccccuccuugcaccgagauuaaucaaaggcucuuuucagagccaccaaaaaaaaaaaaaaaaaaaaaaaaaaaaaaaaaaaaaaaaaaaaaaaaaaaaaaaaaaaaaaaaagaauu

SEQ ID NO: 29353 - RNA, 1658 nt, Artificial Sequence
  mRNA product Design i-3 (hSL-A64-N5) comprising derived and/or modified sequence from LASV(AV;Clade V)__CCA30314__GPCmut5 (opt1)
aggagaaagcuuaccaugggccagaucgugaccuucuuccaggaggucccccacgugaucgaggaggugaugaacaucguccugaucgcccucagcauccuggccgugcugaaggggcucuacaacaucgcgaccugcggccugaucgggcugaucacguuccuccugcugugcggccgcuccugcagcuccaaccucuacaaggggguguacgagcugcagagccuggaccucaacauggagacccugaacaugaccaugccgcuguccugcaccaagaacaacagccaccacuacauccgggucggcaacgacacgggccucgagcugacccugaccaacaccuccauccucaaccacaaguucugcaaccugagcgacgcccacaagaaggaccuguacgaccacgcccucauguccaucaucagcacguuccaccuguccauccccaacuucaaccaguacgaggccaugagcugcgacuucaacgggggcaagaucuccgugcaguacaaccugagccacuccuacgccaucgacgcggccaaccacugcgggaccguggccaacggcauccuccagaccuucaugcgcauggccuggggcgggagcuacaucgcgcuggacuccggcugcgggaacugggacugcaucaugaccagcuaccaguaccugaucauccagaacacgaccugggagaaccacugccaguucucccgccccagccccaucggcuaccucgggcugcugagccagcggacccgcgacaucuacaucucccggcgccuccugggcaccuucacguggacccugagcgacuccgagggcaacgccacccccgggggcuacugccucacccgguggaugcugaucgaggccgagcugaagugcuucgggaacacggccgucgccaagugcaacgagaagcacgacgaggaguucugcgacaugcuccgccuguucgacuucaacaagcaggcgaucagccggcugaagucccccgcccagaugagcauccagcucaucaacaaggccgugaacgcccugaucaacgaccagcugaucaugaagaaccaccuccgcgacaucaugugcauccccuacugcaacuacuccaaguacugguaccugaaccacaccaucaccgggaagaccagccugcccaagugcuggcucguguccaacggcagcuaccugaacgagacgcacuucuccgacgacaucgagcagcaggccgacaacaugaucaccgagaugcugcagaaggaguacauggagcggcagggcaagaccccgcucgggcuggucgaccuguucguguucagcaccuccuucuaccugaucagcaucuuccuccgccuggugaagaucccgacgcaccggcacaucgucggcaagcccugccccaagccccaccgccugaaccacauggggaucugcuccugcggccucuacaagcagccgggggugcccgugcgguggaagcgcugaggacuaguuauaagacugacuagcccgaugggccucccaacgggcccuccuccccuccuugcaccgagauuaaucaaaggcucuuuucagagccaccaaaaaaaaaaaaaaaaaaaaaaaaaaaaaaaaaaaaaaaaaaaaaaaaaaaaaaaaaaaaaaaaagaauu

SEQ ID NO: 29354 - RNA, 1655 nt, Artificial Sequence
  mRNA product Design i-3 (hSL-A64-N5) comprising derived and/or modified sequence from LASV(Togo/2016/7082;Clade VI)__AMR44577__GPCmut5 (opt1)
aggagaaagcuuaccaugggccagaucaucaccuucuuccaggaggugccccacgucaucgaggaggugaugaacaucgugcugaucgcccucagccugcuggccauccucaagggggucuacaacguggcgaccugcggcaucaucgggcuggugacguuccuguuccucugcggccgcuccugcagccugaucuacaagggguccuacgagcugcagacccucgagcugaacauggagacccugaacaugaccaugccgcucagcugcacgaagaacuccagccaccacuacauccgggucggcaacgagaccggccuggagcugacccucaccaacacguccaucaucaaccacaaguucugcaaccugagcgacgcccacaagcgcaaccuguacgaccacgcccucauguccauccugagcaccuuccaccuguccauccccaacuucaaccaguacgaggccaugagcugcgacuucaacgggggcaagaucuccgugcaguacaaccucagccacgccuacgcgguggacgccgccgagcacugcgggaccgucgccaacggcgugcugcagaccuucaugcggauggcguggggcggguccuacaucgcccuggacagcggcugcgggaacugggacugcaucaugacguccuaccaguaccucaucauccagaacaccaccugggaggaccacugccaguucagccggcccucccccaucggcuaccuggggcugcucagccagcgcacccgggacaucuacaucagccgccggcugcugggcacguucaccuggacccucuccgacagcgagggcaacgagacccccgggggcuacugccugacgcgcuggaugcugaucgaggccgagcucaagugcuucgggaacaccgccguggccaagugcaacgagaagcacgacgaggaguucugcgacaugcugcggcuguucgacuucaacaagcaggcgauccagcgccucaagucccccgcccagaugagcauccagcugaucaacaaggccgucaacgcccugaucaacgaccagcucaucaugaagaaccaccuccgggacaugaugugcauccccuacugcaacuacuccaaguacugguaccugaaccacaccagcuccgggcgcaccagccugcccaagugcuggcugguguccaacggcagcuaccugaacgagacgcacuucuccgacgacaucgagcagcaggccgacaacaugaucaccgagaugcuccagaaggaguacaucgaccggcagggcaagaccccgcuggggcugguggaccucuucgucuucagcaccuccuucuaccugaucagcaucuuccugcaccugaucaagaucccgacgcaccgccacaucgugggcaagcccugccccaagccccaccggcucaaccacauggggaucugcuccugcggccuguacaagcagccgggggugcccacccgcuggaagcggugaggacuaguuauaagacugacuagcccgaugggccucccaacgggcccuccuccccuccuugcaccgagauuaaucaaaggcucuuuucagagccaccaaaaaaaaaaaaaaaaaaaaaaaaaaaaaaaaaaaaaaaaaaaaaaaaaaaaaaaaaaaaaaaaagaauu

SEQ ID NO: 29355 - RNA, 1655 nt, Artificial Sequence
  mRNA product Design i-3 (hSL-A64-N5) comprising derived and/or modified sequence from LASV(KAK-428;Clade n.d. (VII))__ANH09740__GPCmut5 (opt1)
aggagaaagcuuaccaugggccagaucgugaccuucuuccaggaggucccccacgugaucgaggaggugaugaacaucguccugaucgcccucagccugcuggccauccucaaggggcuguacaacuucgcgaccugcggcgugaucgggcugaucacguuccuccugcugugcggccgcuccugcagcgccaccuacaaggggcaguacgagcuccagacccuggagcugaacauggagucccucaacaugaccaugccgcugagcugcacgaagaacaacucccaccacuacauccgggccggcaacaacaccggccuggagcucacccugaccaacacgagcaucaucucccacaaguucugcaaccugagcgacgcccacaagaagaaccucuacgaccacacccugauguccaucaucaccaccuuccaccugagcauccccaacuucaaccaguacgaggccauguccugcgacuucaacgggggcaagaucagcauccaguacaaccucucccacagcuacgcgggggacgccgcccagcacugcggcacgguggccaacgggguccugcagaccuucaugcgcauggcguggggcggcuccuaccuggcccucgacagcgggugccgcggcugggacugcaucaucuccagcuaccaguaccugaucauccagaacaccaccugggacgaccacugccaguucucccggcccagccccaucggguaccugggcuucgugagccagaagacgcgcgacaucuacaucucccggcgccuccugggcaccuucaccuggacccugagcgacuccgaggggcacgacaugccgggcggguacugccucacgcgguggaugcugaucgaggccgaccugaagugcuucggcaacaccgccguggccaagugcaacgagaagcacgacgaggaguucugcgacauguggcgccucuucgacuucaacaagcaggcgauccagcggcugaaggcccccgcccagaugaacauccagcugaucaacaaggccgucaacgcccucaucaacgaccagcugaugaugaagaaccaccuccgcgacaucaugugcauccccuacugcaacuacagcaaguucugguaccugaacaacaccaccacgggccggaccucccugccccgcugcuggcugaucagcaacggcuccuaccucaacgagacccacuucagcgacgacaucgagcagcaggcggacaacaugaucaccgagaugcugcagaaggaguacauggaccggcaggggaagacgccccugggccucguggaccuguucguguucuccaccagcuucuaccugaucaccaucuuccuccaccuggucaagaucccgacccaccgccacaucguggggaagcccugccccaagccccaccggcugaaccacaugggcaucugcuccugcgggcuguacaagcagccgggcgugcccguccgcuggaagcggugaggacuaguuauaagacugacuagcccgaugggccucccaacgggcccuccuccccuccuugcaccgagauuaaucaaaggcucuuuucagagccaccaaaaaaaaaaaaaaaaaaaaaaaaaaaaaaaaaaaaaaaaaaaaaaaaaaaaaaaaaaaaaaaaagaauu

SEQ ID NO: 29356 - RNA, 1655 nt, Artificial Sequence; identical to SEQ ID NO: 29350
  mRNA product Design i-3 (hSL-A64-N5) comprising derived and/or modified sequence from LASV(Pinneo-NIG-1969;Clade I)__AIT17836__GPCmut5 (opt1)

SEQ ID NO: 29357 - RNA, 1655 nt, Artificial Sequence
  mRNA product Design i-3 (hSL-A64-N5) comprising derived and/or modified sequence from LASV(ISTH0009-NIG-2011;Clade II)__AIT17404__GPCmut5 (opt1)
aggagaaagcuuaccaugggccagaucaucaccuucuuccaggaggugccccacgucaucgaggaggugaugaacaucgugcugaucgcccucagccugcuggccauccucaaggggaucuacaacgucgcgaccugcggccuguucgggcugguguccuuccuccugcugugcggccgcagcugcuccacgaccuacaaggggguguacgagcuccagacccuggagcuggacauggccagccucaacaugaccaugccgcuguccugcacgaagaacaacagccaccacuacaucauggucggcaacgagaccggccuggagcucacccugaccaacacguccaucaucaaccacaaguucugcaaccugagcgacgcccacaagaagaaccucuacgaccacgcccugauguccaucaucagcaccuuccaccuguccauccccaacuucaaccaguacgaggccaugagcugcgacuucaacgggggcaagaucuccgugcaguacaaccucagccacgcguacgccguggacgccgccaaccacugcgggaccaucgcgaacggcguccugcagaccuucaugcggauggccuggggcggguccuacaucgcccuggacagcggcugcggguccugggacugcaucaugacgagcuaccaguaccucaucauccagaacaccaccugggaggaccacugccaguucucccgccccagccccaucggcuaccuggggcugcucagccagcggacccgcgacaucuacaucucccggcgccugcugggcacguucaccuggacccucagcgacuccgagggcaacgagacccccgggggcuacugccugacgcgguggaugcugaucgaggccgagcucaagugcuucgggaacaccgccguggcgaagugcaacgagaagcacgacgaggaguucugcgacaugcugcgccuguucgacuucaacaagcaggccauccggcgccucaagacccccgcccagaugagcauccagcugaucaacaaggccgugaacgcccugaucaacgaccagcucaucaugaagaaccaccuccgggacaucaugugcaucccguacugcaacuacuccaaguacugguaccugaaccacaccgucacggggaagaccagccugccccgcugcuggcugguguccaacggcagcuaccugaacgagacccacuucuccgacgacaucgagcagcaggcggacaacaugaucaccgagcuccugcagaaggaguacauggaccggcagggcaagacgccccuggggcucguggaccuguucgucuucagcaccuccuucuaccugaucagcaucuuccugcaccucaucaagaucccgacccaccgccacaucaccggcaagcccugccccaagccccaccggcugaaccacauggggaucugcuccugcggccuguacaagcacccgggggugcccgugaaguggaagcgcugaggacuaguuauaagacugacuagcccgaugggccucccaacgggcccuccuccccuccuugcaccgagauuaaucaaaggcucuuuucagagccaccaaaaaaaaaaaaaaaaaaaaaaaaaaaaaaaaaaaaaaaaaaaaaaaaaaaaaaaaaaaaaaaaagaauu

SEQ ID NO: 29358 - RNA, 1655 nt, Artificial Sequence
  mRNA product Design i-3 (hSL-A64-N5) comprising derived and/or modified sequence from LASV(ISTH2010-NIG-2012;Clade II)__AIT17482__GPCmut5 (opt1)
aggagaaagcuuaccaugggccagaucaucaccuucuuccaggaggugccccacgucaucgaggaggugaugaacaucgugcugaucgcccucagccugcuggccauccucaaggggaucuacaacgucgcgaccugcggccuguucgggcugguguccuuccuccugcugugcggccgcagcugcuccacgaccuacaaggggguguacgagcuccagacccuggagcuggacauggccagccucaacaugaccaugccgcuguccugcacgaagaacaacagccaccacuacaucauggucggcaacgagaccggccuggagcucacccugaccaacacguccaucaucaaccacaaguucugcaaccugagcgacgcccacaagaagaaccucuacgaccacgcccugauguccaucaucagcaccuuccaccuguccauccccaacuucaaccaguacgaggccaugagcugcgacuucaacgggggcaagaucuccgugcaguacaaccucagccacgcguacgccguggacgccgccaaccacugcgggaccaucgcgaacggcguccugcagaccuucaugcggauggccuggggcggguccuacaucgcccuggacagcggcugcggguccugggacugcaucaugacgagcuaccaguaccucaucauccagaacaucaccugggaggaccacugccaguucucccgccccagccccaucggcuaccuggggcugcucagccagcggacccgcgacaucuacaucucccggcgccugcugggcaccuucacguggacccucagcgacuccgagggcaacgagacccccgggggcuacugccugacccgguggaugcugaucgaggccgagcucaagugcuucgggaacacggccguggcgaagugcaacgagaagcacgacgaggaguucugcgacaugcugcgccuguucgacuucaacaagcaggccauccggcgccucaagacccccgcccagaugagcauccagcugaucaacaaggccgugaacgcccugaucaacgaccagcucaucaugaagaaccaccuccgggacaucaugugcauccccuacugcaacuacuccaaguacugguaccugaaccacaccgucaccgggaagacgagccugccccgcugcuggcugguguccaacggcagcuaccugaacgagacccacuucuccgacgacaucgagcagcaggcggacaacaugaucaccgagcuccugcagaaggaguacaucgaccggcagggcaagaccccgcuggggcucguggaccuguucgucuucagcacguccuucuaccugaucagcaucuuccugcaccucgugaagaucccgacccaccgccacguggucggcaagcccugccccaagccccaccggcugaaccacauggggaucugcuccugcggccuguacaagcacccgggggugcccgugaaguggaagcgcugaggacuaguuauaagacugacuagcccgaugggccucccaacgggcccuccuccccuccuugcaccgagauuaaucaaaggcucuuuucagagccaccaaaaaaaaaaaaaaaaaaaaaaaaaaaaaaaaaaaaaaaaaaaaaaaaaaaaaaaaaaaaaaaaagaauu

SEQ ID NO: 29359 - RNA, 1655 nt, Artificial Sequence
  mRNA product Design i-3 (hSL-A64-N5) comprising derived and/or modified sequence from LASV(Lassa virus/H.sapiens-wt/NGA/2015/ISTH_0543;Clade II)__AVO03639__GPCmut5 (opt1)
aggagaaagcuuaccaugggccagaucaucaccuucuuccaggaggugccccacgucaucgaggaggugaugaacaucgugcugaucgcccucagccugcuggccauccucaaggggaucuacaacgucgcgaccugcggccuguucgggcugguguccuuccuccugcugugcggccgcagcugcuccacgaccuacaaggggguguacgagcuccagacccuggagcuggacauggccaaccucaacaugaccaugccgcugagcugcacgaagaacaacucccaccacuacaucauggucggcaacgagaccggccuggagcucacccugaccaacacgagcaucaucaaccacaaguucugcaaccuguccgacgcccacaagaagaaccucuacgaccacgcccugaugagcaucaucuccaccuuccaccugagcauccccaacuucaaccaguacgaggccauguccugcgacuucaacgggggcaagaucagcgugcaguacaaccucucccacaccuacgcgguggacgccgccaaccacugcgggaccaucgccaacggcguccugcagacguucaugcggauggcguggggcgggagcuacaucgcccuggacuccggcugcgggagcugggacugcaucaugaccuccuaccaguaccucgugauccagaacaccaccugggaggaccacugccaguucagccgccccucccccaucggcuaccuggggcugcucagccagcggacgcgcgacaucuacaucagccggcgccugcugggcaccuucaccuggacccucuccgacagcgagggcaacgagacgcccgggggcuacugccugacccgguggaugcugaucgaggccgagcucaagugcuucgggaacaccgccguggccaagugcaacgagaagcacgacgaggaguucugcgacaugcugcgccuguucgacuucaacaagcaggcgauccggcgccucaagacccccgcccagauguccauccagcugaucaacaaggccgucaacgcccugaucaacgaccagcucaucaugaagaaccaccuccgggacaucaugugcauccccuacugcaacuacagcaaguacugguaccugaaccacacggugaccgggaagaccucccugccccgcugcuggcuggugagcaacggcuccuaccugaacgagacccacuucagcgacgacaucgagcagcaggccgacaacaugaucacggagcuccugcagaaggaguacaucgaccggcagggcaagaccccgcuggggcucgucgaccuguucguguucuccaccagcuucuaccugaucuccaucuuccugcaccucgugaagaucccgacccaccgccacaucacgggcaagcccugccccaagccccaccggcugaaccacauggggaucugcagcugcggccuguacaagcacccggggguccccgugaaguggaagcgcugaggacuaguuauaagacugacuagcccgaugggccucccaacgggcccuccuccccuccuugcaccgagauuaaucaaaggcucuuuucagagccaccaaaaaaaaaaaaaaaaaaaaaaaaaaaaaaaaaaaaaaaaaaaaaaaaaaaaaaaaaaaaaaaaagaauu

SEQ ID NO: 29360 - RNA, 1655 nt, Artificial Sequence
  mRNA product Design i-3 (hSL-A64-N5) comprising derived and/or modified sequence from LASV(Lassa virus/H.sapiens-wt/NGA/2016/ISTH_0009;Clade II)__AVO03571__GPCmut5 (opt1)
aggagaaagcuuaccaugggccagaucaucaccuucuuccaggaggugccccacgucaucgaggaggugaugaacaucgugcugaucgcccucagccugcuggccauccucaaggggaucuacaacgucgcgaccugcggccugcuggggcucguguccuuccugcugcucugcggccgcagcugcuccacgaccuacaaggggguguacgagcugcagacccuggagcucgacauggccagccugaacaugaccaugccgcuguccugcacgaagaacaacagccaccacuacaucauggucggcaacgagaccggccucgagcugacccugaccaacacguccaucaucaaccacaaguucugcaaccucagcgacgcccacaagaagaaccuguacgaccacgcccugauguccaucaucagcaccuuccaccucuccauccccaacuucaaccaguacgaggccaugagcugcgacuucaacgggggccggaucuccgugcaguacaaccugagccacuccuacgcgguggacgccgccaaccacugcgggaccaucgccaacggcguccugcagaccuucaugcgcauggcguggggcgggagcuacaucgcccucgacuccggcugcgggagcugggacugcaucaugacguccuaccaguaccugaucauccagaacaccaccugggaggaccacugccaguucagccggcccagccccaucggcuaccuggggcuccugucccagcgcacccgggacaucuacaucagccgccggcugcucggcacguucaccuggacccuguccgacagcgagggcaacgagacccccgggggcuacugccugacgcgcuggaugcucaucgaggccgagcugaagugcuucgggaacaccgccguggccaagugcaacgagaagcacgacgaggaguucugcgacaugcugcggcuguucgacuucaacaagcaggcgauccgccggcugaagacccccgcccagauguccauccagcugaucaacaaggccgugaacgcccucaucaacgaccagcugaucaugaagaaccaccuccgcgacaucaugugcaucccguacugcaacuacagcaaguacugguaccucaaccacaccgucacggggaagaccucccugccccggugcuggcuggugagcaacggcuccuaccucaacgagacccacuucagcgacgacaucgagcagcaggccgacaacaugaucaccgagcugcugcagaaggaguacaucgaccgccagggcaagacgccccucgggcugguggaccuguucgucuucuccaccagcuucuaccugaucuccaucuuccuccaccuggugaagaucccgacccaccggcacaucaccggcaagcccugccccaagccccaccgccugaaccacauggggaucugcagcugcggccucuacaaccacccgggggugcccgucaaguggaagcggugaggacuaguuauaagacugacuagcccgaugggccucccaacgggcccuccuccccuccuugcaccgagauuaaucaaaggcucuuuucagagccaccaaaaaaaaaaaaaaaaaaaaaaaaaaaaaaaaaaaaaaaaaaaaaaaaaaaaaaaaaaaaaaaaagaauu

SEQ ID NO: 29361 - RNA, 1655 nt, Artificial Sequence
  mRNA product Design i-3 (hSL-A64-N5) comprising derived and/or modified sequence from LASV(Lassa virus/H.sapiens-wt/NGA/2016/ISTH_0017;Clade II)__AVO03567__GPCmut5 (opt1)
aggagaaagcuuaccaugggccagaucaucaccuucuuccaggaggugccccacgucaucgaggaggugaugaacaucgugcugaucgcccucagccugcuggccauccucaaggggaucuacaacgucgcgaccugcggccuguucgggcugguguccuuccuccugcugugcggccgcagcugcuccacgaccuacaaggggguguacgagcuccagacccuggagcuggacauggccagccucaacaugaccaugccgcuguccugcacgaagaacaacagccaccacuacaucauggucggcaacgagaccggccuggagcucacccugaccaacacguccaucaucaaccacaaguucugcaaccugagcgacgcccacaagaagaaccucuacgaccacgcccugauguccaucaucagcaccuuccaccuguccauccccaacuucaaccaguacgaggccaugagcugcgacuucaacgggggcaagaucuccgugcaguacaaccucagccacaccuacgcgaucgacgccgccaaccacugcgggaccaucgccaacggcgugcugcagacguucaugcggauggcguggggcggguccuacaucgcccuggacagcggcugcggguccugggacugcaucaugaccagcuaccaguaccucaucauccagaacaccaccugggaggaccacugccaguucucccgccccagccccaucggcuaccuggggcugcucagccagcggacgcgcgacaucuacaucucccggcgccugcugggcaccuucaccuggacccucagcgacuccgagggcaacgagacgcccgggggcuacugccugacccgguggaugcugaucgaggccgagcucaagugcuucgggaacaccgccgucgccaagugcaacgagaagcacgacgaggaguucugcgacaugcugcgccuguucgacuucaacaagcaggcgauccggcgccucaagacccccgcccagaugagcauccagcugaucaacaaggccgugaacgcccugaucaacgaccagcucaucaugaagaaccaccuccgggacaucaugugcauccccuacugcaacuacuccaaguacugguaccugaaccacacggugaccgggaagaccagccugccccgcugcuggcuggucuccaacggcagcuaccugaacgagacccacuucuccgacgacaucgagcagcaggccgacaacaugaucacggagcuccugcagaaggaguacauggaccggcagggcaagaccccgcuggggcucguggaccuguucguguucagcaccuccuucuaccugaucagcaucuuccugcaccucguccgcaucccgacccaccggcacgugaucggcaagcccugccccaagccccaccgccugaaccacauggggaucugcuccugcggccuguacaagcacccgggggugcccgucaaguggaagcggugaggacuaguuauaagacugacuagcccgaugggccucccaacgggcccuccuccccuccuugcaccgagauuaaucaaaggcucuuuucagagccaccaaaaaaaaaaaaaaaaaaaaaaaaaaaaaaaaaaaaaaaaaaaaaaaaaaaaaaaaaaaaaaaaagaauu

SEQ ID NO: 29362 - RNA, 1655 nt, Artificial Sequence
  mRNA product Design i-3 (hSL-A64-N5) comprising derived and/or modified sequence from LASV(Lassa virus/H.sapiens-wt/NGA/2018/ISTH_0959;Clade II)__AVV65099__GPCmut5 (opt1)
aggagaaagcuuaccaugggccagaucaucaccuucuuccaggaggugccccacgucaucgaggaggugaugaacaucgugcugaucgcccucagccugcuggccauccucaaggggaucuacaacgucgugaccugcggccuguucgggcugguguccuuccuccugcugugcggccgcagcugcuccacgaccuacaagggggucuacgagcuccagacccuggagcuggacauggcgagccucaacaugaccaugccgcuguccugcacgaagaacaacagccaccacuacaucauggugggcaacgagaccggccuggagcucacccugaccaacacguccaucaucaaccacaaguucugcaaccugagcgacgcccacaagaagaaccucuacgaccacgcccugauguccaucaucagcaccuuccaccuguccauccccaacuucaaccaguacgaggccaugagcugcgacuucaacgggggcaagaucuccgugcaguacaaccucagccacgccuacgcgaucgacgccgccaaccacugcgggaccaucgccaacggcguccugcagaccuucaugcggauggcguggggcggguccuacaucgcccuggacagcggcugcggguccugggacugcaucaugacgagcuaccaguaccucaucauccagaacaccaccugggaggaccacugccaguucucccgccccagccccaucggcuaccuggggcugcucagccagcggacccgcgacaucuacaucucccggcgccugcugggcacguucaccuggacccucagcgacuccgagggcaacgagacccccgggggcuacugccugacgcgguggaugcugaucgaggccgagcucaagugcuucgggaacaccgccguggccaagugcaacgagaagcacgacgaggaguucugcgacaugcugcgccuguucgacuucaacaagcaggcgauccggcgccucaagacccccgcccagaugagcauccagcugaucaacaaggccgugaacgcccugaucaacgaccagcucaucaugaagaaccaccuccgggacaucaugugcaucccguacugcaacuacuccaaguacugguaccugaaccacaccgucacggggaagaccagccugccccgcugcuggcugguguccaacggcagcuaccugaacgagacccacuucuccgacgacaucgagcagcaggccgacaacaugaucaccgagcuccugcagaaggaguacaucgaccggcagggcaagacgccccuggggcucguggaccuguucgucuucagcaccuccuucuaccugaucagcaucuuccugcaccucgugaagaucccgacccaccgccacgugaucggcaagcccugccccaagccccaccggcugaaccacauggggaucugcuccugcggccuguacaagcacccggggguccccgugaaguggaagcgcugaggacuaguuauaagacugacuagcccgaugggccucccaacgggcccuccuccccuccuugcaccgagauuaaucaaaggcucuuuucagagccaccaaaaaaaaaaaaaaaaaaaaaaaaaaaaaaaaaaaaaaaaaaaaaaaaaaaaaaaaaaaaaaaaagaauu

SEQ ID NO: 29363 - RNA, 1655 nt, Artificial Sequence
  mRNA product Design i-3 (hSL-A64-N5) comprising derived and/or modified sequence from LASV(LASV003-NIG-2008;Clade II)__AIT17580__GPCmut5 (opt1)
aggagaaagcuuaccaugggccagaucaucaccuucuuccaggaggugccccacgucaucgaggaggugaugaacaucgugcugaucgcccucagccugcuggccauccucaaggggaucuacaacgucgcgaccugcggccuguucgggcugguguccuuccuccugcugugcggccgcagcugcuccacgaccuacaaggggguguacgagcuccagacccuggagcuggacauggccagccucaacaugaccaugccgcuguccugcacgaagaacaacagccaccacuacaucauggucggcaacgagaccggccuggagcucacccugaccaacacguccaucaucaaccacaaguucugcaaccugagcgacgcccacaagaagaaccucuacgaccacgcccugauguccaucaucagcaccuuccaccuguccauccccaacuucaaccaguacgaggccaugagcugcgacuucaacgggggcaagaucuccgugcaguacaaccucagccacaccuacgcgguggacgccgccaaccacugcgggaccaucgccaacggcguccugcagacguucaugcggauggcguggggcggguccuacaucgcccuggacagcggcugcggguccugggacugcaucaugaccagcuaccaguaccucaucauccagaacaccaccugggaggaccacugccaguucucccgccccagccccaucggcuaccuggggcugcucagccagcggacgcgcgacaucuacaucucccggcgccugcugggcaccuucaccuggacccucagcgacuccgagagcaacgagacgccgggcggguacugccugacccgguggaugcugaucgaggccgagcucaagugcuucggcaacaccgccguggccaagugcaacgagaagcacgacgaggaguucugcgacaugcugcgccuguucgacuucaacaagcaggcgauccggcgccucaaggcccccgcccagauguccauccagcugaucaacaaggccgugaacgcccugaucaacgaccagcucaucaugaagaaccaccuccgggacaucaugugcauccccuacugcaacuacagcaaguacugguaccugaaccacaccgucacgggccgcaccucccugccccggugcuggcuggugagcaacggguccuaccugaacgagacccacuucagcgacgacaucgagcagcaggcggacaacaugaucaccgagcuccugcagaaggaguacauggaccgccagggcaagacgccccugggccucguggaccuguucgucuucuccaccagcuucuaccugaucuccaucuuccugcaccucgugaagaucccgacccaccggcacgugaucgggaagcccugccccaagccccaccgccugaaccacaugggcaucugcagcugcgggcuguacaagcacccgggcguccccgugaaguggaagcggugaggacuaguuauaagacugacuagcccgaugggccucccaacgggcccuccuccccuccuugcaccgagauuaaucaaaggcucuuuucagagccaccaaaaaaaaaaaaaaaaaaaaaaaaaaaaaaaaaaaaaaaaaaaaaaaaaaaaaaaaaaaaaaaaagaauu

SEQ ID NO: 29364 - RNA, 1655 nt, Artificial Sequence
  mRNA product Design i-3 (hSL-A64-N5) comprising derived and/or modified sequence from LASV(LASV035-NIG-2009;Clade II)__AIT17588__GPCmut5 (opt1)
aggagaaagcuuaccaugggccagaucaucaccuucuuccaggaggugccccacgucaucgaggaggugaugaacaucgugcugaucgcccucagccugcuggccauccucaaggggaucuacaacgucgcgaccugcggccuguucgggcugguguccuuccuccugcugugcggccgcagcugcuccacgaccuacaaggggguguacgagcuccagacccuggagcuggacauggccagccucaacaugaccaugccgcuguccugcacgaagaacaacagccaccacuacaucauggucggcaacgagaccggccuggagcucacccugaccaacacguccaucaucaaccacaaguucugcaaccugagcgacgcccacaagaagaaccucuacgaccacgcccugauguccaucaucagcaccuuccaccuguccauccccaacuucaaccaguacgaggccaugagcugcgacuucaacgggggcaagaucuccgugcaguacaaccucagccacgcguacgccguggacgccgccaaccacugcgggaccaucgcgaacggcguccugcagaccuucaugcggauggccuggggcggguccuacaucgcccuggacagcggcugcggguccugggacugcaucaugacgagcuaccaguaccucaucauccagaacaccaccugggaggaccacugccaguucucccgccccagccccaucggcuaccuggggcugcucagccagcggacccgcgacaucuacaucucccggcgccugcugggcacguucaccuggacccucagcgacuccgagggcaacgagacccccgggggcuacugccugacgcgguggaugcugaucgaggccgagcucaagugcuucgggaacaccgccguggcgaagugcaacgagaagcacgacgaggaguucugcgacaugcugcgccuguucgacuucaacaagcaggccauccggcgccucaaggcccccgcccagaugagcauccagcugaucaacaaggccgugaacgcgcugaucaacgaccagcucaucaugaagaaccaccuccgggacaucaugugcauccccuacugcaacuacuccaaguacugguaccugaaccacaccgucaccgggaagacgagccugccccgcugcuggcugguguccaacggcagcuaccugaacgagacccacuucuccgacgacaucgagcagcaggccgacaacaugaucaccgagcuccugcagaaggaguacaucgaccggcagggcaagaccccgcuggggcucguggaccuguucgucuucagcacguccuucuaccugaucagcaucuuccugcaccucgugaagaucccgacccaccgccacgugaucggcaagcccugccccaagccccaccggcugaaccacauggggaucugcuccugcggccuguacaagcacccggggguccccgugaaguggaagcgcugaggacuaguuauaagacugacuagcccgaugggccucccaacgggcccuccuccccuccuugcaccgagauuaaucaaaggcucuuuucagagccaccaaaaaaaaaaaaaaaaaaaaaaaaaaaaaaaaaaaaaaaaaaaaaaaaaaaaaaaaaaaaaaaaagaauu

SEQ ID NO: 29365 - RNA, 1655 nt, Artificial Sequence
  mRNA product Design i-3 (hSL-A64-N5) comprising derived and/or modified sequence from LASV(LASV1000-NIG-2009;Clade II)__AIT17782__GPCmut5 (opt1)
aggagaaagcuuaccaugggccagaucaucaccuucuuccaggaggugccccacgucaucgaggaggugaugaacaucgugcugaucgcccucagccugcuggccauccucaaggggaucuacaacgucgcgaccugcggccuguucgggcugguguccuuccuccugcugugcggccgcagcugcuccacgaccuacaaggggguguacgagcuccagacccuggagcuggacauggccagccucaacaugaccaugccgcuguccugcacgaagaacaacagccaccacuacaucauggucggcaacgagaccggccuggagcucacccugaccaacacguccaucaucaaccacaaguucugcaaccugagcgacgcccacaagaagaaccucuacgaccacgcccugauguccaucaucagcaccuuccaccuguccauccccaacuucaaccaguacgaggccaugagcugcgacuucaacgggggcaagaucuccgugcaguacaaccucagccacaccuacgcgguggacgccgccaaccacugcgggaccaucgccaacggcguccugcagacguucaugcggauggcguggggcggguccuacaucgcccuggacagcggcugcggguccugggacugcaucaugaccagcuaccaguaccucaucauccagaacaccaccugggaggaccacugccaguucucccgccccagccccaucggcuaccuggggcugcucagccagcggacgcgcgacaucuacaucucccggcgccugcugggcaccuucaccuggacccucagcgacuccgagggcaacgagacgcccgggggcuacugccugacccgguggaugcugaucgaggccgagcucaagugcuucgggaacaccgccguggccaagugcaacgagaagcacgacgaggaguucugcgacaugcugcgccuguucgacuucaacaagcaggcgaucaagcggcucaagacccccgcccagaugagcauccagcugaucaacaaggccgugaacgcccugaucaacgaccagcucaucaugaagaaccaccuccgcgacaucaugugcauccccuacugcaacuacuccaaguacugguaccugaaccacacggucaccgggaagaccagccugccccggugcuggcugguguccaacggcagcuaccugaacgagacccacuucuccgacgacaucgagcagcaggccgacaacaugaucacggagcuccugcagaaggaguacaucgaccgccagggcaagaccccgcuggggcucguggaccuguucgucuucagcaccuccuucuaccugaucagcaucuuccugcaccucgugaagaucccgacccaccggcacguggucggcaagcccugccccaagccccaccgccugaaccacauggggaucugcuccugcggccuguacaagcacccgggggugcccgugaaguggaagcggugaggacuaguuauaagacugacuagcccgaugggccucccaacgggcccuccuccccuccuugcaccgagauuaaucaaaggcucuuuucagagccaccaaaaaaaaaaaaaaaaaaaaaaaaaaaaaaaaaaaaaaaaaaaaaaaaaaaaaaaaaaaaaaaaagaauu

SEQ ID NO: 29366 - RNA, 1655 nt, Artificial Sequence
  mRNA product Design i-3 (hSL-A64-N5) comprising derived and/or modified sequence from LASV(LASV221-NIG-2010;Clade II)__AIT17624__GPCmut5 (opt1)
aggagaaagcuuaccaugggccagaucaucaccuucuuccaggaggugccccacgucaucgaggaggugaugaacaucgugcugaucgcccucagccugcuggccauccucaaggggaucuacaacgucgcgaccugcggccuguucgggcugguguccuuccuccugcugugcggccgcagcugcuccacgaccuacaaggggguguacgagcuccagacccuggagcuggacauggccagccucaacaugaccaugccgcuguccugcacgaagaacaacagccaccacuacaucauggucggcaacgagaccggccuggagcucacccugaccaacacguccaucaucaaccacaaguucugcaaccugagcgacgcccacaagaagaaccucuacgaccacgcccugauguccaucaucagcaccuuccaccuguccauccccaacuucaaccaguacgaggccaugagcugcgacuucaacgggggcaagaucuccgugcaguacaaccucagccacaccuacgcgaucgacgccgccaaccacugcgggaccaucgccaacggcgugcugcagacguucaugcggauggcguggggcggguccuacaucgcccuggacagcggcugcggguccugggacugcaucaugaccagcuaccaguaccucaucauccagaacaccaccugggaggaccacugccaguucucccgccccagccccaucggcuaccuggggcugcucagccagcggacgcgcgacaucuacaucucccggcgccugcugggcaccuucaccuggacccucagcgacuccgagggcaacgagacgcccgggggcuacugccugacccgguggaugcugaucgaggccgagcucaagugcuucgggaacaccgccgucgccaagugcaacgagaagcacgacgaggaguucugcgacaugcugcgccuguucgacuucaacaagcaggcgauccggcgccucaagacccccgcccagaugagcauccagcugaucaacaaggccgugaacgcccugaucaacgaccagcucaucaugaagaaccaccuccgggacaucaugugcauccccuacugcaacuacuccaaguacugguaccugaaccacacggugaccgggaagaccagccugccccgcugcuggcuggucuccaacggcagcuaccugaacgagacccacuucuccgacgacaucgagcagcaggccgacaacaugaucacggagaugcuccagaaggaguacauggaccggcagggcaagaccccgcuggggcugguggaccucuucguguucagcaccuccuucuaccugaucagcaucuuccugcaccuggucaagaucccgacccaccgccacgugaucggcaagcccugccccaagccccaccggcucaaccacauggggaucugcuccugcggccuguacaagcacccgggggugcccgucaaguggaagcgcugaggacuaguuauaagacugacuagcccgaugggccucccaacgggcccuccuccccuccuugcaccgagauuaaucaaaggcucuuuucagagccaccaaaaaaaaaaaaaaaaaaaaaaaaaaaaaaaaaaaaaaaaaaaaaaaaaaaaaaaaaaaaaaaaagaauu

SEQ ID NO: 29367 - RNA, 1655 nt, Artificial Sequence
  mRNA product Design i-3 (hSL-A64-N5) comprising derived and/or modified sequence from LASV(LASV237-NIG-2010;Clade II)__AIT17638__GPCmut5 (opt1)
aggagaaagcuuaccaugggccagaucaucaccuucuuccaggaggugccccacgucaucgaggaggugaugaacaucgugcugaucgcccucagccugcuggccauccucaaggggaucuacaacgucgcgaccugcggccuguucgggcugguguccuuccuccugcugugcggccgcagcugcuccacgaccuacaaggggguguacgagcuccagacccuggagcuggacauggccagccucaacaugaccaugccgcuguccugcacgaagaacaacagccaccacuacaucauggucggcaacgagaccggccuggagcucacccugaccaacacguccaucaucaaccacaaguucugcaaccugagcgacgcccacaagaaggaccucuacgaccacgcccugauguccaucaucagcaccuuccaccuguccauccccaacuucaaccaguacgaggccaugagcugcgacuucaacgggggcaagaucuccgugcaguacaaccucagccacaccuacgcgguggacgccgccaaccacugcgggaccaucgccaacggcguccugcagacguucaugcggauggcguggggcggguccuacaucgcccuggacagcggcugcggguccugggacugcaucaugaccagcuaccaguaccucaucauccagaacaccaccugggaggaccacugccaguucucccgccccagccccaucggcuaccuggggcugcucagccagcggacgcgcgacaucuacaucucccggcgccugcugggcaccuucaccuggacccucagcgacuccgagggcaacgagacgcccgggggcuacugccugacccgguggaugcugaucgaggccgagcucaagugcuucgggaacaccgccguggccaagugcaacgagaagcacgacgaggaguucugcgacaugcugcgccuguucgacuucaacaagcaggcgauccggcgccucaagacccccgcccagaugagcauccagcugaucaacaaggccgugaacgcccugaucaacgaccagcucaucaugaagaaccaccuccgggacaucaugugcauccccuacugcaacuacuccaaguacugguaccugaaccacacggucaccgggaagaccagccugccccgcugcuggcugguguccaacggcagcuaccugaacgagacccacuucuccgacgacaucgagcagcaggccgacaacaugaucacggagcuccugcagaaggaguacauggaccggcagggcaagaccccgcuggggcucguggaccuguucgucuucagcaccuccuucuaccugaucagcaucuuccugcaccucaucaagaucccgacccaccgccacaucacgggcaagcccugccccaagccccaccggcugaaccacauggggaucugcuccugcggccuguacaagcacccgggggugcccgugaaguggaagcgcugaggacuaguuauaagacugacuagcccgaugggccucccaacgggcccuccuccccuccuugcaccgagauuaaucaaaggcucuuuucagagccaccaaaaaaaaaaaaaaaaaaaaaaaaaaaaaaaaaaaaaaaaaaaaaaaaaaaaaaaaaaaaaaaaagaauu

SEQ ID NO: 29368 - RNA, 1655 nt, Artificial Sequence
  mRNA product Design i-3 (hSL-A64-N5) comprising derived and/or modified sequence from LASV(LASV253-NIG-2011;Clade II)__AIT17670__GPCmut5 (opt1)
aggagaaagcuuaccaugggccagaucaucaccuucuuccaggaggugccccacgucaucgaggaggugaugaacaucgugcugaucgcccucagccugcuggccauccucaaggggaucuacaacgucgcgaccugcggccuguucgggcugguguccuuccuccugcugugcggccgcagcugcuccacgaccuacaaggggguguacgagcuccagacccuggagcuggacauggccagccucaacaugaccaugccgcuguccugcacgaagaacaacagccaccacuacaucauggucggcaacgagaccggccuggagcucacccugaccaacacguccaucaucaaccacaaguucugcaaccugagcgacgcccacaagaagaaccucuacgaccacgcccugauguccaucaucagcaccuuccaccuguccauccccaacuucaaccaguacgaggccaugagcugcgacuucaacgggggcaagaucuccgugcaguacaaccucagccacaccuacgcgguggacgccgccaaccacugcgggaccaucgccaacggcguccugcagacguucaugcggauggcguggggcggguccuacaucgcccuggacagcggcugcggguccugggacugcaucaugaccagcuaccaguaccucaucauccagaacaccaccugggaggaccacugccaguucucccgccccagccccaucggcuaccuggggcugcucagccagcggacgcgcgacaucuacaucucccggcgccugcugggcaccuucaccuggacccucagcgacuccgagggcaacgagacgcccgggggcuacugccugacccgguggaugcugaucgaggccgagcucaagugcuucgggaacaccgccguggccaagugcaacgagaagcacgacgaggaguucugcgacaugcugcgccuguucgacuucaacaagcaggcgauccggcgccucaaggcccccgcccagaugagcauccagcugaucaacaaggccgugaacgcccugaucaacgaccagcucaucaugaagaaccaccuccgggacaucaugugcaucccguacugcaacuacuccaaguacugguaccugaaccacaccgucacggggcgcaccagccugccccggugcuggcugguguccaacggcagcuaccugaacgagacccacuucuccgacgacaucgagcagcaggcggacaacaugaucaccgagcuccugcagaaggaguacaucgaccgccagggcaagacgccccuggggcucguggaccuguucgucuucagcaccuccuucuaccugaucagcaucuuccugcaccucgugaagaucccgacccaccggcacaucaucggcaagcccugccccaagccccaccgccugaaccacauggggaucugcuccugcggccuguacaagcacccgggggugcccgucaaguggaagcggugaggacuaguuauaagacugacuagcccgaugggccucccaacgggcccuccuccccuccuugcaccgagauuaaucaaaggcucuuuucagagccaccaaaaaaaaaaaaaaaaaaaaaaaaaaaaaaaaaaaaaaaaaaaaaaaaaaaaaaaaaaaaaaaaagaauu

SEQ ID NO: 29369 - RNA, 1655 nt, Artificial Sequence
  mRNA product Design i-3 (hSL-A64-N5) comprising derived and/or modified sequence from LASV(LASV254-NIG-2011;Clade II)__AIT17674__GPCmut5 (opt1)
aggagaaagcuuaccaugggccagaucaucaccuucuuccaggaggugccccacgucaucgaggaggugaugaacaucgugcugaucgcccucagccugcuggccauccucaaggggaucuacaacgucgcgaccugcggccuguucgggcugguguccuuccuccugcugugcggccgcagcugcuccacgaccuacaaggggguguacgagcuccagacccuggagcuggacaugaccaaccucaacaugacgaugccgcugagcugcaccaagaacaacucccaccacuacaucauggucggcaacgagaccggccuggagcucacccugacgaacaccagcaucaucaaccacaaguucugcaaccuguccgacgcccacaagaagaaccucuacaaccacgcccugaugagcaucaucuccaccuuccaccugagcauccccaacuucaaccaguacgaggccauguccugcgacuucaacgggggcaagaucagcgugcaguacaaccucucccacagcuacgccguggacgcggccaaccacugcgggaccaucgccaacggcguccugcagacguucaugcggauggccuggggcggguccuacaucgcgcuggacagcggcugcgggaacugggacugcaucaugaccuccuaccaguaccucaucauccagaacaccaccugggaggaccacugccaguucagccgccccucccccaucggcuaccuggggcugcucagccagcggacgcgcgacaucuacaucagccggcgccugcugggcaccuucaccuggacccucuccgacagcgagggcaacgagacgcccgggggcuacugccugacccgguggaugcugaucgaggccgagcucaagugcuucgggaacaccgccguggccaagugcaacgagaagcacgacgaggaguucugcgacaugcugcgccuguucgacuucaacaagcaggccauccggcgccucaagacccccgcgcaggccaacauccagcugaucaacaaggccgugaacgcccugaucaacgaccagcucaucaugaagaaccaccuccgggacaucaugugcauccccuacugcaacuacuccaaguacugguaccugaaccacacggucaccgggaagaccagccugccccgcugcuggcugguguccaacggcagcuaccugaacgagacccacuucuccgacgacaucgagcagcaggccgacaacaugaucacggagcuccugcagaaggaguacauggaccggcagggcaagaccccgcuggggcucguggaccuguucgucuucagcaccuccuucuaccugaucagcaucuuccugcaccucgugaagaucccgacccaccgccacgugaucggcaagcccugccccaagccccaccggcugaaccacauggggaucugcuccugcggccuguacaagcacccggggguccccgugaaguggaagcgcugaggacuaguuauaagacugacuagcccgaugggccucccaacgggcccuccuccccuccuugcaccgagauuaaucaaaggcucuuuucagagccaccaaaaaaaaaaaaaaaaaaaaaaaaaaaaaaaaaaaaaaaaaaaaaaaaaaaaaaaaaaaaaaaaagaauu

SEQ ID NO: 29370 - RNA, 1655 nt, Artificial Sequence
  mRNA product Design i-3 (hSL-A64-N5) comprising derived and/or modified sequence from LASV(Nig08-A19;Clade III)__ADU56618__GPCmut5 (opt1)
aggagaaagcuuaccaugggccagaucgugaccuucuuccaggaggucccccacgugaucgaggaggugaugaacaucguccugaucgcccucagcauccuggccauccugaaggggcucuacaacaucgcgaccugcggccugaucgggcuggugacguuccuccugcuguccggccgcagcugcuccaugaccuacaaggggguguacgagcuccagacccuggagcugaacaugaacacccucaacaugacgaugccgcugagcugcaccaagaacaacucccaccacuacaucauggucggcaacgagaccggccuggagcucacccugacgaacaccagccugcuccaccacaaguucugcaaccuguccgacgcccacaagaagaaccuguacgaccacacccucaugagcaucaucuccaccuuccaccugagcauccccaacuucaaccaguacgaggccauguccugcgacuucaacgggggcaagaucacggugcaguacaaccugagccacuccuacgccaucgacgccgcgaaccacugcgggaccguggccaacggcguccuccagaccuucaugcggauggccuggggcgggagcuacaucgcccuggacuccggcugcgggaagugggacugcaucaugaccagcuaccaguaccugaucauccagaacacgaccugggaggaccacugccaguucucccggcccagccccaucggcuaccucgggcugcugucccagcgcacccgggacaucuacaucagccgccggcuccugggcaccuucacguggacccugagcgacuccgagggcaacgagacccccgggggcuacugccucacccgcuggaugcugaucgaggcggagcugaagugcuucgggaacacggccguggccaagugcaacgagaagcacgacgaggaguucugcgacaugcuccggcuguucgacuucaacaagcaggccauccgccggcugaaggcccccgcgcagaugagcauccagcucaucaacaaggccgugaacgcccugaucaacgaccagcugaucaugaagaaccaccuccgcgacaucaugugcauccccuacugcaacuacuccaaguacugguaccugaaccacaccagcaccgggcggaccucccugccccgcugcuggcucgucagcaacggcuccuaccugaacgagacgcacuucagcgacgacaucgagcagcaggccgacaacaugaucaccgagaugcugcagaaggaguaccucgaccggcagggcaagaccccgcuggggcugguggaccuguucguguucuccaccagcuucuaccucaucuccaucuuccugcaccuggucaagaucccgacgcaccgccacaucgugggcaagcccugccccaagccccaccggcucaaccacauggggaucugcagcugcggccuguacaagcagccgggggugcccguccgcuggaagcggugaggacuaguuauaagacugacuagcccgaugggccucccaacgggcccuccuccccuccuugcaccgagauuaaucaaaggcucuuuucagagccaccaaaaaaaaaaaaaaaaaaaaaaaaaaaaaaaaaaaaaaaaaaaaaaaaaaaaaaaaaaaaaaaaagaauu

SEQ ID NO: 29371 - RNA, 1658 nt, Artificial Sequence
  mRNA product Design i-3 (hSL-A64-N5) comprising derived and/or modified sequence from LASV(G1180-SLE-2010;Clade IV)__AIT17168__GPCmut5 (opt1)
aggagaaagcuuaccaugggccagaucgugaccuucuuccaggaggucccccacgugaucgaggaggugaugaacaucguccugaucgcccucagcauccuggccgugcugaaggggcucuacaacuucgcgaccugcggccugguggggcugcucaccuuccugcugcucugcggccgcuccugcaccgccagccgguacaagggggucuacgagcugcagacccuggagcucaacauggagacccugaacaugacgaugccgcuguccugcaccaagaacaacagccaccacuacaucauggugggcaacgagaccggccucgagcugacccugacgaacaccuccaucaucaaccacaaguucugcaaccucagcgacgcccacaagaagaaccuguacgaccacgcccugauguccaucaucagcaccuuccaccucuccauccccaacuucaaccaguacgaggccaugagcugcgacuucaacgggggcaagaucuccgugcaguacaaccugagccacuccuacgcgggggacgccgccaaccacugcggcaccgucgccaacggggugcugcagacguucaugcgcauggcguggggcggcagcuacaucgcccucgacuccgggugcggcagcugggacugcaucaugaccuccuaccaguaccugaucauccagaacaccaccugggaggaccacugccaguucagccggcccucccccaucggguaccugggccuccugagccagcgcacgcgggacaucuacaucagccgccggcugcucggcaccuucaccuggacccuguccgacagcgaggggaaggacacgccgggcggguacugccugacccgcuggaugcucaucgaggccgagcugaagugcuucggcaacaccgccguggccaagugcaacgagaagcacgacgaggaguucugcgacaugcugcggcuguucgacuucaacaagcaggcgauccagcgccugaaggcccccgcccagauguccauccagcugaucaacaaggccgucaacgcccucaucaacgaccagcugaucaugaagaaccaccuccgggacaucaugugcauccccuacugcaacuacagcaaguacugguaccucaaccacaccacgaccggcaagaccucccugcccaagugcuggcuggugagcaacggcuccuaccucaacgagacccacuucagcgacgacaucgagcagcaggcggacaacaugaucacggagaugcugcagaaggaguacauggagcgccaggggaagacgccccugggccucguggaccuguucgucuucuccaccagcuucuaccugaucuccaucuuccugcaccucgugaagaucccgacccaccggcacaucgugggcaagagcugccccaagccccaccgccugaaccacauggggaucugcuccugcgggcuguacaagcagcccggcgucccggugaaguggaagcggugaggacuaguuauaagacugacuagcccgaugggccucccaacgggcccuccuccccuccuugcaccgagauuaaucaaaggcucuuuucagagccaccaaaaaaaaaaaaaaaaaaaaaaaaaaaaaaaaaaaaaaaaaaaaaaaaaaaaaaaaaaaaaaaaagaauu

SEQ ID NO: 29372 - RNA, 1658 nt, Artificial Sequence
  mRNA product Design i-3 (hSL-A64-N5) comprising derived and/or modified sequence from LASV(G1442-SLE-2011;Clade IV)__AIT17180__GPCmut5 (opt1)
aggagaaagcuuaccaugggccagaucgugaccuucuuccaggaggucccccacgugaucgaggaggugaugaacaucguccugaucgcccucagcauccuggccgugcugaaggggcucuacaacguggcgaccugcggccugaucgggcuggucacguuccuccugcugugcggccgcuccugcaccaccacccucuacaaggggguguacgagcugcagacgcuggagcucaacauggagacccugaacaugaccaugccgcugagcugcaccaagaacaacucccaccacuacauccgggugggcaacgagacgggccucgagcugacccugaccaacaccagcaucaucaaccacaaguucugcaaccucuccgacgcccacaagaagaaccuguacgaccacgcccugaugagcaucaucuccacguuccaccucagcauccccaacuucaaccaguacgaggccauguccugcgacuucaacgggggcaagaucagcguccaguacaaccugucccacagcuacgccggggacgcggccaaccacugcggcaccguggccaacggggugcugcagaccuucaugcgcauggccuggggcggcuccuacaucgcgcucgacagcgggugcggcaacugggacugcaucaugaccuccuaccaguaccugaucauccagaacacgaccugggacgaccacugccaguucagccgccccucccccaucggguaccugggccuccugagccagcggacccgcgacgucuacaucucccggcgccugcucggcaccuucacguggacccugagcgacagcgaggggaaggacaccccgggcggguacugccugacccgguggaugcucaucgaggccgagcugaagugcuucggcaacacggccguggccaagugcaacgagaagcacgacgaggaguucugcgacaugcugcgccucuucgacuucaacaagcaggccauccagcggcugaaggcgcccgcccagauguccauccagcugaucaacaaggccgugaacgcccucaucaacgaccagcugaucaugaagaaccaccuccgcgacaucaugugcauccccuacugcaacuacagcaaguacugguaccugaacaacaccgccaccggcaagaccucccugcccaagugcuggcugaucagcaacggcuccuaccucaacgagacgcacuucagcgacgacaucgagcaggaggcggacaacaugaucaccgagaugcugcagaaggaguacauggagcggcaggggaagacgccccugggccucgucgaccuguucguguucuccaccagcuucuaccugaucuccaucuuccugcaccucgugaagaucccgacccaccgccacaucgucggcaagagcugccccaagccccaccggcugaaccacauggggaucugcuccugcgggcuguacaagcagcccggcgugccggugcgcuggaagcggugaggacuaguuauaagacugacuagcccgaugggccucccaacgggcccuccuccccuccuugcaccgagauuaaucaaaggcucuuuucagagccaccaaaaaaaaaaaaaaaaaaaaaaaaaaaaaaaaaaaaaaaaaaaaaaaaaaaaaaaaaaaaaaaaagaauu

SEQ ID NO: 29373 - RNA, 1658 nt, Artificial Sequence
  mRNA product Design i-3 (hSL-A64-N5) comprising derived and/or modified sequence from LASV(G3010-SLE-2013;Clade IV)__AIT17344__GPCmut5 (opt1)
aggagaaagcuuaccaugggccagaucgugaccuucuuccaggaggucccccacgugaucgaggaggugaugaacaucguccugaucgcccucagcauccuggccgugcugaaggggcucuacaacuucgcgaccugcggccugguggggcuggucacguuccuccugcugugcggccgcuccugcaccaccagccucuacaaggggguguacgagcugcagacccuggagcucaacauggagacgcugaacaugaccaugccgcuguccugcaccaagaacaacagccaccacuacaucauggugggcaacgagaccggccucgagcugacgcugaccaacaccuccaucaucaaccacaaguucugcaaccucagcgacgcccacaagaagaaccuguacaaccacgcccugauguccaucaucagcaccuuccaccucuccauccccaacuucaaccaguacgaggccaugagcugcgacuucaacgggggcaagaucuccguccaguacaaccugagccacuccuacgccggggacgcggccagccacugcggcacgguggccaacggggugcugcagaccuucaugcggauggccuggggcggcuccuacaucgcgcucgacagcgggugcggcaagugggacugcaucaugaccuccuaccaguaccugaucauccagaacaccacgugggaggaccacugccaguucagccgccccucccccaucggguaccugggccuccugagccagcggacccgcgacaucuacaucagccggcgccugcucggcaccuucaccuggacgcuguccgacagcgaggggaaggacaccccgggcggguacugccugacccgguggaugcucaucgaggccgagcugaagugcuucggcaacaccgccgucgccaagugcaacgagaagcacgacgaggaguucugcgacaugcugcgccucuucgacuucaacaagcaggccauccagcggcugaagacgcccgcgcagauguccauccagcugaucaacaaggccgugaacgcccucaucaacgaccagcugaucaugaagaaccaccuccgcgacaucaugugcauccccuacugcaacuacagcaaguacugguaccugaaccacaccaccaccggcaagacgucccugcccaagugcuggcuggugagcaacggcuccuaccucaacgagacccacuucagcgacgacaucgagcagcaggccgacaacaugaucaccgagaugcugcagaaggaguacauggagcggcaggggaagacgccccugggccucgucgaccuguucguguucuccaccagcuucuaccugaucuccaucuuccugcaccucgugaagaucccgacccaccgccacaucgucggcaagagcugccccaagccccaccggcugaaccacauggggaucugcuccugcgggcuguacaagcagcccggcgugccggugcgcuggaagcggugaggacuaguuauaagacugacuagcccgaugggccucccaacgggcccuccuccccuccuugcaccgagauuaaucaaaggcucuuuucagagccaccaaaaaaaaaaaaaaaaaaaaaaaaaaaaaaaaaaaaaaaaaaaaaaaaaaaaaaaaaaaaaaaaagaauu

SEQ ID NO: 29374 - RNA, 1658 nt, Artificial Sequence
  mRNA product Design i-3 (hSL-A64-N5) comprising derived and/or modified sequence from LASV(G502-SLE-2009;Clade IV)__AIT17126__GPCmut5 (opt1)
aggagaaagcuuaccaugggccagaucgugaccuucuuccaggaggucccccacgugaucgaggaggugaugaacaucguccugaucgcccucagcauccuggccgugcugaaggggcucuacaacuucgcgaccugcggccugguggggcugcucacguuccugcugcucugcggccgcuccugcaccaccgggcuguacaagggcgucuacgagcugcagacccucgagcugaacauggagacgcugaacaugaccaugccgcucagcugcaccaagaacaacucccaccacuacaucauggugggcaacgagaccgggcuggagcugacgcucaccaacaccagcaucaucaaccacaaguucugcaaccuguccgacgcccacaagaagaaccuguacgaccacgcccucaugagcaucaucuccaccuuccaccugagcauccccaacuucaaccaguacgaggccauguccugcgacuucaacggcgggaagaucagcgugcaguacaaccugucccacagcuacgccggcgacgcggccgaccacugcgggacggucgccaacggcgugcuccagaccuucaugcggauggccuggggcggguccuacaucgcgcuggacagcggcugcgggcggugggacugcaucaugaccuccuaccaguaccugaucauccagaacaccacgugggaggaccacugccaguucagccgccccucccccaucggcuaccucggccugcugagccagcggacccgcgacaucuacaucucccggcgccuccuggggaccuucaccuggacgcugagcgacagcgagggcaaggacacccccgggggcuacugccucacccgguggaugcugaucgaggccgagcugaagugcuucgggaacaccgccguggccaagugcaacgagaagcacgacgaggaguucugcgacaugcuccgccuguucgacuucaacaagcaggccauccagcggcugaaggcgcccgcccagauguccauccagcucaucaacaaggccgucaacgcccugaucaacgaccagcuggugaugaagaaccaccuccgcgacaucaugugcauccccuacugcaacuacagccgguacugguaccugaaccacacgaccaccggccgcaccucccugcccaagugcuggcucgugagcaacggguccuaccugaacgagacgcacuucagcgacgacaucgagcagcaggccgacaacaugaucaccgagaugcugcagaaggaguacauggagcggcagggcaagaccccgcucgggcuggucgaccuguucguguucuccaccagcuucuaccugaucuccaucuuccuccaccuggugaagaucccgacgcaccgccacaucgucggcaagagcugccccaagccccaccggcugaaccacauggggaucugcuccugcggccucuacaagcagcccggcgugccggugaaguggaagcgcugaggacuaguuauaagacugacuagcccgaugggccucccaacgggcccuccuccccuccuugcaccgagauuaaucaaaggcucuuuucagagccaccaaaaaaaaaaaaaaaaaaaaaaaaaaaaaaaaaaaaaaaaaaaaaaaaaaaaaaaaaaaaaaaaagaauu

SEQ ID NO: 29375 - RNA, 1658 nt, Artificial Sequence
  mRNA product Design i-3 (hSL-A64-N5) comprising derived and/or modified sequence from LASV(G733-SLE-2010;Clade IV)__AIT17154__GPCmut5 (opt1)
aggagaaagcuuaccaugggccagaucgugaccuucuuccaggaggucccccacgugaucgaggaggugaugaacaucguccugaucgcccucagcauccuggccgugcugaaggggcucuacaacuucgcgaccugcggcaucguggggcuggucuccuuccugcuccugugcggccgcagcugcacgaccucccuguacaaggggguguacgagcuccagacccuggagcugaacauggagacccucaacaugacgaugccgcugagcugcaccaagaacaacucccaccacuacaucauggugggcaacgagaccggccuggagcucacccugacgaacaccagcaucaucaaccacaaguucugcaaccuguccgacgcccacaagaagaaccucuacgaccacgcccugaugagcaucaucuccaccuuccaccugagcauccccaacuucaaccaguacgaggccauguccugcgacuucaacgggggcaagaucagcguccaguacaaccucucccacagcuacgccggggacgcggccaaccacugcggcaccaucgccaacggggugcugcagacguucaugcggauggccuggggcggcuccuacaucgcgcuggacagcgggugcgaccggugggacugcaucaugaccuccuaccaguaccucaucauccagaacaccaccugggaggaccacugccaguucagccgccccucccccaucggcuaccuggggcugcucagccagcggacgcgcgacaucuacaucagccggcgccugcugggcaccuucaccuggacccucuccgacagcgagggcaaggacacgcccgggggcuacugccugacccgguggaugcugaucgaggccgagcucaagugcuucgggaacaccgccguggccaagugcaacgagaagcacgacgaggaguucugcgacaugcugcgccuguucgacuucaacaagcaggccauccagcggcucaaggcgcccgcccagauguccauccagcugaucaacaaggccgucaacgcccugaucaacgaccagcucaucaugaagaaccaccuccgcgacaucaugugcauccccuacugcaacuacagcaaguacugguaccugaaccacaccacgaccgggaagaccucccugcccaagugcuggcuggugagcaacggcuccuaccugaacgagacccacuucagcgacgacaucgagcagcaggccgacaacaugaucacggagaugcuccagaaggaguacauggagcggcagggcaagaccccgcuggggcugguggaccucuucgucuucuccaccagcuucuaccugaucuccaucuuccugcaccuggugaagaucccgacccaccgccacguggucggcaagagcugccccaagccccaccggcucaaccacauggggaucugcuccugcggccuguacgggcagcccggcgugccggugaaguggaagcgcugaggacuaguuauaagacugacuagcccgaugggccucccaacgggcccuccuccccuccuugcaccgagauuaaucaaaggcucuuuucagagccaccaaaaaaaaaaaaaaaaaaaaaaaaaaaaaaaaaaaaaaaaaaaaaaaaaaaaaaaaaaaaaaaaagaauu

SEQ ID NO: 29376 - RNA, 1658 nt, Artificial Sequence
  mRNA product Design i-3 (hSL-A64-N5) comprising derived and/or modified sequence from MOPV/LASV reassortant(IGS-1;Clade IV)__AFY05576__GPCmut5 (opt1)
aggagaaagcuuaccaugggccagaucgugaccuucuuccaggaggucccccacgugaucgaggaggugaugaacaucguccugaucgcccucagcgugcuggccgugcugaaggggcucuacaacuucgcgaccugcggccuggucgggcuggugacguuccuccugcugugcggccgcuccugcaccaccagccucuacaaggggguguacgagcugcagacccuggagcucaacauggagacgcugaacaugaccaugccgcuguccugcaccaagaacaacagccaccacuacaucauggucggcaacgagaccggccucgagcugacgcugaccaacaccuccaucaucaaccacaaguucugcaaccucagcgacgcccacaagaagaaccuguacgaccacgcccugauguccaucaucagcaccuuccaccucuccauccccaacuucaaccaguacgaggccaugagcugcgacuucaacgggggcaagaucuccgugcaguacaaccugagccacuccuacgccggggacgcggccaaccacugcggcacgguggccaacgggguccugcagaccuucaugcggauggccuggggcggcagcuacaucgcgcucgacuccgggugcggcaacugggacugcaucaugaccagcuaccaguaccugaucauccagaacaccacgugggaggaccacugccaguucucccggcccagccccaucggguaccugggccuccugucccagcgcacccgggacaucuacaucagccgccggcugcucggcaccuucaccuggacgcugagcgacuccgagggggaggacaccccgggcggguacugccugacccgcuggaugcucaucgaggccgagcugaagugcuucggcaacaccgccguggccaagugcaacgagaagcacgacgaggaguucugcgacaugcugcggcuguucgacuucaacaagcaggccauccagcgccugaaggcgcccgcccagaugagcauccagcugaucaacaaggccgugaacgcccucaucaacgaccagcugaucaugaagaaccaccuccgggacaucaugugcauccccuacugcaacuacuccaaguacugguaccucaaccacacgaccaccggccgcaccagccugcccaagugcuggcuggucuccaacggcagcuaccucaacgagacgcacuucuccgacgacaucgagcagcaggccgacaacaugaucaccgagaugcugcagaaggaguacauggagcggcaggggaagacgccccugggccucguggaccuguucguguucagcaccuccuucuaccugaucagcaucuuccugcaccucgucaagaucccgacccaccgccacaucguggggaaguccugccccaagccccaccggcugaaccacaugggcaucugcagcugcgggcuguacaagcagcccggcgugccggucaaguggaagcgcugaggacuaguuauaagacugacuagcccgaugggccucccaacgggcccuccuccccuccuugcaccgagauuaaucaaaggcucuuuucagagccaccaaaaaaaaaaaaaaaaaaaaaaaaaaaaaaaaaaaaaaaaaaaaaaaaaaaaaaaaaaaaaaaaagaauu

SEQ ID NO: 29377 - RNA, 1658 nt, Artificial Sequence
  mRNA product Design i-3 (hSL-A64-N5) comprising derived and/or modified sequence from LASV(LM765-SLE-2012;Clade IV)__AIT17814__GPCmut5 (opt1)
aggagaaagcuuaccaugggccagaucgugaccuucuuccaggaggucccccacgugaucgaggaggugaugaacaucguccugaucgcccucagcauccuggccgugcugaaggggcucuacaacuucgcgaccugcggccugguggggcuggucacguuccuccugcugugcggccgcuccugcaccaccagccucuacaaggggguguacgagcugcagacccuggagcucaacauggagacgcugaacaugaccaugccgcuguccugcaccaagaacaacagccaccacuacaucauggugggcaacgagaccggccucgagcugacgcugaccaacaccuccaucaucgaccacaaguucugcaaccucagcgacgcccaccggaagaaccuguacgaccacgcccugauguccaucaucagcaccuuccaccucuccauccccaacuucaaccaguacgaggccaugagcugcgacuucaacgggggcaagaucuccguccaguacaaccugagccacuccuacgccaaggacgcggccgaccacugcgggacgguggccaacggcgugcugcagaccuucaugcgcauggccuggggcgggagcuacaucgcgcucgacuccggcugcgggcgcugggacugcaucaugaccagcuaccaguaccugaucauccagaacaccacgugggaggaccacugccaguucucccggcccagccccaucggcuaccuggggcuccugucccagcgcacccgggacaucuacaucagccgccggcugcucggcaccuucaccuggacgcugagcgacuccgagggcaaggacacccccgggggcuacugccugacccgcuggaugcucaucgaggccgagcugaagugcuucgggaacaccgccgucgccaagugcaacgagaagcacgacgaggaguucugcgacaugcugcggcuguucgacuucaacaagcaggccauccagcgccugaaggcgcccgcccagaugagcauccagcugaucaacaaggccgugaacgcccucaucaacgaccagcugaucaugaagaaccaccuccgggacaucaugugcauccccuacugcaacuacuccaaguacugguaccucaaccacacgaccaccgggaagaccagccugcccaagugcuggcugguguccaacggcagcuaccucaacgagacgcacuucuccgacgacaucgagcagcaggccgacaacaugaucaccgagaugcugcagaaggaguacauggagcgccagggcaagaccccgcuggggcucgucgaccuguucguguucagcaccuccuucuaccugaucagcaucuuccugcaccucgugaagaucccgacgcaccggcacaucgucggcaagcccugccccaagccccaccgccugaaccacauggggaucugcuccugcggccuguacaagcagccgggggugcccgugaaguggaagcggugaggacuaguuauaagacugacuagcccgaugggccucccaacgggcccuccuccccuccuugcaccgagauuaaucaaaggcucuuuucagagccaccaaaaaaaaaaaaaaaaaaaaaaaaaaaaaaaaaaaaaaaaaaaaaaaaaaaaaaaaaaaaaaaaagaauu

SEQ ID NO: 29378 - RNA, 1658 nt, Artificial Sequence
  mRNA product Design i-3 (hSL-A64-N5) comprising derived and/or modified sequence from LASV(LM776-SLE-2012;Clade IV)__AIT17824__GPCmut5 (opt1)
aggagaaagcuuaccaugggccagaucgugaccuucuuccaggaggucccccacgugaucgaggaggugaugaacaucguccugaucgcccucagcauccuggccgugcugaaggggcucuacaacuucgcgaccugcggccugguggggcuggucacguuccuccugcugugcggccgcuccugcaccaccagcguguacaaggggguguacgagcuccagacccuggagcugaacauggagacgcucaacaugaccaugccgcuguccugcaccaagaacaacagccaccacuacaucauggucggcaacgagaccggccuggagcucacgcugaccaacaccuccaucaucaaccacaaguucugcaaccugagcgacgcccacaagaagaaccucuacgaccacgcccugauguccaucaucagcaccuuccaccuguccauccccaacuucaaccaguacgaggccaugagcugcgacuucaacgggggcaagaucuccgugcaguacaaccucagccacuccuacgccggggacgcggccaaccacugcggcacgguggccaacgggguccugcagaccuucaugcggauggccuggggcggcagcuacaucgcgcuggacuccgggugcggcaagugggacugcaucaugaccagcuaccaguaccucaucauccagaacaccacgugggaggaccacugccaguucucccgccccagccccaucggguaccugggccugcucucccagcggacccgcgacaucuacaucagccggcgccugcugggcaccuucaccuggacgcucagcgacuccgaggggaaggacaccccgggcggguacugccugacccgguggaugcugaucgaggccgagcucaagugcuucggcaacaccgccguggccaagugcaacgagaagcacgacgaggaguucugcgacaugcugcgccuguucgacuucaacaagcaggccauccagcggcucaaggcgcccgcccagaugagcauccagcugaucaacaaggccgugaacgcccugaucaacgaccagcucaucaugaagaaccaccuccgcgacaucaugugcauccccuacugcaacuacuccaaguacugguaccugaaccacacgaccaccggcaagaccagccugcccaagugcuggcuggucuccaacggcagcuaccugaacgagacgcacuucuccgacgacaucgagcagcaggccgacaacaugaucaccgagaugcuccagaaggaguacauggagcggcaggggaagacgccccugggccugguggaccucuucguguucagcaccuccuucuaccugaucagcaucuuccugcaccuggucaagaucccgacccaccgccacaucguggggaaguccugccccaagccccaccggcucaaccacaugggcaucugcagcugcgggcuguacaagcagcccggcgugccgguccgcuggaagcggugaggacuaguuauaagacugacuagcccgaugggccucccaacgggcccuccuccccuccuugcaccgagauuaaucaaaggcucuuuucagagccaccaaaaaaaaaaaaaaaaaaaaaaaaaaaaaaaaaaaaaaaaaaaaaaaaaaaaaaaaaaaaaaaaagaauu

SEQ ID NO: 29379 - RNA, 1658 nt, Artificial Sequence
  mRNA product Design i-3 (hSL-A64-N5) comprising derived and/or modified sequence from LASV(Mad39;Clade IV)__ANH09722__GPCmut5 (opt1)
aggagaaagcuuaccaugggccagaucgugaccuucuuccaggaggucccccacgugaucgaggaggugaugaacaucguccugaucgcccucagcauccuggccgugcugaaggggcucuacaacguggcgaccugcggccugaucgggcuggucacguuccuccugcugugcggccgcuccugcaccaccacccucuacaaggggguguacgagcugcaggcccuggagcucaacauggagacgcugaacaugaccaugccgcugagcugcaccaagaacaacucccaccacuacauccgggugggcaacgagaccggccucgagcugacgcugaccaacaccagccucaucaaccacaaguucugcaaccuguccgacgcccacaagaagaaccuguacgaccacgcccucaugagcaucaucuccaccuuccaccugagcauccccaacuucaaccaguacgaggccauguccugcgacuucaacgacgggaagaucagcguccaguacaaccugucccacacguacgcgggcgacaccgccaaccacugcgggaccguggccaacggcgugcuccagaccuucaugcgcauggccuggggcgggagcuacaucgcgcuggacuccggcugcgggggcugggacugcaucaugacgagcuaccaguaccugaucauccagaacaccaccugggaggaccacugccaguucucccggcccagccccaucggguaccucggccugcugucccagcggacccgcgacaucuacaucagccggcgccuccugggcacguucaccuggacccuguccgacagcgaggggaaggacaccccgggcggguacugccucacgcgguggaugcugaucgaggccgagcugaagugcuucggcaacaccgccgucgccaagugcaacgagaagcacgacgaggaguucugcgacaugcuccgccuguucgacuucaacaagcaggccauccagcggcugaaggcgcccgcccagaugagcauccagcucaucaacaaggccgugaacgcccugaucaacgaccagcugaucaugaagaaccaccuccgcgacaucaugugcauccccuacugcaacuacuccaaguacugguaccugaaccacaccgugaccggcaagacgagccugcccaagugcuggcucgucuccaacggcagcuaccugaacgagacccacuucuccgacgacaucgagcagcaggccgacaacaugaucaccgagaugcugcagaaggaguacauggagcggcaggggaagacgccccucggccugguggaccuguucguguucagcaccuccuucuaccugaucagcaucuuccuccaccuggucaagaucccgacccaccgccacgugguggggaagcccugccccaagccccaccggcugaaccacaugggcaucugcuccugcggguucuacaagcagccgggcguccccgugcgcuggaagcggugaggacuaguuauaagacugacuagcccgaugggccucccaacgggcccuccuccccuccuugcaccgagauuaaucaaaggcucuuuucagagccaccaaaaaaaaaaaaaaaaaaaaaaaaaaaaaaaaaaaaaaaaaaaaaaaaaaaaaaaaaaaaaaaaagaauu

SEQ ID NO: 29380 - RNA, 1658 nt, Artificial Sequence
  mRNA product Design i-3 (hSL-A64-N5) comprising derived and/or modified sequence from LASV(Z0947-SLE-2011;Clade IV)__AIT17840__GPCmut5 (opt1)
aggagaaagcuuaccaugggccagaucgugaccuucuuccaggaggucccccacgugaucgaggaggugaugaacaucguccugaucgcccucagcauccuggccgugcugaaggggcucuacaacuucgcgaccugcggccugguggggcuggucacguuccuccugcugugcggccgcuccugcaccaucagccucuacaaggggguguacgagcugcagacccuggagcucaacauggagacccugaacaugacgaugccgcuguccugcaccaagaacaacagccaccacuacaucauggugggcaacgagaccggccucgagcugacccugacgaacaccuccaucaucaaccacaaguucugcaaccucagcgacgcccacaagaagaaccuguacgaccacgcccugauguccaucaucagcaccuuccaccucuccauccccaacuucaaccaguacgaggccaugagcugcgacuucaacgggggcaagaucuccguccaguacaaccugagccacuccuacgccggggacgcggccaaccacugcggcaccguggccaacggggugcugcagacguucaugcggauggccuggggcggcagcuacaucgcgcucgacuccgggugcgaccggugggacugcaucaugaccagcuaccaguaccugaucauccagaacaccaccugggaggaccacugccaguucucccgccccagccccaucggcuaccuggggcuccugucccagcggacgcgcgacaucuacaucagccggcgccugcucggcaccuucaccuggacccugagcgacuccgagggcaaggacacgcccgggggcuacugccugacccgguggaugcucaucgaggccgagcugaagugcuucgggaacaccgccgucgccaagugcaacgagaagcacgacgaggaguucugcgacaugcugcgccucuucgacuucaacaagcaggccauccagcggcugaaggcgcccgcccagaugagcauccagcugaucaacaaggccgugaacgcccucaucaacgaccagcugaucaugaagaaccaccuccgcgacaucaugugcauccccuacugcaacuacuccaaguacugguaccugaaccacaccacgaccgggaagaccagccugcccaagugcuggcugguguccaacggcagcuaccucaacgagacccacuucuccgacgacaucgagcagcaggccgacaacaugaucacggagaugcugcagaaggaguacauggagcggcagggcaagaccccgcuggggcucgucgaccuguucguguucagcaccuccuucuaccugaucagcaucuuccugcaccucgugaagaucccgacccaccgccacaucgucggcaagcccugccccaagccccaccggcugaaccacauggggaucugcuccugcggccuguacaagcagccgggggugcccgugaaguggaagcgcugaggacuaguuauaagacugacuagcccgaugggccucccaacgggcccuccuccccuccuugcaccgagauuaaucaaaggcucuuuucagagccaccaaaaaaaaaaaaaaaaaaaaaaaaaaaaaaaaaaaaaaaaaaaaaaaaaaaaaaaaaaaaaaaaagaauu

SEQ ID NO: 29381 - RNA, 1658 nt, Artificial Sequence
  mRNA product Design i-3 (hSL-A64-N5) comprising derived and/or modified sequence from LASV(Josiah;Clade IV)__NP_694870__GPCmut5 (opt1)
aggagaaagcuuaccaugggccagaucgugaccuucuuccaggaggucccccacgugaucgaggaggugaugaacaucguccugaucgcccucagcgugcuggccgugcugaaggggcucuacaacuucgcgaccugcggccuggucgggcuggugacguuccuccugcugugcggccgcuccugcaccaccagccucuacaaggggguguacgagcugcagacccuggagcucaacauggagacgcugaacaugaccaugccgcuguccugcaccaagaacaacagccaccacuacaucauggucggcaacgagaccggccucgagcugacgcugaccaacaccuccaucaucaaccacaaguucugcaaccucagcgacgcccacaagaagaaccuguacgaccacgcccugauguccaucaucagcaccuuccaccucuccauccccaacuucaaccaguacgaggccaugagcugcgacuucaacgggggcaagaucuccgugcaguacaaccugagccacuccuacgccggggacgcggccaaccacugcggcacgguggccaacgggguccugcagaccuucaugcggauggccuggggcggcagcuacaucgcgcucgacuccgggugcggcaacugggacugcaucaugaccagcuaccaguaccugaucauccagaacaccacgugggaggaccacugccaguucucccgccccagccccaucggguaccugggccuccugucccagcggacccgcgacaucuacaucagccggcgccugcucggcaccuucaccuggacgcugagcgacuccgaggggaaggacaccccgggcggguacugccugacccgguggaugcucaucgaggccgagcugaagugcuucggcaacaccgccguggccaagugcaacgagaagcacgacgaggaguucugcgacaugcugcgccucuucgacuucaacaagcaggccauccagcggcugaaggcgcccgcccagaugagcauccagcugaucaacaaggccgugaacgcccucaucaacgaccagcugaucaugaagaaccaccuccgcgacaucaugugcauccccuacugcaacuacuccaaguacugguaccugaaccacacgaccaccgggcggaccagccugcccaagugcuggcuggucuccaacggcagcuaccucaacgagacgcacuucuccgacgacaucgagcagcaggccgacaacaugaucaccgagaugcugcagaaggaguacauggagcgccagggcaagaccccgcuggggcugguggaccucuucguguucagcaccuccuucuaccugaucagcaucuuccugcaccucgucaagauccccacgcaccggcacaucgugggcaaguccugccccaagccccaccgccugaaccacauggggaucugcagcugcggccuguacaagcagccgggggugcccgucaaguggaagcggugaggacuaguuauaagacugacuagcccgaugggccucccaacgggcccuccuccccuccuugcaccgagauuaaucaaaggcucuuuucagagccaccaaaaaaaaaaaaaaaaaaaaaaaaaaaaaaaaaaaaaaaaaaaaaaaaaaaaaaaaaaaaaaaaagaauu

SEQ ID NO: 29382 - RNA, 1655 nt, Artificial Sequence
  mRNA product Design i-3 (hSL-A64-N5) comprising derived and/or modified sequence from LASV(LP;Clade I)__AAF86701__GPCmut5 (opt1)
aggagaaagcuuaccaugggccagaucaucaccuucuuccaggaggugccccacgucaucgaggaggugaugaacaucgugcugaucgcccucagccugcuggccauccucaaggggcuguacaacaucgcgaccugcggcaucaucgggcuggucgccuuccucuuccugugcggcaaguccugcagccugacgcucaagggcggguacgagcugcagacccuggagcucaacauggagacccugaacaugaccaugccgcuguccugcacgaagaacagcucccaccacuacauccgcgugggcaacgagaccgggcucgagcugacccugaccaacacgagcaucaucaaccacaaguucugcaaccucuccgacgcccacaagaagaaccuguacgaccacgcccugaugagcaucaucuccaccuuccaccucagcauccccaacuucaaccaguacgaggccauguccugcgacuucaacggcgggaagaucagcgugcaguacaaccugucccacagcuacgcgggcgacgccgccgagcacugcgggaccgucgccaacggcgugcugcagaccuucaugcggauggcguggggcgggcgcuacaucgcccucgacuccggcugcgggaacugggacugcaucaugacgagcuaccaguaccugaucauccagaacaccaccugggaggaccacugccaguucucccggcccagccccaucggcuaccugggccuccugucccagcgcacccgggacaucuacaucagccgccggcugcucgggacguucaccuggacccugagcgacuccgagggcaacgagacccccgggggcuacugccugacgcgcuggaugcucaucgaggccgagcugaagugcuucgggaacaccgccguggccaagugcaacgagaagcacgacgaggaguucugcgacaugcugcggcuguucgacuucaacaagcaggcgauccgccggcugaaggccccggcccagaugagcauccagcugaucaacaaggccgucaacgcccucaucaacgaccagcugaucaugaagaaccaccuccgcgacaucaugugcauccccuacugcaacuacuccaaguacugguaccucaaccacaccagcuccggccggaccagccugcccaagugcuggcugaucuccaacggcagcuaccucaacgagacgcaguucuccgacgacaucgagcagcaggcggacaacaugaucaccgagaugcugcagaaggaguacaucgagcgccaggggaagaccccgcugggccugguggacaucuucaucuucagcaccuccuucuaccucaucagcaucuuccugcaccugaucaagauccccacgcaccggcacaucguggggaagcccugccccaagccgcaccgccucaaccacaugggcgucugcuccugcgggcuguacaagcaccccggcgugcccaccaaguggaagcggugaggacuaguuauaagacugacuagcccgaugggccucccaacgggcccuccuccccuccuugcaccgagauuaaucaaaggcucuuuucagagccaccaaaaaaaaaaaaaaaaaaaaaaaaaaaaaaaaaaaaaaaaaaaaaaaaaaaaaaaaaaaaaaaaagaauu

SEQ ID NO: 29383 - RNA, 1655 nt, Artificial Sequence
  mRNA product Design i-3 (hSL-A64-N5) comprising derived and/or modified sequence from LASV(803213;Clade II)__AAF86703__GPCmut5 (opt1)
aggagaaagcuuaccaugggccagaucaucaccuucuuccaggaggugccccacgucaucgaggaggugaugaacaucgugcugaucgcccucagccugcuggccauccucaaggggaucuacaacgucgcgaccugcggccuguucgggcugaucuccuuccuccugcugugcggccgcagcugcuccgugacguacaaggggguguacgagcuccagacccuggagcugaacauggccaaccucaacaugaccaugccgcugagcugcaccaagaacaacucccaccacuacaucauggucggcaacgagacgggccuggagcucacccugaccaacaccagcaucaucaaccacaaguucugcaaccuguccgacgcccacaagaagaaccucuacgaccacgcccugaugagcaucaucuccacguuccaccugagcauccccaacuucaaccaguacgaggccauguccugcgacuucaacgggggcaagaucagcgugcaguacaaccucucccacagcuucgcgguggacgccgccaaccacugcgggaccaucgccaacggcguccugcagaccuucaugcggauggcguggggcggguccuacaucgcccuggacagcggcugcgggaacugggacugcaucaugaccuccuaccaguaccucaucauccagaacacgaccugggaggaccacugccaguucagccgccccucccccaucggcuaccuggggcugcucagccagcggacccgcgacaucuacaucagccggcgccugcugggcaccuucacguggacccucuccgacagcgagggcaacgaggcccccgggggcuacugccugacccgguggaugcugaucgaggccgagcucaagugcuucgggaacaccgccguggcgaagugcaacgagaagcacgacgaggaguucugcgacaugcugcgccuguucgacuucaacaagcaggccaucaagcggcucaagacgccggcccagauguccauccagcugaucaacaaggccgugaacgcccugaucaacgaccagcucaucaugaagaaccaccuccgcgacaucaugugcauccccuacugcaacuacagccgguacugguaccugaaccacaccgucaccggcaagaccucccugccccgcugcuggcuggugagcaacggguccuaccugaacgagacgcacuucagcgacgacaucgagcagcaggcggacaacaugaucaccgagaugcuccagaaggaguacauggaccggcagggcaagaccccgcugggccugguggaccuguucgucuucuccaccagcuucuaccucaucuccaucuuccugcaccuggugaagauccccacgcaccgccacaucguggggaagcccugccccaagccgcaccggcucaaccacaugggcaucugcagcugcgggcuguacaagcaccccggcguccccgugaaguggaagcgcugaggacuaguuauaagacugacuagcccgaugggccucccaacgggcccuccuccccuccuugcaccgagauuaaucaaaggcucuuuucagagccaccaaaaaaaaaaaaaaaaaaaaaaaaaaaaaaaaaaaaaaaaaaaaaaaaaaaaaaaaaaaaaaaaagaauu

SEQ ID NO: 29384 - RNA, 1655 nt, Artificial Sequence
  mRNA product Design i-3 (hSL-A64-N5) comprising derived and/or modified sequence from LASV(GA391;Clade III)__CAA36645__GPCmut5 (opt1)
aggagaaagcuuaccaugggccagaucgugaccuucuuccaggaggucccccacgugaucgaggaggugaugaacaucguccugaucgcccucagcauccuggccauccugaaggggcucuacaacguggcgaccugcggccugaucgggcuggugacguuccuccugcuguccggccgcagcugcucccucaucuacaaggggaccuacgagcugcagacccuggagcucaacauggagacccugaacaugacgaugccgcugagcugcaccaagaacaacucccaccacuacauccgggucggcaacgagaccggccucgagcugacccugacgaacaccagcauccucaaccacaaguucugcaaccuguccgacgcccacaagcgcaaccuguacgaccacagccucauguccaucaucagcaccuuccaccuguccauccccaacuucaaccaguacgaggccaugagcugcgacuucaacgggggcaagaucaccgugcaguacaaccugucccacagcuucgccguggacgccgcggggcacugcggcacgcucgccaacgggguccugcagaccuucaugcggauggccuggggcggcuccuacaucgcccuggacagcgggugcggcaacugggacugcaucaugaccuccuaccaguaccucaucauccagaacaccacgugggacgaccacugccaguucagccgccccucccccaucggguaccugggccugcucagccagcggacccgcgacaucuacaucagccggcgccugcugggcaccuucaccuggacgcucuccgacagcgaggggaacgagaccccgggcggguacugccugacccgguggaugcugaucgaggcggagcucaagugcuucggcaacaccgccguggccaagugcaacgagaagcacgacgaggaguucugcgacaugcugcgccuguucgacuucaacaagcaggccauccggcgccucaagacgcccgcccagauguccauccagcugaucaacaaggcggugaacgcccugaucaacgaccagcucaucaugaagaaccaccuccgggacaucaugugcauccccuacugcaacuacagccgcuacugguaccugaaccacaccuccaccgggaagaccagccugccccggugcuggcugaucuccaacggcagcuaccugaacgagacgaaguucuccgacgacaucgagcagcaggccgacaacaugaucaccgagaugcugcagaaggaguacaucgaccgccagggcaagaccccgcucgggcuggucgaccuguucguguucagcaccuccuucuaccucaucagcaucuuccugcaccuggugaagauccccacgcaccggcacaucgucggcaagcccugccccaagccgcaccgccucaaccacauggggaucugcuccugcggccuguacaagcagcccggggugcccgugcgguggaagcgcugaggacuaguuauaagacugacuagcccgaugggccucccaacgggcccuccuccccuccuugcaccgagauuaaucaaaggcucuuuucagagccaccaaaaaaaaaaaaaaaaaaaaaaaaaaaaaaaaaaaaaaaaaaaaaaaaaaaaaaaaaaaaaaaaagaauu

SEQ ID NO: 29385 - RNA, 1658 nt, Artificial Sequence
  mRNA product Design i-3 (hSL-A64-N5) comprising derived and/or modified sequence from LASV(AV;Clade V)__CCA30314__GPCmut5 (opt1)
aggagaaagcuuaccaugggccagaucgugaccuucuuccaggaggucccccacgugaucgaggaggugaugaacaucguccugaucgcccucagcauccuggccgugcugaaggggcucuacaacaucgcgaccugcggccugaucgggcugaucacguuccuccugcugugcggccgcuccugcagcuccaaccucuacaaggggguguacgagcugcagagccuggaccucaacauggagacccugaacaugaccaugccgcuguccugcaccaagaacaacagccaccacuacauccgggucggcaacgacacgggccucgagcugacccugaccaacaccuccauccucaaccacaaguucugcaaccugagcgacgcccacaagaaggaccuguacgaccacgcccucauguccaucaucagcacguuccaccuguccauccccaacuucaaccaguacgaggccaugagcugcgacuucaacgggggcaagaucuccgugcaguacaaccugagccacuccuacgccaucgacgcggccaaccacugcgggaccguggccaacggcauccuccagaccuucaugcgcauggccuggggcgggagcuacaucgcgcuggacuccggcugcgggaacugggacugcaucaugaccagcuaccaguaccugaucauccagaacacgaccugggagaaccacugccaguucucccggcccagccccaucggcuaccucgggcugcugagccagcgcacccgggacaucuacaucucccgccggcuccugggcaccuucacguggacccugagcgacuccgagggcaacgccacccccgggggcuacugccucacccgcuggaugcugaucgaggccgagcugaagugcuucgggaacacggccgucgccaagugcaacgagaagcacgacgaggaguucugcgacaugcuccggcuguucgacuucaacaagcaggcgaucagccgccugaaguccccggcccagaugagcauccagcucaucaacaaggccgugaacgcccugaucaacgaccagcugaucaugaagaaccaccuccgggacaucaugugcauccccuacugcaacuacuccaaguacugguaccugaaccacaccaucaccggcaagaccagccugcccaagugcuggcucguguccaacgggagcuaccugaacgagacgcacuucuccgacgacaucgagcagcaggccgacaacaugaucaccgagaugcugcagaaggaguacauggagcgccagggcaagaccccgcugggccucgucgaccuguucguguucagcaccuccuucuaccugaucagcaucuuccuccggcuggugaagauccccacgcaccgccacaucgucgggaagcccugccccaagccgcaccggcugaaccacaugggcaucugcuccugcgggcucuacaagcagcccggcgugcccgugcgcuggaagcggugaggacuaguuauaagacugacuagcccgaugggccucccaacgggcccuccuccccuccuugcaccgagauuaaucaaaggcucuuuucagagccaccaaaaaaaaaaaaaaaaaaaaaaaaaaaaaaaaaaaaaaaaaaaaaaaaaaaaaaaaaaaaaaaaagaauu

SEQ ID NO: 29386 - RNA, 1655 nt, Artificial Sequence
  mRNA product Design i-3 (hSL-A64-N5) comprising derived and/or modified sequence from LASV(Togo/2016/7082;Clade VI)__AMR44577__GPCmut5 (opt1)
aggagaaagcuuaccaugggccagaucaucaccuucuuccaggaggugccccacgucaucgaggaggugaugaacaucgugcugaucgcccucagccugcuggccauccucaagggggucuacaacguggcgaccugcggcaucaucgggcuggugacguuccuguuccucugcggccgcuccugcagccugaucuacaagggguccuacgagcugcagacccucgagcugaacauggagacccugaacaugaccaugccgcucagcugcacgaagaacuccagccaccacuacauccgggucggcaacgagaccggccuggagcugacccucaccaacacguccaucaucaaccacaaguucugcaaccugagcgacgcccacaagcgcaaccuguacgaccacgcccucauguccauccugagcaccuuccaccuguccauccccaacuucaaccaguacgaggccaugagcugcgacuucaacgggggcaagaucuccgugcaguacaaccucagccacgccuacgcgguggacgccgccgagcacugcgggaccgucgccaacggcgugcugcagaccuucaugcggauggcguggggcggguccuacaucgcccuggacagcggcugcgggaacugggacugcaucaugacguccuaccaguaccucaucauccagaacaccaccugggaggaccacugccaguucagccgccccucccccaucggcuaccuggggcugcucagccagcggacccgcgacaucuacaucagccggcgccugcugggcacguucaccuggacccucuccgacagcgagggcaacgagacccccgggggcuacugccugacgcgguggaugcugaucgaggccgagcucaagugcuucgggaacaccgccguggccaagugcaacgagaagcacgacgaggaguucugcgacaugcugcgccuguucgacuucaacaagcaggcgauccagcggcucaaguccccggcccagaugagcauccagcugaucaacaaggccgucaacgcccugaucaacgaccagcucaucaugaagaaccaccuccgcgacaugaugugcauccccuacugcaacuacuccaaguacugguaccugaaccacaccagcuccggccggaccagccugcccaagugcuggcugguguccaacgggagcuaccugaacgagacgcacuucuccgacgacaucgagcagcaggccgacaacaugaucaccgagaugcuccagaaggaguacaucgaccgccagggcaagaccccgcugggccugguggaccuguucgucuucagcaccuccuucuaccucaucagcaucuuccugcaccugaucaagauccccacgcaccggcacaucguggggaagcccugccccaagccgcaccgccucaaccacaugggcaucugcuccugcgggcuguacaagcagcccggcgugcccacccgguggaagcgcugaggacuaguuauaagacugacuagcccgaugggccucccaacgggcccuccuccccuccuugcaccgagauuaaucaaaggcucuuuucagagccaccaaaaaaaaaaaaaaaaaaaaaaaaaaaaaaaaaaaaaaaaaaaaaaaaaaaaaaaaaaaaaaaaagaauu

SEQ ID NO: 29387 - RNA, 1655 nt, Artificial Sequence
  mRNA product Design i-3 (hSL-A64-N5) comprising derived and/or modified sequence from LASV(KAK-428;Clade n.d. (VII))__ANH09740__GPCmut5 (opt1)
aggagaaagcuuaccaugggccagaucgugaccuucuuccaggaggucccccacgugaucgaggaggugaugaacaucguccugaucgcccucagccugcuggccauccucaaggggcuguacaacuucgcgaccugcggcgugaucgggcugaucacguuccuccugcugugcggccgcuccugcagcgccaccuacaaggggcaguacgagcuccagacccuggagcugaacauggagucccucaacaugaccaugccgcugagcugcacgaagaacaacucccaccacuacauccgggccggcaacaacaccggccuggagcucacccugaccaacacgagcaucaucucccacaaguucugcaaccugagcgacgcccacaagaagaaccucuacgaccacacccugauguccaucaucaccaccuuccaccugagcauccccaacuucaaccaguacgaggccauguccugcgacuucaacgggggcaagaucagcauccaguacaaccucucccacagcuacgcgggggacgccgcccagcacugcggcacgguggccaacgggguccugcagaccuucaugcgcauggcguggggcggcuccuaccuggcccucgacagcgggugccggggcugggacugcaucaucuccagcuaccaguaccugaucauccagaacaccaccugggacgaccacugccaguucucccgccccagccccaucggguaccugggcuucgugagccagaagacgcgggacaucuacaucucccgccggcuccugggcaccuucaccuggacccugagcgacuccgaggggcacgacaugccgggcggguacugccucacgcgcuggaugcugaucgaggccgaccugaagugcuucggcaacaccgccguggccaagugcaacgagaagcacgacgaggaguucugcgacauguggcggcuguucgacuucaacaagcaggcgauccagcgccugaaggcccccgcccagaugaacauccagcugaucaacaaggccgucaacgcccucaucaacgaccagcugaugaugaagaaccaccuccgggacaucaugugcauccccuacugcaacuacagcaaguucugguaccucaacaacaccaccacggggcgcaccucccugccccggugcuggcugaucagcaacggcuccuaccucaacgagacccacuucagcgacgacaucgagcagcaggcggacaacaugaucaccgagaugcugcagaaggaguacauggaccgccagggcaagacgccgcuggggcucguggaccuguucguguucuccaccagcuucuaccugaucaccaucuuccugcaccucgucaagauccccacccaccggcacaucgugggcaagcccugccccaagccgcaccgccugaaccacauggggaucugcuccugcggccuguacaagcagcccggggugcccguccgguggaagcgcugaggacuaguuauaagacugacuagcccgaugggccucccaacgggcccuccuccccuccuugcaccgagauuaaucaaaggcucuuuucagagccaccaaaaaaaaaaaaaaaaaaaaaaaaaaaaaaaaaaaaaaaaaaaaaaaaaaaaaaaaaaaaaaaaagaauu

SEQ ID NO: 29388 - RNA, 1655 nt, Artificial Sequence; identical to SEQ ID NO: 29382
  mRNA product Design i-3 (hSL-A64-N5) comprising derived and/or modified sequence from LASV(Pinneo-NIG-1969;Clade I)__AIT17836__GPCmut5 (opt1)

SEQ ID NO: 29389 - RNA, 1655 nt, Artificial Sequence
  mRNA product Design i-3 (hSL-A64-N5) comprising derived and/or modified sequence from LASV(ISTH0009-NIG-2011;Clade II)__AIT17404__GPCmut5 (opt1)
aggagaaagcuuaccaugggccagaucaucaccuucuuccaggaggugccccacgucaucgaggaggugaugaacaucgugcugaucgcccucagccugcuggccauccucaaggggaucuacaacgucgcgaccugcggccuguucgggcugguguccuuccuccugcugugcggccgcagcugcuccacgaccuacaaggggguguacgagcuccagacccuggagcuggacauggccagccucaacaugaccaugccgcuguccugcacgaagaacaacagccaccacuacaucauggucggcaacgagaccggccuggagcucacccugaccaacacguccaucaucaaccacaaguucugcaaccugagcgacgcccacaagaagaaccucuacgaccacgcccugauguccaucaucagcaccuuccaccuguccauccccaacuucaaccaguacgaggccaugagcugcgacuucaacgggggcaagaucuccgugcaguacaaccucagccacgcguacgccguggacgccgccaaccacugcgggaccaucgcgaacggcguccugcagaccuucaugcggauggccuggggcggguccuacaucgcccuggacagcggcugcggguccugggacugcaucaugacgagcuaccaguaccucaucauccagaacaccaccugggaggaccacugccaguucucccgccccagccccaucggcuaccuggggcugcucagccagcggacccgcgacaucuacaucucccggcgccugcugggcacguucaccuggacccucagcgacuccgagggcaacgagacccccgggggcuacugccugacgcgguggaugcugaucgaggccgagcucaagugcuucgggaacaccgccguggcgaagugcaacgagaagcacgacgaggaguucugcgacaugcugcgccuguucgacuucaacaagcaggccauccggcgccucaagaccccggcccagaugagcauccagcugaucaacaaggccgugaacgcccugaucaacgaccagcucaucaugaagaaccaccuccgggacaucaugugcauccccuacugcaacuacuccaaguacugguaccugaaccacaccgucacgggcaagaccagccugccccgcugcuggcugguguccaacgggagcuaccugaacgagacccacuucuccgacgacaucgagcagcaggcggacaacaugaucaccgagcuccugcagaaggaguacauggaccggcagggcaagacgccgcugggccugguggaccucuucgucuucagcaccuccuucuaccugaucagcaucuuccugcaccucaucaagauccccacccaccgccacaucaccgggaagcccugccccaagccgcaccggcugaaccacaugggcaucugcuccugcgggcuguacaagcaccccggcgugcccgugaaguggaagcgcugaggacuaguuauaagacugacuagcccgaugggccucccaacgggcccuccuccccuccuugcaccgagauuaaucaaaggcucuuuucagagccaccaaaaaaaaaaaaaaaaaaaaaaaaaaaaaaaaaaaaaaaaaaaaaaaaaaaaaaaaaaaaaaaaagaauu

SEQ ID NO: 29390 - RNA, 1655 nt, Artificial Sequence
  mRNA product Design i-3 (hSL-A64-N5) comprising derived and/or modified sequence from LASV(ISTH2010-NIG-2012;Clade II)__AIT17482__GPCmut5 (opt1)
aggagaaagcuuaccaugggccagaucaucaccuucuuccaggaggugccccacgucaucgaggaggugaugaacaucgugcugaucgcccucagccugcuggccauccucaaggggaucuacaacgucgcgaccugcggccuguucgggcugguguccuuccuccugcugugcggccgcagcugcuccacgaccuacaaggggguguacgagcuccagacccuggagcuggacauggccagccucaacaugaccaugccgcuguccugcacgaagaacaacagccaccacuacaucauggucggcaacgagaccggccuggagcucacccugaccaacacguccaucaucaaccacaaguucugcaaccugagcgacgcccacaagaagaaccucuacgaccacgcccugauguccaucaucagcaccuuccaccuguccauccccaacuucaaccaguacgaggccaugagcugcgacuucaacgggggcaagaucuccgugcaguacaaccucagccacgcguacgccguggacgccgccaaccacugcgggaccaucgcgaacggcguccugcagaccuucaugcggauggccuggggcggguccuacaucgcccuggacagcggcugcggguccugggacugcaucaugacgagcuaccaguaccucaucauccagaacaucaccugggaggaccacugccaguucucccgccccagccccaucggcuaccuggggcugcucagccagcggacccgcgacaucuacaucucccggcgccugcugggcaccuucacguggacccucagcgacuccgagggcaacgagacccccgggggcuacugccugacccgguggaugcugaucgaggccgagcucaagugcuucgggaacacggccguggcgaagugcaacgagaagcacgacgaggaguucugcgacaugcugcgccuguucgacuucaacaagcaggccauccggcgccucaagaccccggcccagaugagcauccagcugaucaacaaggccgugaacgcccugaucaacgaccagcucaucaugaagaaccaccuccgggacaucaugugcauccccuacugcaacuacuccaaguacugguaccugaaccacaccgucaccggcaagacgagccugccccgcugcuggcugguguccaacgggagcuaccugaacgagacccacuucuccgacgacaucgagcagcaggcggacaacaugaucaccgagcuccugcagaaggaguacaucgaccggcagggcaagaccccgcugggccugguggaccucuucgucuucagcacguccuucuaccugaucagcaucuuccugcaccucgugaagauccccacccaccgccacguggucgggaagcccugccccaagccgcaccggcugaaccacaugggcaucugcuccugcgggcuguacaagcaccccggcgugcccgugaaguggaagcgcugaggacuaguuauaagacugacuagcccgaugggccucccaacgggcccuccuccccuccuugcaccgagauuaaucaaaggcucuuuucagagccaccaaaaaaaaaaaaaaaaaaaaaaaaaaaaaaaaaaaaaaaaaaaaaaaaaaaaaaaaaaaaaaaaagaauu

SEQ ID NO: 29391 - RNA, 1655 nt, Artificial Sequence
  mRNA product Design i-3 (hSL-A64-N5) comprising derived and/or modified sequence from LASV(Lassa virus/H.sapiens-wt/NGA/2015/ISTH_0543;Clade II)__AVO03639__GPCmut5 (opt1)
aggagaaagcuuaccaugggccagaucaucaccuucuuccaggaggugccccacgucaucgaggaggugaugaacaucgugcugaucgcccucagccugcuggccauccucaaggggaucuacaacgucgcgaccugcggccuguucgggcugguguccuuccuccugcugugcggccgcagcugcuccacgaccuacaaggggguguacgagcuccagacccuggagcuggacauggccaaccucaacaugaccaugccgcugagcugcacgaagaacaacucccaccacuacaucauggucggcaacgagaccggccuggagcucacccugaccaacacgagcaucaucaaccacaaguucugcaaccuguccgacgcccacaagaagaaccucuacgaccacgcccugaugagcaucaucuccaccuuccaccugagcauccccaacuucaaccaguacgaggccauguccugcgacuucaacgggggcaagaucagcgugcaguacaaccucucccacaccuacgcgguggacgccgccaaccacugcgggaccaucgccaacggcguccugcagacguucaugcggauggcguggggcgggagcuacaucgcccuggacuccggcugcgggagcugggacugcaucaugaccuccuaccaguaccucgugauccagaacaccaccugggaggaccacugccaguucagccgccccucccccaucggcuaccuggggcugcucagccagcggacgcgcgacaucuacaucagccggcgccugcugggcaccuucaccuggacccucuccgacagcgagggcaacgagacgcccgggggcuacugccugacccgguggaugcugaucgaggccgagcucaagugcuucgggaacaccgccguggccaagugcaacgagaagcacgacgaggaguucugcgacaugcugcgccuguucgacuucaacaagcaggcgauccggcgccucaagaccccggcccagauguccauccagcugaucaacaaggccgucaacgcccugaucaacgaccagcucaucaugaagaaccaccuccgggacaucaugugcauccccuacugcaacuacagcaaguacugguaccugaaccacacggugaccggcaagaccucccugccccgcugcuggcuggugagcaacggguccuaccugaacgagacccacuucagcgacgacaucgagcagcaggccgacaacaugaucacggagcuccugcagaaggaguacaucgaccggcagggcaagaccccgcugggccuggucgaccucuucguguucuccaccagcuucuaccugaucuccaucuuccugcaccucgugaagauccccacccaccgccacaucacggggaagcccugccccaagccgcaccggcugaaccacaugggcaucugcagcugcgggcuguacaagcaccccggcguccccgugaaguggaagcgcugaggacuaguuauaagacugacuagcccgaugggccucccaacgggcccuccuccccuccuugcaccgagauuaaucaaaggcucuuuucagagccaccaaaaaaaaaaaaaaaaaaaaaaaaaaaaaaaaaaaaaaaaaaaaaaaaaaaaaaaaaaaaaaaaagaauu

SEQ ID NO: 29392 - RNA, 1655 nt, Artificial Sequence
  mRNA product Design i-3 (hSL-A64-N5) comprising derived and/or modified sequence from LASV(Lassa virus/H.sapiens-wt/NGA/2016/ISTH_0009;Clade II)__AVO03571__GPCmut5 (opt1)
aggagaaagcuuaccaugggccagaucaucaccuucuuccaggaggugccccacgucaucgaggaggugaugaacaucgugcugaucgcccucagccugcuggccauccucaaggggaucuacaacgucgcgaccugcggccugcuggggcucguguccuuccugcugcucugcggccgcagcugcuccacgaccuacaaggggguguacgagcugcagacccuggagcucgacauggccagccugaacaugaccaugccgcuguccugcacgaagaacaacagccaccacuacaucauggucggcaacgagaccggccucgagcugacccugaccaacacguccaucaucaaccacaaguucugcaaccucagcgacgcccacaagaagaaccuguacgaccacgcccugauguccaucaucagcaccuuccaccucuccauccccaacuucaaccaguacgaggccaugagcugcgacuucaacgggggccggaucuccgugcaguacaaccugagccacuccuacgcgguggacgccgccaaccacugcgggaccaucgccaacggcguccugcagaccuucaugcgcauggcguggggcgggagcuacaucgcccucgacuccggcugcgggagcugggacugcaucaugacguccuaccaguaccugaucauccagaacaccaccugggaggaccacugccaguucagccggcccagccccaucggcuaccuggggcuccugucccagcgcacccgggacaucuacaucagccgccggcugcucggcacguucaccuggacccuguccgacagcgagggcaacgagacccccgggggcuacugccugacgcgcuggaugcucaucgaggccgagcugaagugcuucgggaacaccgccguggccaagugcaacgagaagcacgacgaggaguucugcgacaugcugcggcuguucgacuucaacaagcaggcgauccgccggcugaagaccccggcccagauguccauccagcugaucaacaaggccgugaacgcccucaucaacgaccagcugaucaugaagaaccaccuccgcgacaucaugugcauccccuacugcaacuacagcaaguacugguaccucaaccacaccgucacgggcaagaccucccugccccggugcuggcuggugagcaacggguccuaccucaacgagacccacuucagcgacgacaucgagcagcaggccgacaacaugaucaccgagcugcugcagaaggaguacaucgaccgccagggcaagacgccgcugggccucguggaccuguucgucuucuccaccagcuucuaccugaucuccaucuuccuccaccuggugaagauccccacccaccggcacaucaccgggaagcccugccccaagccgcaccgccugaaccacaugggcaucugcagcugcgggcucuacaaccaccccggcgugcccgucaaguggaagcggugaggacuaguuauaagacugacuagcccgaugggccucccaacgggcccuccuccccuccuugcaccgagauuaaucaaaggcucuuuucagagccaccaaaaaaaaaaaaaaaaaaaaaaaaaaaaaaaaaaaaaaaaaaaaaaaaaaaaaaaaaaaaaaaaagaauu

SEQ ID NO: 29393 - RNA, 1655 nt, Artificial Sequence
  mRNA product Design i-3 (hSL-A64-N5) comprising derived and/or modified sequence from LASV(Lassa virus/H.sapiens-wt/NGA/2016/ISTH_0017;Clade II)__AVO03567__GPCmut5 (opt1)
aggagaaagcuuaccaugggccagaucaucaccuucuuccaggaggugccccacgucaucgaggaggugaugaacaucgugcugaucgcccucagccugcuggccauccucaaggggaucuacaacgucgcgaccugcggccuguucgggcugguguccuuccuccugcugugcggccgcagcugcuccacgaccuacaaggggguguacgagcuccagacccuggagcuggacauggccagccucaacaugaccaugccgcuguccugcacgaagaacaacagccaccacuacaucauggucggcaacgagaccggccuggagcucacccugaccaacacguccaucaucaaccacaaguucugcaaccugagcgacgcccacaagaagaaccucuacgaccacgcccugauguccaucaucagcaccuuccaccuguccauccccaacuucaaccaguacgaggccaugagcugcgacuucaacgggggcaagaucuccgugcaguacaaccucagccacaccuacgcgaucgacgccgccaaccacugcgggaccaucgccaacggcgugcugcagacguucaugcggauggcguggggcggguccuacaucgcccuggacagcggcugcggguccugggacugcaucaugaccagcuaccaguaccucaucauccagaacaccaccugggaggaccacugccaguucucccgccccagccccaucggcuaccuggggcugcucagccagcggacgcgcgacaucuacaucucccggcgccugcugggcaccuucaccuggacccucagcgacuccgagggcaacgagacgcccgggggcuacugccugacccgguggaugcugaucgaggccgagcucaagugcuucgggaacaccgccgucgccaagugcaacgagaagcacgacgaggaguucugcgacaugcugcgccuguucgacuucaacaagcaggcgauccggcgccucaagaccccggcccagaugagcauccagcugaucaacaaggccgugaacgcccugaucaacgaccagcucaucaugaagaaccaccuccgggacaucaugugcauccccuacugcaacuacuccaaguacugguaccugaaccacacggugaccggcaagaccagccugccccgcugcuggcuggucuccaacgggagcuaccugaacgagacccacuucuccgacgacaucgagcagcaggccgacaacaugaucacggagcuccugcagaaggaguacauggaccggcagggcaagaccccgcugggccugguggaccucuucguguucagcaccuccuucuaccugaucagcaucuuccugcaccucguccgcauccccacccaccggcacgugaucgggaagcccugccccaagccgcaccgccugaaccacaugggcaucugcuccugcgggcuguacaagcaccccggcgugcccgucaaguggaagcggugaggacuaguuauaagacugacuagcccgaugggccucccaacgggcccuccuccccuccuugcaccgagauuaaucaaaggcucuuuucagagccaccaaaaaaaaaaaaaaaaaaaaaaaaaaaaaaaaaaaaaaaaaaaaaaaaaaaaaaaaaaaaaaaaagaauu

SEQ ID NO: 29394 - RNA, 1655 nt, Artificial Sequence
  mRNA product Design i-3 (hSL-A64-N5) comprising derived and/or modified sequence from LASV(Lassa virus/H.sapiens-wt/NGA/2018/ISTH_0959;Clade II)__AVV65099__GPCmut5 (opt1)
aggagaaagcuuaccaugggccagaucaucaccuucuuccaggaggugccccacgucaucgaggaggugaugaacaucgugcugaucgcccucagccugcuggccauccucaaggggaucuacaacgucgugaccugcggccuguucgggcugguguccuuccuccugcugugcggccgcagcugcuccacgaccuacaagggggucuacgagcuccagacccuggagcuggacauggcgagccucaacaugaccaugccgcuguccugcacgaagaacaacagccaccacuacaucauggugggcaacgagaccggccuggagcucacccugaccaacacguccaucaucaaccacaaguucugcaaccugagcgacgcccacaagaagaaccucuacgaccacgcccugauguccaucaucagcaccuuccaccuguccauccccaacuucaaccaguacgaggccaugagcugcgacuucaacgggggcaagaucuccgugcaguacaaccucagccacgccuacgcgaucgacgccgccaaccacugcgggaccaucgccaacggcguccugcagaccuucaugcggauggcguggggcggguccuacaucgcccuggacagcggcugcggguccugggacugcaucaugacgagcuaccaguaccucaucauccagaacaccaccugggaggaccacugccaguucucccgccccagccccaucggcuaccuggggcugcucagccagcggacccgcgacaucuacaucucccggcgccugcugggcacguucaccuggacccucagcgacuccgagggcaacgagacccccgggggcuacugccugacgcgguggaugcugaucgaggccgagcucaagugcuucgggaacaccgccguggccaagugcaacgagaagcacgacgaggaguucugcgacaugcugcgccuguucgacuucaacaagcaggcgauccggcgccucaagaccccggcccagaugagcauccagcugaucaacaaggccgugaacgcccugaucaacgaccagcucaucaugaagaaccaccuccgggacaucaugugcauccccuacugcaacuacuccaaguacugguaccugaaccacaccgucacgggcaagaccagccugccccgcugcuggcugguguccaacgggagcuaccugaacgagacccacuucuccgacgacaucgagcagcaggccgacaacaugaucaccgagcuccugcagaaggaguacaucgaccggcagggcaagacgccgcugggccugguggaccucuucgucuucagcaccuccuucuaccugaucagcaucuuccugcaccucgugaagauccccacccaccgccacgugaucgggaagcccugccccaagccgcaccggcugaaccacaugggcaucugcuccugcgggcuguacaagcaccccggcguccccgugaaguggaagcgcugaggacuaguuauaagacugacuagcccgaugggccucccaacgggcccuccuccccuccuugcaccgagauuaaucaaaggcucuuuucagagccaccaaaaaaaaaaaaaaaaaaaaaaaaaaaaaaaaaaaaaaaaaaaaaaaaaaaaaaaaaaaaaaaaagaauu

SEQ ID NO: 29395 - RNA, 1655 nt, Artificial Sequence
  mRNA product Design i-3 (hSL-A64-N5) comprising derived and/or modified sequence from LASV(LASV003-NIG-2008;Clade II)__AIT17580__GPCmut5 (opt1)
aggagaaagcuuaccaugggccagaucaucaccuucuuccaggaggugccccacgucaucgaggaggugaugaacaucgugcugaucgcccucagccugcuggccauccucaaggggaucuacaacgucgcgaccugcggccuguucgggcugguguccuuccuccugcugugcggccgcagcugcuccacgaccuacaaggggguguacgagcuccagacccuggagcuggacauggccagccucaacaugaccaugccgcuguccugcacgaagaacaacagccaccacuacaucauggucggcaacgagaccggccuggagcucacccugaccaacacguccaucaucaaccacaaguucugcaaccugagcgacgcccacaagaagaaccucuacgaccacgcccugauguccaucaucagcaccuuccaccuguccauccccaacuucaaccaguacgaggccaugagcugcgacuucaacgggggcaagaucuccgugcaguacaaccucagccacaccuacgcgguggacgccgccaaccacugcgggaccaucgccaacggcguccugcagacguucaugcggauggcguggggcggguccuacaucgcccuggacagcggcugcggguccugggacugcaucaugaccagcuaccaguaccucaucauccagaacaccaccugggaggaccacugccaguucucccgccccagccccaucggcuaccuggggcugcucagccagcggacgcgcgacaucuacaucucccggcgccugcugggcaccuucaccuggacccucagcgacuccgagagcaacgagacgccgggcggguacugccugacccgguggaugcugaucgaggccgagcucaagugcuucggcaacaccgccguggccaagugcaacgagaagcacgacgaggaguucugcgacaugcugcgccuguucgacuucaacaagcaggcgauccggcgccucaaggcccccgcccagauguccauccagcugaucaacaaggccgugaacgcccugaucaacgaccagcucaucaugaagaaccaccuccgggacaucaugugcauccccuacugcaacuacagcaaguacugguaccugaaccacaccgucacggggcgcaccucccugccccggugcuggcuggugagcaacggcuccuaccugaacgagacccacuucagcgacgacaucgagcagcaggcggacaacaugaucaccgagcuccugcagaaggaguacauggaccgccaggggaagacgccgcugggccugguggaccucuucgucuucuccaccagcuucuaccugaucuccaucuuccugcaccucgugaagauccccacccaccggcacgugaucggcaagcccugccccaagccgcaccgccugaaccacauggggaucugcagcugcggccuguacaagcaccccgggguccccgugaaguggaagcggugaggacuaguuauaagacugacuagcccgaugggccucccaacgggcccuccuccccuccuugcaccgagauuaaucaaaggcucuuuucagagccaccaaaaaaaaaaaaaaaaaaaaaaaaaaaaaaaaaaaaaaaaaaaaaaaaaaaaaaaaaaaaaaaaagaauu

SEQ ID NO: 29396 - RNA, 1655 nt, Artificial Sequence
  mRNA product Design i-3 (hSL-A64-N5) comprising derived and/or modified sequence from LASV(LASV035-NIG-2009;Clade II)__AIT17588__GPCmut5 (opt1)
aggagaaagcuuaccaugggccagaucaucaccuucuuccaggaggugccccacgucaucgaggaggugaugaacaucgugcugaucgcccucagccugcuggccauccucaaggggaucuacaacgucgcgaccugcggccuguucgggcugguguccuuccuccugcugugcggccgcagcugcuccacgaccuacaaggggguguacgagcuccagacccuggagcuggacauggccagccucaacaugaccaugccgcuguccugcacgaagaacaacagccaccacuacaucauggucggcaacgagaccggccuggagcucacccugaccaacacguccaucaucaaccacaaguucugcaaccugagcgacgcccacaagaagaaccucuacgaccacgcccugauguccaucaucagcaccuuccaccuguccauccccaacuucaaccaguacgaggccaugagcugcgacuucaacgggggcaagaucuccgugcaguacaaccucagccacgcguacgccguggacgccgccaaccacugcgggaccaucgcgaacggcguccugcagaccuucaugcggauggccuggggcggguccuacaucgcccuggacagcggcugcggguccugggacugcaucaugacgagcuaccaguaccucaucauccagaacaccaccugggaggaccacugccaguucucccgccccagccccaucggcuaccuggggcugcucagccagcggacccgcgacaucuacaucucccggcgccugcugggcacguucaccuggacccucagcgacuccgagggcaacgagacccccgggggcuacugccugacgcgguggaugcugaucgaggccgagcucaagugcuucgggaacaccgccguggcgaagugcaacgagaagcacgacgaggaguucugcgacaugcugcgccuguucgacuucaacaagcaggccauccggcgccucaaggccccggcccagaugagcauccagcugaucaacaaggccgugaacgcgcugaucaacgaccagcucaucaugaagaaccaccuccgggacaucaugugcauccccuacugcaacuacuccaaguacugguaccugaaccacaccgucaccggcaagacgagccugccccgcugcuggcugguguccaacgggagcuaccugaacgagacccacuucuccgacgacaucgagcagcaggccgacaacaugaucaccgagcuccugcagaaggaguacaucgaccggcagggcaagaccccgcugggccugguggaccucuucgucuucagcacguccuucuaccugaucagcaucuuccugcaccucgugaagauccccacccaccgccacgugaucgggaagcccugccccaagccgcaccggcugaaccacaugggcaucugcuccugcgggcuguacaagcaccccggcguccccgugaaguggaagcgcugaggacuaguuauaagacugacuagcccgaugggccucccaacgggcccuccuccccuccuugcaccgagauuaaucaaaggcucuuuucagagccaccaaaaaaaaaaaaaaaaaaaaaaaaaaaaaaaaaaaaaaaaaaaaaaaaaaaaaaaaaaaaaaaaagaauu

SEQ ID NO: 29397 - RNA, 1655 nt, Artificial Sequence
  mRNA product Design i-3 (hSL-A64-N5) comprising derived and/or modified sequence from LASV(LASV1000-NIG-2009;Clade II)__AIT17782__GPCmut5 (opt1)
aggagaaagcuuaccaugggccagaucaucaccuucuuccaggaggugccccacgucaucgaggaggugaugaacaucgugcugaucgcccucagccugcuggccauccucaaggggaucuacaacgucgcgaccugcggccuguucgggcugguguccuuccuccugcugugcggccgcagcugcuccacgaccuacaaggggguguacgagcuccagacccuggagcuggacauggccagccucaacaugaccaugccgcuguccugcacgaagaacaacagccaccacuacaucauggucggcaacgagaccggccuggagcucacccugaccaacacguccaucaucaaccacaaguucugcaaccugagcgacgcccacaagaagaaccucuacgaccacgcccugauguccaucaucagcaccuuccaccuguccauccccaacuucaaccaguacgaggccaugagcugcgacuucaacgggggcaagaucuccgugcaguacaaccucagccacaccuacgcgguggacgccgccaaccacugcgggaccaucgccaacggcguccugcagacguucaugcggauggcguggggcggguccuacaucgcccuggacagcggcugcggguccugggacugcaucaugaccagcuaccaguaccucaucauccagaacaccaccugggaggaccacugccaguucucccgccccagccccaucggcuaccuggggcugcucagccagcggacgcgcgacaucuacaucucccggcgccugcugggcaccuucaccuggacccucagcgacuccgagggcaacgagacgcccgggggcuacugccugacccgguggaugcugaucgaggccgagcucaagugcuucgggaacaccgccguggccaagugcaacgagaagcacgacgaggaguucugcgacaugcugcgccuguucgacuucaacaagcaggcgaucaagcggcucaagaccccggcccagaugagcauccagcugaucaacaaggccgugaacgcccugaucaacgaccagcucaucaugaagaaccaccuccgcgacaucaugugcauccccuacugcaacuacuccaaguacugguaccugaaccacacggucaccggcaagaccagccugccccggugcuggcugguguccaacgggagcuaccugaacgagacccacuucuccgacgacaucgagcagcaggccgacaacaugaucacggagcuccugcagaaggaguacaucgaccgccagggcaagaccccgcugggccugguggaccucuucgucuucagcaccuccuucuaccugaucagcaucuuccugcaccucgugaagauccccacccaccggcacguggucgggaagcccugccccaagccgcaccgccugaaccacaugggcaucugcuccugcgggcuguacaagcaccccggcgugcccgugaaguggaagcggugaggacuaguuauaagacugacuagcccgaugggccucccaacgggcccuccuccccuccuugcaccgagauuaaucaaaggcucuuuucagagccaccaaaaaaaaaaaaaaaaaaaaaaaaaaaaaaaaaaaaaaaaaaaaaaaaaaaaaaaaaaaaaaaaagaauu

SEQ ID NO: 29398 - RNA, 1655 nt, Artificial Sequence
  mRNA product Design i-3 (hSL-A64-N5) comprising derived and/or modified sequence from LASV(LASV221-NIG-2010;Clade II)__AIT17624__GPCmut5 (opt1)
aggagaaagcuuaccaugggccagaucaucaccuucuuccaggaggugccccacgucaucgaggaggugaugaacaucgugcugaucgcccucagccugcuggccauccucaaggggaucuacaacgucgcgaccugcggccuguucgggcugguguccuuccuccugcugugcggccgcagcugcuccacgaccuacaaggggguguacgagcuccagacccuggagcuggacauggccagccucaacaugaccaugccgcuguccugcacgaagaacaacagccaccacuacaucauggucggcaacgagaccggccuggagcucacccugaccaacacguccaucaucaaccacaaguucugcaaccugagcgacgcccacaagaagaaccucuacgaccacgcccugauguccaucaucagcaccuuccaccuguccauccccaacuucaaccaguacgaggccaugagcugcgacuucaacgggggcaagaucuccgugcaguacaaccucagccacaccuacgcgaucgacgccgccaaccacugcgggaccaucgccaacggcgugcugcagacguucaugcggauggcguggggcggguccuacaucgcccuggacagcggcugcggguccugggacugcaucaugaccagcuaccaguaccucaucauccagaacaccaccugggaggaccacugccaguucucccgccccagccccaucggcuaccuggggcugcucagccagcggacgcgcgacaucuacaucucccggcgccugcugggcaccuucaccuggacccucagcgacuccgagggcaacgagacgcccgggggcuacugccugacccgguggaugcugaucgaggccgagcucaagugcuucgggaacaccgccgucgccaagugcaacgagaagcacgacgaggaguucugcgacaugcugcgccuguucgacuucaacaagcaggcgauccggcgccucaagaccccggcccagaugagcauccagcugaucaacaaggccgugaacgcccugaucaacgaccagcucaucaugaagaaccaccuccgggacaucaugugcauccccuacugcaacuacuccaaguacugguaccugaaccacacggugaccggcaagaccagccugccccgcugcuggcuggucuccaacgggagcuaccugaacgagacccacuucuccgacgacaucgagcagcaggccgacaacaugaucacggagaugcuccagaaggaguacauggaccggcagggcaagaccccgcugggccugguggaccuguucguguucagcaccuccuucuaccucaucagcaucuuccugcaccuggucaagauccccacccaccgccacgugaucgggaagcccugccccaagccgcaccggcucaaccacaugggcaucugcuccugcgggcuguacaagcaccccggcgugcccgucaaguggaagcgcugaggacuaguuauaagacugacuagcccgaugggccucccaacgggcccuccuccccuccuugcaccgagauuaaucaaaggcucuuuucagagccaccaaaaaaaaaaaaaaaaaaaaaaaaaaaaaaaaaaaaaaaaaaaaaaaaaaaaaaaaaaaaaaaaagaauu

SEQ ID NO: 29399 - RNA, 1655 nt, Artificial Sequence
  mRNA product Design i-3 (hSL-A64-N5) comprising derived and/or modified sequence from LASV(LASV237-NIG-2010;Clade II)__AIT17638__GPCmut5 (opt1)
aggagaaagcuuaccaugggccagaucaucaccuucuuccaggaggugccccacgucaucgaggaggugaugaacaucgugcugaucgcccucagccugcuggccauccucaaggggaucuacaacgucgcgaccugcggccuguucgggcugguguccuuccuccugcugugcggccgcagcugcuccacgaccuacaaggggguguacgagcuccagacccuggagcuggacauggccagccucaacaugaccaugccgcuguccugcacgaagaacaacagccaccacuacaucauggucggcaacgagaccggccuggagcucacccugaccaacacguccaucaucaaccacaaguucugcaaccugagcgacgcccacaagaaggaccucuacgaccacgcccugauguccaucaucagcaccuuccaccuguccauccccaacuucaaccaguacgaggccaugagcugcgacuucaacgggggcaagaucuccgugcaguacaaccucagccacaccuacgcgguggacgccgccaaccacugcgggaccaucgccaacggcguccugcagacguucaugcggauggcguggggcggguccuacaucgcccuggacagcggcugcggguccugggacugcaucaugaccagcuaccaguaccucaucauccagaacaccaccugggaggaccacugccaguucucccgccccagccccaucggcuaccuggggcugcucagccagcggacgcgcgacaucuacaucucccggcgccugcugggcaccuucaccuggacccucagcgacuccgagggcaacgagacgcccgggggcuacugccugacccgguggaugcugaucgaggccgagcucaagugcuucgggaacaccgccguggccaagugcaacgagaagcacgacgaggaguucugcgacaugcugcgccuguucgacuucaacaagcaggcgauccggcgccucaagaccccggcccagaugagcauccagcugaucaacaaggccgugaacgcccugaucaacgaccagcucaucaugaagaaccaccuccgggacaucaugugcauccccuacugcaacuacuccaaguacugguaccugaaccacacggucaccggcaagaccagccugccccgcugcuggcugguguccaacgggagcuaccugaacgagacccacuucuccgacgacaucgagcagcaggccgacaacaugaucacggagcuccugcagaaggaguacauggaccggcagggcaagaccccgcugggccugguggaccucuucgucuucagcaccuccuucuaccugaucagcaucuuccugcaccucaucaagauccccacccaccgccacaucacggggaagcccugccccaagccgcaccggcugaaccacaugggcaucugcuccugcgggcuguacaagcaccccggcgugcccgugaaguggaagcgcugaggacuaguuauaagacugacuagcccgaugggccucccaacgggcccuccuccccuccuugcaccgagauuaaucaaaggcucuuuucagagccaccaaaaaaaaaaaaaaaaaaaaaaaaaaaaaaaaaaaaaaaaaaaaaaaaaaaaaaaaaaaaaaaaagaauu

SEQ ID NO: 29400 - RNA, 1655 nt, Artificial Sequence
  mRNA product Design i-3 (hSL-A64-N5) comprising derived and/or modified sequence from LASV(LASV253-NIG-2011;Clade II)__AIT17670__GPCmut5 (opt1)
aggagaaagcuuaccaugggccagaucaucaccuucuuccaggaggugccccacgucaucgaggaggugaugaacaucgugcugaucgcccucagccugcuggccauccucaaggggaucuacaacgucgcgaccugcggccuguucgggcugguguccuuccuccugcugugcggccgcagcugcuccacgaccuacaaggggguguacgagcuccagacccuggagcuggacauggccagccucaacaugaccaugccgcuguccugcacgaagaacaacagccaccacuacaucauggucggcaacgagaccggccuggagcucacccugaccaacacguccaucaucaaccacaaguucugcaaccugagcgacgcccacaagaagaaccucuacgaccacgcccugauguccaucaucagcaccuuccaccuguccauccccaacuucaaccaguacgaggccaugagcugcgacuucaacgggggcaagaucuccgugcaguacaaccucagccacaccuacgcgguggacgccgccaaccacugcgggaccaucgccaacggcguccugcagacguucaugcggauggcguggggcggguccuacaucgcccuggacagcggcugcggguccugggacugcaucaugaccagcuaccaguaccucaucauccagaacaccaccugggaggaccacugccaguucucccgccccagccccaucggcuaccuggggcugcucagccagcggacgcgcgacaucuacaucucccggcgccugcugggcaccuucaccuggacccucagcgacuccgagggcaacgagacgcccgggggcuacugccugacccgguggaugcugaucgaggccgagcucaagugcuucgggaacaccgccguggccaagugcaacgagaagcacgacgaggaguucugcgacaugcugcgccuguucgacuucaacaagcaggcgauccggcgccucaaggccccggcccagaugagcauccagcugaucaacaaggccgugaacgcccugaucaacgaccagcucaucaugaagaaccaccuccgggacaucaugugcauccccuacugcaacuacuccaaguacugguaccugaaccacaccgucacgggccgcaccagccugccccggugcuggcugguguccaacgggagcuaccugaacgagacccacuucuccgacgacaucgagcagcaggcggacaacaugaucaccgagcuccugcagaaggaguacaucgaccgccagggcaagacgccgcugggccugguggaccucuucgucuucagcaccuccuucuaccugaucagcaucuuccugcaccucgugaagauccccacccaccggcacaucaucgggaagcccugccccaagccgcaccgccugaaccacaugggcaucugcuccugcgggcuguacaagcaccccggcgugcccgucaaguggaagcggugaggacuaguuauaagacugacuagcccgaugggccucccaacgggcccuccuccccuccuugcaccgagauuaaucaaaggcucuuuucagagccaccaaaaaaaaaaaaaaaaaaaaaaaaaaaaaaaaaaaaaaaaaaaaaaaaaaaaaaaaaaaaaaaaagaauu

SEQ ID NO: 29401 - RNA, 1655 nt, Artificial Sequence
  mRNA product Design i-3 (hSL-A64-N5) comprising derived and/or modified sequence from LASV(LASV254-NIG-2011;Clade II)__AIT17674__GPCmut5 (opt1)
aggagaaagcuuaccaugggccagaucaucaccuucuuccaggaggugccccacgucaucgaggaggugaugaacaucgugcugaucgcccucagccugcuggccauccucaaggggaucuacaacgucgcgaccugcggccuguucgggcugguguccuuccuccugcugugcggccgcagcugcuccacgaccuacaaggggguguacgagcuccagacccuggagcuggacaugaccaaccucaacaugacgaugccgcugagcugcaccaagaacaacucccaccacuacaucauggucggcaacgagaccggccuggagcucacccugacgaacaccagcaucaucaaccacaaguucugcaaccuguccgacgcccacaagaagaaccucuacaaccacgcccugaugagcaucaucuccaccuuccaccugagcauccccaacuucaaccaguacgaggccauguccugcgacuucaacgggggcaagaucagcgugcaguacaaccucucccacagcuacgccguggacgcggccaaccacugcgggaccaucgccaacggcguccugcagacguucaugcggauggccuggggcggguccuacaucgcgcuggacagcggcugcgggaacugggacugcaucaugaccuccuaccaguaccucaucauccagaacaccaccugggaggaccacugccaguucagccgccccucccccaucggcuaccuggggcugcucagccagcggacgcgcgacaucuacaucagccggcgccugcugggcaccuucaccuggacccucuccgacagcgagggcaacgagacgcccgggggcuacugccugacccgguggaugcugaucgaggccgagcucaagugcuucgggaacaccgccguggccaagugcaacgagaagcacgacgaggaguucugcgacaugcugcgccuguucgacuucaacaagcaggccauccggcgccucaagaccccggcgcaggccaacauccagcugaucaacaaggccgugaacgcccugaucaacgaccagcucaucaugaagaaccaccuccgggacaucaugugcauccccuacugcaacuacuccaaguacugguaccugaaccacacggucaccggcaagaccagccugccccgcugcuggcugguguccaacgggagcuaccugaacgagacccacuucuccgacgacaucgagcagcaggccgacaacaugaucacggagcuccugcagaaggaguacauggaccggcagggcaagaccccgcugggccugguggaccucuucgucuucagcaccuccuucuaccugaucagcaucuuccugcaccucgugaagauccccacccaccgccacgugaucgggaagcccugccccaagccgcaccggcugaaccacaugggcaucugcuccugcgggcuguacaagcaccccggcguccccgugaaguggaagcgcugaggacuaguuauaagacugacuagcccgaugggccucccaacgggcccuccuccccuccuugcaccgagauuaaucaaaggcucuuuucagagccaccaaaaaaaaaaaaaaaaaaaaaaaaaaaaaaaaaaaaaaaaaaaaaaaaaaaaaaaaaaaaaaaaagaauu

SEQ ID NO: 29402 - RNA, 1655 nt, Artificial Sequence
  mRNA product Design i-3 (hSL-A64-N5) comprising derived and/or modified sequence from LASV(Nig08-A19;Clade III)__ADU56618__GPCmut5 (opt1)
aggagaaagcuuaccaugggccagaucgugaccuucuuccaggaggucccccacgugaucgaggaggugaugaacaucguccugaucgcccucagcauccuggccauccugaaggggcucuacaacaucgcgaccugcggccugaucgggcuggugacguuccuccugcuguccggccgcagcugcuccaugaccuacaaggggguguacgagcuccagacccuggagcugaacaugaacacccucaacaugacgaugccgcugagcugcaccaagaacaacucccaccacuacaucauggucggcaacgagaccggccuggagcucacccugacgaacaccagccugcuccaccacaaguucugcaaccuguccgacgcccacaagaagaaccuguacgaccacacccucaugagcaucaucuccaccuuccaccugagcauccccaacuucaaccaguacgaggccauguccugcgacuucaacgggggcaagaucacggugcaguacaaccugagccacuccuacgccaucgacgccgcgaaccacugcgggaccguggccaacggcguccuccagaccuucaugcggauggccuggggcgggagcuacaucgcccuggacuccggcugcgggaagugggacugcaucaugaccagcuaccaguaccugaucauccagaacacgaccugggaggaccacugccaguucucccgccccagccccaucggcuaccucgggcugcugucccagcggacccgcgacaucuacaucagccggcgccuccugggcaccuucacguggacccugagcgacuccgagggcaacgagacccccgggggcuacugccucacccgguggaugcugaucgaggcggagcugaagugcuucgggaacacggccguggccaagugcaacgagaagcacgacgaggaguucugcgacaugcuccgccuguucgacuucaacaagcaggccauccggcgccugaaggccccggcgcagaugagcauccagcucaucaacaaggccgugaacgcccugaucaacgaccagcugaucaugaagaaccaccuccgggacaucaugugcauccccuacugcaacuacuccaaguacugguaccugaaccacaccagcaccggccgcaccucccugccccggugcuggcucgucagcaacggguccuaccugaacgagacgcacuucagcgacgacaucgagcagcaggccgacaacaugaucaccgagaugcugcagaaggaguaccuggaccgccagggcaagaccccgcucggccugguggaccuguucguguucuccaccagcuucuaccucaucuccaucuuccugcaccuggucaagauccccacgcaccggcacaucguggggaagcccugccccaagccgcaccgccucaaccacaugggcaucugcagcugcgggcuguacaagcagcccggcgugcccguccgguggaagcgcugaggacuaguuauaagacugacuagcccgaugggccucccaacgggcccuccuccccuccuugcaccgagauuaaucaaaggcucuuuucagagccaccaaaaaaaaaaaaaaaaaaaaaaaaaaaaaaaaaaaaaaaaaaaaaaaaaaaaaaaaaaaaaaaaagaauu

SEQ ID NO: 29403 - RNA, 1658 nt, Artificial Sequence
  mRNA product Design i-3 (hSL-A64-N5) comprising derived and/or modified sequence from LASV(G1180-SLE-2010;Clade IV)__AIT17168__GPCmut5 (opt1)
aggagaaagcuuaccaugggccagaucgugaccuucuuccaggaggucccccacgugaucgaggaggugaugaacaucguccugaucgcccucagcauccuggccgugcugaaggggcucuacaacuucgcgaccugcggccugguggggcugcucacguuccugcugcucugcggccgcuccugcaccgccagccgguacaagggggucuacgagcugcagacccuggagcucaacauggagacccugaacaugacgaugccgcuguccugcaccaagaacaacagccaccacuacaucauggugggcaacgagaccggccucgagcugacccugacgaacaccuccaucaucaaccacaaguucugcaaccucagcgacgcccacaagaagaaccuguacgaccacgcccugauguccaucaucagcaccuuccaccucuccauccccaacuucaaccaguacgaggccaugagcugcgacuucaacgggggcaagaucuccgugcaguacaaccugagccacuccuacgcgggggacgccgccaaccacugcggcaccgucgccaacggggugcugcagacguucaugcgcauggcguggggcggcagcuacaucgcccucgacuccgggugcggcagcugggacugcaucaugaccuccuaccaguaccugaucauccagaacaccaccugggaggaccacugccaguucagccggcccucccccaucggguaccugggccuccugagccagcgcacgcgggacaucuacaucagccgccggcugcucggcaccuucaccuggacccuguccgacagcgaggggaaggacacgccgggcggguacugccugacccgcuggaugcucaucgaggccgagcugaagugcuucggcaacaccgccguggccaagugcaacgagaagcacgacgaggaguucugcgacaugcugcggcuguucgacuucaacaagcaggcgauccagcgccugaaggcccccgcccagauguccauccagcugaucaacaaggccgucaacgcccucaucaacgaccagcugaucaugaagaaccaccuccgggacaucaugugcauccccuacugcaacuacagcaaguacugguaccucaaccacaccacgaccgggaagaccucccugcccaagugcuggcuggugagcaacggcuccuaccucaacgagacccacuucagcgacgacaucgagcagcaggcggacaacaugaucacggagaugcugcagaaggaguacauggagcgccagggcaagaccccgcuggggcugguggaccucuucgucuucuccaccagcuucuaccugaucuccaucuuccugcaccucgugaagauccccacccaccggcacaucgugggcaagagcugccccaagccccaccgccugaaccacauggggaucugcuccugcggccuguacaagcagccggggguccccgugaaguggaagcggugaggacuaguuauaagacugacuagcccgaugggccucccaacgggcccuccuccccuccuugcaccgagauuaaucaaaggcucuuuucagagccaccaaaaaaaaaaaaaaaaaaaaaaaaaaaaaaaaaaaaaaaaaaaaaaaaaaaaaaaaaaaaaaaaagaauu

SEQ ID NO: 29404 - RNA, 1658 nt, Artificial Sequence
  mRNA product Design i-3 (hSL-A64-N5) comprising derived and/or modified sequence from LASV(G1442-SLE-2011;Clade IV)__AIT17180__GPCmut5 (opt1)
aggagaaagcuuaccaugggccagaucgugaccuucuuccaggaggucccccacgugaucgaggaggugaugaacaucguccugaucgcccucagcauccuggccgugcugaaggggcucuacaacguggcgaccugcggccugaucgggcuggucacguuccuccugcugugcggccgcuccugcaccaccacccucuacaaggggguguacgagcugcagacgcuggagcucaacauggagacccugaacaugaccaugccgcugagcugcaccaagaacaacucccaccacuacauccgggugggcaacgagacgggccucgagcugacccugaccaacaccagcaucaucaaccacaaguucugcaaccucuccgacgcccacaagaagaaccuguacgaccacgcccugaugagcaucaucuccacguuccaccucagcauccccaacuucaaccaguacgaggccauguccugcgacuucaacgggggcaagaucagcguccaguacaaccugucccacagcuacgccggggacgcggccaaccacugcggcaccguggccaacggggugcugcagaccuucaugcgcauggccuggggcggcuccuacaucgcgcucgacagcgggugcggcaacugggacugcaucaugaccuccuaccaguaccugaucauccagaacacgaccugggacgaccacugccaguucagccggcccucccccaucggguaccugggccuccugagccagcgcacccgggacgucuacaucucccgccggcugcucggcaccuucacguggacccugagcgacagcgaggggaaggacaccccgggcggguacugccugacccgcuggaugcucaucgaggccgagcugaagugcuucggcaacacggccguggccaagugcaacgagaagcacgacgaggaguucugcgacaugcugcggcuguucgacuucaacaagcaggccauccagcgccugaaggcgcccgcccagauguccauccagcugaucaacaaggccgugaacgcccucaucaacgaccagcugaucaugaagaaccaccuccgggacaucaugugcauccccuacugcaacuacagcaaguacugguaccucaacaacaccgccaccgggaagaccucccugcccaagugcuggcugaucagcaacggcuccuaccucaacgagacgcacuucagcgacgacaucgagcaggaggcggacaacaugaucaccgagaugcugcagaaggaguacauggagcgccagggcaagaccccgcuggggcuggucgaccucuucguguucuccaccagcuucuaccugaucuccaucuuccugcaccucgugaagauccccacgcaccggcacaucgucggcaagagcugccccaagccccaccgccugaaccacauggggaucugcuccugcggccuguacaagcagccgggggugcccgugcgguggaagcgcugaggacuaguuauaagacugacuagcccgaugggccucccaacgggcccuccuccccuccuugcaccgagauuaaucaaaggcucuuuucagagccaccaaaaaaaaaaaaaaaaaaaaaaaaaaaaaaaaaaaaaaaaaaaaaaaaaaaaaaaaaaaaaaaaagaauu

SEQ ID NO: 29405 - RNA, 1658 nt, Artificial Sequence
  mRNA product Design i-3 (hSL-A64-N5) comprising derived and/or modified sequence from LASV(G3010-SLE-2013;Clade IV)__AIT17344__GPCmut5 (opt1)
aggagaaagcuuaccaugggccagaucgugaccuucuuccaggaggucccccacgugaucgaggaggugaugaacaucguccugaucgcccucagcauccuggccgugcugaaggggcucuacaacuucgcgaccugcggccugguggggcuggucacguuccuccugcugugcggccgcuccugcaccaccagccucuacaaggggguguacgagcugcagacccuggagcucaacauggagacgcugaacaugaccaugccgcuguccugcaccaagaacaacagccaccacuacaucauggugggcaacgagaccggccucgagcugacgcugaccaacaccuccaucaucaaccacaaguucugcaaccucagcgacgcccacaagaagaaccuguacaaccacgcccugauguccaucaucagcaccuuccaccucuccauccccaacuucaaccaguacgaggccaugagcugcgacuucaacgggggcaagaucuccguccaguacaaccugagccacuccuacgccggggacgcggccagccacugcggcacgguggccaacggggugcugcagaccuucaugcggauggccuggggcggcuccuacaucgcgcucgacagcgggugcggcaagugggacugcaucaugaccuccuaccaguaccugaucauccagaacaccacgugggaggaccacugccaguucagccgccccucccccaucggguaccugggccuccugagccagcggacccgcgacaucuacaucagccggcgccugcucggcaccuucaccuggacgcuguccgacagcgaggggaaggacaccccgggcggguacugccugacccgguggaugcucaucgaggccgagcugaagugcuucggcaacaccgccgucgccaagugcaacgagaagcacgacgaggaguucugcgacaugcugcgccucuucgacuucaacaagcaggccauccagcggcugaagacgcccgcgcagauguccauccagcugaucaacaaggccgugaacgcccucaucaacgaccagcugaucaugaagaaccaccuccgcgacaucaugugcauccccuacugcaacuacagcaaguacugguaccugaaccacaccaccaccgggaagacgucccugcccaagugcuggcuggugagcaacggcuccuaccucaacgagacccacuucagcgacgacaucgagcagcaggccgacaacaugaucaccgagaugcugcagaaggaguacauggagcggcagggcaagaccccgcuggggcuggucgaccucuucguguucuccacgagcuucuaccugaucuccaucuuccugcaccucgugaagauccccacccaccgccacaucgucggcaagagcugccccaagccccaccggcugaaccacauggggaucugcuccugcggccuguacaagcagccgggggugcccgugcgcuggaagcggugaggacuaguuauaagacugacuagcccgaugggccucccaacgggcccuccuccccuccuugcaccgagauuaaucaaaggcucuuuucagagccaccaaaaaaaaaaaaaaaaaaaaaaaaaaaaaaaaaaaaaaaaaaaaaaaaaaaaaaaaaaaaaaaaagaauu

SEQ ID NO: 29406 - RNA, 1658 nt, Artificial Sequence
  mRNA product Design i-3 (hSL-A64-N5) comprising derived and/or modified sequence from LASV(G502-SLE-2009;Clade IV)__AIT17126__GPCmut5 (opt1)
aggagaaagcuuaccaugggccagaucgugaccuucuuccaggaggucccccacgugaucgaggaggugaugaacaucguccugaucgcccucagcauccuggccgugcugaaggggcucuacaacuucgcgaccugcggccugguggggcugcucacguuccugcugcucugcggccgcuccugcaccaccgggcuguacaagggcgucuacgagcugcagacccucgagcugaacauggagacgcugaacaugaccaugccgcucagcugcaccaagaacaacucccaccacuacaucauggugggcaacgagaccgggcuggagcugacgcucaccaacaccagcaucaucaaccacaaguucugcaaccuguccgacgcccacaagaagaaccuguacgaccacgcccucaugagcaucaucuccaccuuccaccugagcauccccaacuucaaccaguacgaggccauguccugcgacuucaacggcgggaagaucagcgugcaguacaaccugucccacagcuacgccggcgacgcggccgaccacugcgggacggucgccaacggcgugcuccagaccuucaugcggauggccuggggcggguccuacaucgcgcuggacagcggcugcgggcgcugggacugcaucaugaccuccuaccaguaccugaucauccagaacaccacgugggaggaccacugccaguucagccggcccucccccaucggcuaccucggccugcugagccagcgcacccgggacaucuacaucucccgccggcuccuggggaccuucaccuggacgcugagcgacagcgagggcaaggacacccccgggggcuacugccucacccgcuggaugcugaucgaggccgagcugaagugcuucgggaacaccgccguggccaagugcaacgagaagcacgacgaggaguucugcgacaugcuccggcuguucgacuucaacaagcaggccauccagcgccugaaggcgccggcccagauguccauccagcucaucaacaaggccgucaacgcccugaucaacgaccagcuggugaugaagaaccaccuccgggacaucaugugcauccccuacugcaacuacagccgcuacugguaccugaaccacacgaccaccggccggaccucccugcccaagugcuggcucgugagcaacggcuccuaccugaacgagacgcacuucagcgacgacaucgagcagcaggccgacaacaugaucaccgagaugcugcagaaggaguacauggagcgccaggggaagaccccgcugggccucgucgaccuguucguguucuccaccagcuucuaccugaucuccaucuuccuccaccuggugaagauccccacgcaccggcacaucgucggcaagagcugccccaagccccaccgccugaaccacauggggaucugcuccugcgggcucuacaagcagccgggcgugcccgugaaguggaagcggugaggacuaguuauaagacugacuagcccgaugggccucccaacgggcccuccuccccuccuugcaccgagauuaaucaaaggcucuuuucagagccaccaaaaaaaaaaaaaaaaaaaaaaaaaaaaaaaaaaaaaaaaaaaaaaaaaaaaaaaaaaaaaaaaagaauu

SEQ ID NO: 29407 - RNA, 1658 nt, Artificial Sequence
  mRNA product Design i-3 (hSL-A64-N5) comprising derived and/or modified sequence from LASV(G733-SLE-2010;Clade IV)__AIT17154__GPCmut5 (opt1)
aggagaaagcuuaccaugggccagaucgugaccuucuuccaggaggucccccacgugaucgaggaggugaugaacaucguccugaucgcccucagcauccuggccgugcugaaggggcucuacaacuucgcgaccugcggcaucguggggcuggucuccuuccugcuccugugcggccgcagcugcacgaccucccuguacaaggggguguacgagcuccagacccuggagcugaacauggagacccucaacaugacgaugccgcugagcugcaccaagaacaacucccaccacuacaucauggugggcaacgagaccggccuggagcucacccugacgaacaccagcaucaucaaccacaaguucugcaaccuguccgacgcccacaagaagaaccucuacgaccacgcccugaugagcaucaucuccaccuuccaccugagcauccccaacuucaaccaguacgaggccauguccugcgacuucaacgggggcaagaucagcguccaguacaaccucucccacagcuacgccggggacgcggccaaccacugcggcaccaucgccaacggggugcugcagacguucaugcggauggccuggggcggcuccuacaucgcgcuggacagcgggugcgaccgcugggacugcaucaugaccuccuaccaguaccucaucauccagaacaccaccugggaggaccacugccaguucagccggcccucccccaucggcuaccuggggcugcucagccagcgcacgcgggacaucuacaucagccgccggcugcugggcaccuucaccuggacccucuccgacagcgagggcaaggacacgcccgggggcuacugccugacccgcuggaugcugaucgaggccgagcucaagugcuucgggaacaccgccguggccaagugcaacgagaagcacgacgaggaguucugcgacaugcugcggcuguucgacuucaacaagcaggccauccagcgccucaaggcgccggcccagauguccauccagcugaucaacaaggccgucaacgcccugaucaacgaccagcucaucaugaagaaccaccuccgggacaucaugugcauccccuacugcaacuacagcaaguacugguaccugaaccacaccacgaccggcaagaccucccugcccaagugcuggcuggugagcaacggguccuaccugaacgagacccacuucagcgacgacaucgagcagcaggccgacaacaugaucacggagaugcuccagaaggaguacauggagcgccagggcaagaccccgcugggccugguggaccuguucgucuucuccaccagcuucuaccucaucuccaucuuccugcaccuggugaagauccccacccaccggcacguggucggcaagagcugccccaagccccaccgccucaaccacauggggaucugcuccugcgggcuguacggccagccgggggugcccgugaaguggaagcggugaggacuaguuauaagacugacuagcccgaugggccucccaacgggcccuccuccccuccuugcaccgagauuaaucaaaggcucuuuucagagccaccaaaaaaaaaaaaaaaaaaaaaaaaaaaaaaaaaaaaaaaaaaaaaaaaaaaaaaaaaaaaaaaaagaauu

SEQ ID NO: 29408 - RNA, 1658 nt, Artificial Sequence
  mRNA product Design i-3 (hSL-A64-N5) comprising derived and/or modified sequence from MOPV/LASV reassortant(IGS-1;Clade IV)__AFY05576__GPCmut5 (opt1)
aggagaaagcuuaccaugggccagaucgugaccuucuuccaggaggucccccacgugaucgaggaggugaugaacaucguccugaucgcccucagcgugcuggccgugcugaaggggcucuacaacuucgcgaccugcggccuggucgggcuggugacguuccuccugcugugcggccgcuccugcaccaccagccucuacaaggggguguacgagcugcagacccuggagcucaacauggagacgcugaacaugaccaugccgcuguccugcaccaagaacaacagccaccacuacaucauggucggcaacgagaccggccucgagcugacgcugaccaacaccuccaucaucaaccacaaguucugcaaccucagcgacgcccacaagaagaaccuguacgaccacgcccugauguccaucaucagcaccuuccaccucuccauccccaacuucaaccaguacgaggccaugagcugcgacuucaacgggggcaagaucuccgugcaguacaaccugagccacuccuacgccggggacgcggccaaccacugcggcacgguggccaacgggguccugcagaccuucaugcggauggccuggggcggcagcuacaucgcgcucgacuccgggugcggcaacugggacugcaucaugaccagcuaccaguaccugaucauccagaacaccacgugggaggaccacugccaguucucccgccccagccccaucggguaccugggccuccugucccagcggacccgcgacaucuacaucagccggcgccugcucggcaccuucaccuggacgcugagcgacuccgagggggaggacaccccgggcggguacugccugacccgguggaugcucaucgaggccgagcugaagugcuucggcaacaccgccguggccaagugcaacgagaagcacgacgaggaguucugcgacaugcugcgccucuucgacuucaacaagcaggccauccagcggcugaaggcgcccgcccagaugagcauccagcugaucaacaaggccgugaacgcccucaucaacgaccagcugaucaugaagaaccaccuccgcgacaucaugugcauccccuacugcaacuacuccaaguacugguaccugaaccacacgaccaccgggcggaccagccugcccaagugcuggcuggucuccaacggcagcuaccucaacgagacgcacuucuccgacgacaucgagcagcaggccgacaacaugaucaccgagaugcugcagaaggaguacauggagcgccagggcaagaccccgcuggggcugguggaccucuucguguucagcaccuccuucuaccugaucagcaucuuccugcaccucgucaagauccccacgcaccggcacaucgugggcaaguccugccccaagccccaccgccugaaccacauggggaucugcagcugcggccuguacaagcagccgggggugcccgucaaguggaagcggugaggacuaguuauaagacugacuagcccgaugggccucccaacgggcccuccuccccuccuugcaccgagauuaaucaaaggcucuuuucagagccaccaaaaaaaaaaaaaaaaaaaaaaaaaaaaaaaaaaaaaaaaaaaaaaaaaaaaaaaaaaaaaaaaagaauu

SEQ ID NO: 29409 - RNA, 1658 nt, Artificial Sequence
  mRNA product Design i-3 (hSL-A64-N5) comprising derived and/or modified sequence from LASV(LM765-SLE-2012;Clade IV)__AIT17814__GPCmut5 (opt1)
aggagaaagcuuaccaugggccagaucgugaccuucuuccaggaggucccccacgugaucgaggaggugaugaacaucguccugaucgcccucagcauccuggccgugcugaaggggcucuacaacuucgcgaccugcggccugguggggcuggucacguuccuccugcugugcggccgcuccugcaccaccagccucuacaaggggguguacgagcugcagacccuggagcucaacauggagacgcugaacaugaccaugccgcuguccugcaccaagaacaacagccaccacuacaucauggugggcaacgagaccggccucgagcugacgcugaccaacaccuccaucaucgaccacaaguucugcaaccucagcgacgcccaccggaagaaccuguacgaccacgcccugauguccaucaucagcaccuuccaccucuccauccccaacuucaaccaguacgaggccaugagcugcgacuucaacgggggcaagaucuccguccaguacaaccugagccacuccuacgccaaggacgcggccgaccacugcgggacgguggccaacggcgugcugcagaccuucaugcgcauggccuggggcgggagcuacaucgcgcucgacuccggcugcgggcggugggacugcaucaugaccagcuaccaguaccugaucauccagaacaccacgugggaggaccacugccaguucucccgccccagccccaucggcuaccuggggcuccugucccagcggacccgcgacaucuacaucagccggcgccugcucggcaccuucaccuggacgcugagcgacuccgagggcaaggacacccccgggggcuacugccugacccgguggaugcucaucgaggccgagcugaagugcuucgggaacaccgccgucgccaagugcaacgagaagcacgacgaggaguucugcgacaugcugcgccucuucgacuucaacaagcaggccauccagcggcugaaggcgccggcccagaugagcauccagcugaucaacaaggccgugaacgcccucaucaacgaccagcugaucaugaagaaccaccuccgcgacaucaugugcauccccuacugcaacuacuccaaguacugguaccugaaccacacgaccaccggcaagaccagccugcccaagugcuggcugguguccaacgggagcuaccucaacgagacgcacuucuccgacgacaucgagcagcaggccgacaacaugaucaccgagaugcugcagaaggaguacauggagcggcagggcaagaccccgcugggccuggucgaccucuucguguucagcaccuccuucuaccugaucagcaucuuccugcaccucgugaagauccccacgcaccgccacaucgucgggaagcccugccccaagccgcaccggcugaaccacaugggcaucugcuccugcgggcuguacaagcagcccggcgugcccgugaaguggaagcgcugaggacuaguuauaagacugacuagcccgaugggccucccaacgggcccuccuccccuccuugcaccgagauuaaucaaaggcucuuuucagagccaccaaaaaaaaaaaaaaaaaaaaaaaaaaaaaaaaaaaaaaaaaaaaaaaaaaaaaaaaaaaaaaaaagaauu

SEQ ID NO: 29410 - RNA, 1658 nt, Artificial Sequence
  mRNA product Design i-3 (hSL-A64-N5) comprising derived and/or modified sequence from LASV(LM776-SLE-2012;Clade IV)__AIT17824__GPCmut5 (opt1)
aggagaaagcuuaccaugggccagaucgugaccuucuuccaggaggucccccacgugaucgaggaggugaugaacaucguccugaucgcccucagcauccuggccgugcugaaggggcucuacaacuucgcgaccugcggccugguggggcuggucacguuccuccugcugugcggccgcuccugcaccaccagcguguacaaggggguguacgagcuccagacccuggagcugaacauggagacgcucaacaugaccaugccgcuguccugcaccaagaacaacagccaccacuacaucauggucggcaacgagaccggccuggagcucacgcugaccaacaccuccaucaucaaccacaaguucugcaaccugagcgacgcccacaagaagaaccucuacgaccacgcccugauguccaucaucagcaccuuccaccuguccauccccaacuucaaccaguacgaggccaugagcugcgacuucaacgggggcaagaucuccgugcaguacaaccucagccacuccuacgccggggacgcggccaaccacugcggcacgguggccaacgggguccugcagaccuucaugcggauggccuggggcggcagcuacaucgcgcuggacuccgggugcggcaagugggacugcaucaugaccagcuaccaguaccucaucauccagaacaccacgugggaggaccacugccaguucucccgccccagccccaucggguaccugggccugcucucccagcggacccgcgacaucuacaucagccggcgccugcugggcaccuucaccuggacgcucagcgacuccgaggggaaggacaccccgggcggguacugccugacccgguggaugcugaucgaggccgagcucaagugcuucggcaacaccgccguggccaagugcaacgagaagcacgacgaggaguucugcgacaugcugcgccuguucgacuucaacaagcaggccauccagcggcucaaggcgcccgcccagaugagcauccagcugaucaacaaggccgugaacgcccugaucaacgaccagcucaucaugaagaaccaccuccgcgacaucaugugcauccccuacugcaacuacuccaaguacugguaccugaaccacacgaccaccgggaagaccagccugcccaagugcuggcuggucuccaacggcagcuaccugaacgagacgcacuucuccgacgacaucgagcagcaggccgacaacaugaucaccgagaugcuccagaaggaguacauggagcggcagggcaagaccccgcuggggcugguggaccuguucguguucagcaccuccuucuaccucaucagcaucuuccugcaccuggucaagauccccacgcaccgccacaucgugggcaaguccugccccaagccccaccggcucaaccacauggggaucugcagcugcggccuguacaagcagccgggggugcccguccgcuggaagcggugaggacuaguuauaagacugacuagcccgaugggccucccaacgggcccuccuccccuccuugcaccgagauuaaucaaaggcucuuuucagagccaccaaaaaaaaaaaaaaaaaaaaaaaaaaaaaaaaaaaaaaaaaaaaaaaaaaaaaaaaaaaaaaaaagaauu

SEQ ID NO: 29411 - RNA, 1658 nt, Artificial Sequence
  mRNA product Design i-3 (hSL-A64-N5) comprising derived and/or modified sequence from LASV(Mad39;Clade IV)__ANH09722__GPCmut5 (opt1)
aggagaaagcuuaccaugggccagaucgugaccuucuuccaggaggucccccacgugaucgaggaggugaugaacaucguccugaucgcccucagcauccuggccgugcugaaggggcucuacaacguggcgaccugcggccugaucgggcuggucacguuccuccugcugugcggccgcuccugcaccaccacccucuacaaggggguguacgagcugcaggcccuggagcucaacauggagacgcugaacaugaccaugccgcugagcugcaccaagaacaacucccaccacuacauccgggugggcaacgagaccggccucgagcugacgcugaccaacaccagccucaucaaccacaaguucugcaaccuguccgacgcccacaagaagaaccuguacgaccacgcccucaugagcaucaucuccaccuuccaccugagcauccccaacuucaaccaguacgaggccauguccugcgacuucaacgacgggaagaucagcguccaguacaaccugucccacacguacgcgggcgacaccgccaaccacugcgggaccguggccaacggcgugcuccagaccuucaugcgcauggccuggggcgggagcuacaucgcgcuggacuccggcugcgggggcugggacugcaucaugacgagcuaccaguaccugaucauccagaacaccaccugggaggaccacugccaguucucccggcccagccccaucggguaccucggccugcugucccagcgcacccgggacaucuacaucagccgccggcuccugggcacguucaccuggacccuguccgacagcgaggggaaggacaccccgggcggguacugccucacgcgcuggaugcugaucgaggccgagcugaagugcuucggcaacaccgccgucgccaagugcaacgagaagcacgacgaggaguucugcgacaugcuccggcuguucgacuucaacaagcaggccauccagcgccugaaggcgcccgcccagaugagcauccagcucaucaacaaggccgugaacgcccugaucaacgaccagcugaucaugaagaaccaccuccgggacaucaugugcauccccuacugcaacuacuccaaguacugguaccugaaccacaccgugaccgggaagacgagccugcccaagugcuggcucgucuccaacggcagcuaccugaacgagacccacuucuccgacgacaucgagcagcaggccgacaacaugaucaccgagaugcugcagaaggaguacauggagcgccagggcaagaccccgcuggggcucguggaccuguucguguucagcacguccuucuaccugaucagcaucuuccuccaccuggucaagauccccacccaccggcacguggugggcaagcccugccccaagccgcaccgccugaaccacauggggaucugcuccugcggcuucuacaagcagcccgggguccccgugcgguggaagcgcugaggacuaguuauaagacugacuagcccgaugggccucccaacgggcccuccuccccuccuugcaccgagauuaaucaaaggcucuuuucagagccaccaaaaaaaaaaaaaaaaaaaaaaaaaaaaaaaaaaaaaaaaaaaaaaaaaaaaaaaaaaaaaaaaagaauu

SEQ ID NO: 29412 - RNA, 1658 nt, Artificial Sequence
  mRNA product Design i-3 (hSL-A64-N5) comprising derived and/or modified sequence from LASV(Z0947-SLE-2011;Clade IV)__AIT17840__GPCmut5 (opt1)
aggagaaagcuuaccaugggccagaucgugaccuucuuccaggaggucccccacgugaucgaggaggugaugaacaucguccugaucgcccucagcauccuggccgugcugaaggggcucuacaacuucgcgaccugcggccugguggggcuggucacguuccuccugcugugcggccgcuccugcaccaucagccucuacaaggggguguacgagcugcagacccuggagcucaacauggagacccugaacaugacgaugccgcuguccugcaccaagaacaacagccaccacuacaucauggugggcaacgagaccggccucgagcugacccugacgaacaccuccaucaucaaccacaaguucugcaaccucagcgacgcccacaagaagaaccuguacgaccacgcccugauguccaucaucagcaccuuccaccucuccauccccaacuucaaccaguacgaggccaugagcugcgacuucaacgggggcaagaucuccguccaguacaaccugagccacuccuacgccggggacgcggccaaccacugcggcaccguggccaacggggugcugcagacguucaugcggauggccuggggcggcagcuacaucgcgcucgacuccgggugcgaccgcugggacugcaucaugaccagcuaccaguaccugaucauccagaacaccaccugggaggaccacugccaguucucccggcccagccccaucggcuaccuggggcuccugucccagcgcacgcgggacaucuacaucagccgccggcugcucggcaccuucaccuggacccugagcgacuccgagggcaaggacacgcccgggggcuacugccugacccgcuggaugcucaucgaggccgagcugaagugcuucgggaacaccgccgucgccaagugcaacgagaagcacgacgaggaguucugcgacaugcugcggcuguucgacuucaacaagcaggccauccagcgccugaaggcgccggcccagaugagcauccagcugaucaacaaggccgugaacgcccucaucaacgaccagcugaucaugaagaaccaccuccgggacaucaugugcauccccuacugcaacuacuccaaguacugguaccucaaccacaccacgaccggcaagaccagccugcccaagugcuggcugguguccaacgggagcuaccucaacgagacccacuucuccgacgacaucgagcagcaggccgacaacaugaucacggagaugcugcagaaggaguacauggagcgccagggcaagaccccgcugggccuggucgaccucuucguguucagcaccuccuucuaccugaucagcaucuuccugcaccucgugaagauccccacccaccggcacaucgucgggaagcccugccccaagccgcaccgccugaaccacaugggcaucugcuccugcgggcuguacaagcagcccggcgugcccgugaaguggaagcggugaggacuaguuauaagacugacuagcccgaugggccucccaacgggcccuccuccccuccuugcaccgagauuaaucaaaggcucuuuucagagccaccaaaaaaaaaaaaaaaaaaaaaaaaaaaaaaaaaaaaaaaaaaaaaaaaaaaaaaaaaaaaaaaaagaauu

SEQ ID NO: 29413 - RNA, 1658 nt, Artificial Sequence
  mRNA product Design i-3 (hSL-A64-N5) comprising derived and/or modified sequence from LASV(Josiah;Clade IV)__NP_694870__GPCmut5 (opt4)
aggagaaagcuuaccaugggccagaucgugaccuucuuccaggaggugccccacgugaucgaggaggugaugaacaucgugcugaucgcccugagcgugcuggccgugcugaagggccuguacaacuucgccaccugcggccuggugggccuggugaccuuccugcugcugugcggcagaagcugcaccaccagccuguacaagggcguguacgagcugcagacccuggagcugaacauggagacccugaacaugaccaugccccugagcugcaccaagaacaacagccaccacuacaucauggugggcaacgagaccggccuggagcugacccugaccaacaccagcaucaucaaccacaaguucugcaaccugagcgacgcccacaagaagaaccuguacgaccacgcccugaugagcaucaucagcaccuuccaccugagcauccccaacuucaaccaguacgaggccaugagcugcgacuucaacggcggcaagaucagcgugcaguacaaccugagccacagcuacgccggcgacgccgccaaccacugcggcaccguggccaacggcgugcugcagaccuucaugagaauggccuggggcggcagcuacaucgcccuggacagcggcugcggcaacugggacugcaucaugaccagcuaccaguaccugaucauccagaacaccaccugggaggaccacugccaguucagcagacccagccccaucggcuaccugggccugcugagccagagaaccagagacaucuacaucagcagaagacugcugggcaccuucaccuggacccugagcgacagcgagggcaaggacacccccggcggcuacugccugaccagauggaugcugaucgaggccgagcugaagugcuucggcaacaccgccguggccaagugcaacgagaagcacgacgaggaguucugcgacaugcugagacuguucgacuucaacaagcaggccauccagagacugaaggcccccgcccagaugagcauccagcugaucaacaaggccgugaacgcccugaucaacgaccagcugaucaugaagaaccaccugagagacaucaugugcauccccuacugcaacuacagcaaguacugguaccugaaccacaccaccaccggcagaaccagccugcccaagugcuggcuggugagcaacggcagcuaccugaacgagacccacuucagcgacgacaucgagcagcaggccgacaacaugaucaccgagaugcugcagaaggaguacauggagagacagggcaagaccccccugggccugguggaccuguucguguucagcaccagcuucuaccugaucagcaucuuccugcaccuggugaagauccccacccacagacacaucgugggcaagagcugccccaagccccacagacugaaccacaugggcaucugcagcugcggccuguacaagcagcccggcgugcccgugaaguggaagagaugaggacuaguuauaagacugacuagcccgaugggccucccaacgggcccuccuccccuccuugcaccgagauuaaucaaaggcucuuuucagagccaccaaaaaaaaaaaaaaaaaaaaaaaaaaaaaaaaaaaaaaaaaaaaaaaaaaaaaaaaaaaaaaaaagaauu

SEQ ID NO: 29414 - RNA, 1655 nt, Artificial Sequence
  mRNA product Design i-3 (hSL-A64-N5) comprising derived and/or modified sequence from LASV(LP;Clade I)__AAF86701__GPCmut5 (opt4)
aggagaaagcuuaccaugggccagaucaucaccuucuuccaggaggugccccacgugaucgaggaggugaugaacaucgugcugaucgcccugagccugcuggccauccugaagggccuguacaacaucgccaccugcggcaucaucggccugguggccuuccuguuccugugcggcaagagcugcagccugacccugaagggcggcuacgagcugcagacccuggagcugaacauggagacccugaacaugaccaugccccugagcugcaccaagaacagcagccaccacuacaucagagugggcaacgagaccggccuggagcugacccugaccaacaccagcaucaucaaccacaaguucugcaaccugagcgacgcccacaagaagaaccuguacgaccacgcccugaugagcaucaucagcaccuuccaccugagcauccccaacuucaaccaguacgaggccaugagcugcgacuucaacggcggcaagaucagcgugcaguacaaccugagccacagcuacgccggcgacgccgccgagcacugcggcaccguggccaacggcgugcugcagaccuucaugagaauggccuggggcggcagauacaucgcccuggacagcggcugcggcaacugggacugcaucaugaccagcuaccaguaccugaucauccagaacaccaccugggaggaccacugccaguucagcagacccagccccaucggcuaccugggccugcugagccagagaaccagagacaucuacaucagcagaagacugcugggcaccuucaccuggacccugagcgacagcgagggcaacgagacccccggcggcuacugccugaccagauggaugcugaucgaggccgagcugaagugcuucggcaacaccgccguggccaagugcaacgagaagcacgacgaggaguucugcgacaugcugagacuguucgacuucaacaagcaggccaucagaagacugaaggcccccgcccagaugagcauccagcugaucaacaaggccgugaacgcccugaucaacgaccagcugaucaugaagaaccaccugagagacaucaugugcauccccuacugcaacuacagcaaguacugguaccugaaccacaccagcagcggcagaaccagccugcccaagugcuggcugaucagcaacggcagcuaccugaacgagacccaguucagcgacgacaucgagcagcaggccgacaacaugaucaccgagaugcugcagaaggaguacaucgagagacagggcaagaccccccugggccugguggacaucuucaucuucagcaccagcuucuaccugaucagcaucuuccugcaccugaucaagauccccacccacagacacaucgugggcaagcccugccccaagccccacagacugaaccacaugggcgugugcagcugcggccuguacaagcaccccggcgugcccaccaaguggaagagaugaggacuaguuauaagacugacuagcccgaugggccucccaacgggcccuccuccccuccuugcaccgagauuaaucaaaggcucuuuucagagccaccaaaaaaaaaaaaaaaaaaaaaaaaaaaaaaaaaaaaaaaaaaaaaaaaaaaaaaaaaaaaaaaaagaauu

SEQ ID NO: 29415 - RNA, 1655 nt, Artificial Sequence
  mRNA product Design i-3 (hSL-A64-N5) comprising derived and/or modified sequence from LASV(803213;Clade II)__AAF86703__GPCmut5 (opt4)
aggagaaagcuuaccaugggccagaucaucaccuucuuccaggaggugccccacgugaucgaggaggugaugaacaucgugcugaucgcccugagccugcuggccauccugaagggcaucuacaacguggccaccugcggccuguucggccugaucagcuuccugcugcugugcggcagaagcugcagcgugaccuacaagggcguguacgagcugcagacccuggagcugaacauggccaaccugaacaugaccaugccccugagcugcaccaagaacaacagccaccacuacaucauggugggcaacgagaccggccuggagcugacccugaccaacaccagcaucaucaaccacaaguucugcaaccugagcgacgcccacaagaagaaccuguacgaccacgcccugaugagcaucaucagcaccuuccaccugagcauccccaacuucaaccaguacgaggccaugagcugcgacuucaacggcggcaagaucagcgugcaguacaaccugagccacagcuucgccguggacgccgccaaccacugcggcaccaucgccaacggcgugcugcagaccuucaugagaauggccuggggcggcagcuacaucgcccuggacagcggcugcggcaacugggacugcaucaugaccagcuaccaguaccugaucauccagaacaccaccugggaggaccacugccaguucagcagacccagccccaucggcuaccugggccugcugagccagagaaccagagacaucuacaucagcagaagacugcugggcaccuucaccuggacccugagcgacagcgagggcaacgaggcccccggcggcuacugccugaccagauggaugcugaucgaggccgagcugaagugcuucggcaacaccgccguggccaagugcaacgagaagcacgacgaggaguucugcgacaugcugagacuguucgacuucaacaagcaggccaucaagagacugaagacccccgcccagaugagcauccagcugaucaacaaggccgugaacgcccugaucaacgaccagcugaucaugaagaaccaccugagagacaucaugugcauccccuacugcaacuacagcagauacugguaccugaaccacaccgugaccggcaagaccagccugcccagaugcuggcuggugagcaacggcagcuaccugaacgagacccacuucagcgacgacaucgagcagcaggccgacaacaugaucaccgagaugcugcagaaggaguacauggacagacagggcaagaccccccugggccugguggaccuguucguguucagcaccagcuucuaccugaucagcaucuuccugcaccuggugaagauccccacccacagacacaucgugggcaagcccugccccaagccccacagacugaaccacaugggcaucugcagcugcggccuguacaagcaccccggcgugcccgugaaguggaagagaugaggacuaguuauaagacugacuagcccgaugggccucccaacgggcccuccuccccuccuugcaccgagauuaaucaaaggcucuuuucagagccaccaaaaaaaaaaaaaaaaaaaaaaaaaaaaaaaaaaaaaaaaaaaaaaaaaaaaaaaaaaaaaaaaagaauu

SEQ ID NO: 29416 - RNA, 1655 nt, Artificial Sequence
  mRNA product Design i-3 (hSL-A64-N5) comprising derived and/or modified sequence from LASV(GA391;Clade III)__CAA36645__GPCmut5 (opt4)
aggagaaagcuuaccaugggccagaucgugaccuucuuccaggaggugccccacgugaucgaggaggugaugaacaucgugcugaucgcccugagcauccuggccauccugaagggccuguacaacguggccaccugcggccugaucggccuggugaccuuccugcugcugagcggcagaagcugcagccugaucuacaagggcaccuacgagcugcagacccuggagcugaacauggagacccugaacaugaccaugccccugagcugcaccaagaacaacagccaccacuacaucagagugggcaacgagaccggccuggagcugacccugaccaacaccagcauccugaaccacaaguucugcaaccugagcgacgcccacaagagaaaccuguacgaccacagccugaugagcaucaucagcaccuuccaccugagcauccccaacuucaaccaguacgaggccaugagcugcgacuucaacggcggcaagaucaccgugcaguacaaccugagccacagcuucgccguggacgccgccggccacugcggcacccuggccaacggcgugcugcagaccuucaugagaauggccuggggcggcagcuacaucgcccuggacagcggcugcggcaacugggacugcaucaugaccagcuaccaguaccugaucauccagaacaccaccugggacgaccacugccaguucagcagacccagccccaucggcuaccugggccugcugagccagagaaccagagacaucuacaucagcagaagacugcugggcaccuucaccuggacccugagcgacagcgagggcaacgagacccccggcggcuacugccugaccagauggaugcugaucgaggccgagcugaagugcuucggcaacaccgccguggccaagugcaacgagaagcacgacgaggaguucugcgacaugcugagacuguucgacuucaacaagcaggccaucagaagacugaagacccccgcccagaugagcauccagcugaucaacaaggccgugaacgcccugaucaacgaccagcugaucaugaagaaccaccugagagacaucaugugcauccccuacugcaacuacagcagauacugguaccugaaccacaccagcaccggcaagaccagccugcccagaugcuggcugaucagcaacggcagcuaccugaacgagaccaaguucagcgacgacaucgagcagcaggccgacaacaugaucaccgagaugcugcagaaggaguacaucgacagacagggcaagaccccccugggccugguggaccuguucguguucagcaccagcuucuaccugaucagcaucuuccugcaccuggugaagauccccacccacagacacaucgugggcaagcccugccccaagccccacagacugaaccacaugggcaucugcagcugcggccuguacaagcagcccggcgugcccgugagauggaagagaugaggacuaguuauaagacugacuagcccgaugggccucccaacgggcccuccuccccuccuugcaccgagauuaaucaaaggcucuuuucagagccaccaaaaaaaaaaaaaaaaaaaaaaaaaaaaaaaaaaaaaaaaaaaaaaaaaaaaaaaaaaaaaaaaagaauu

SEQ ID NO: 29417 - RNA, 1658 nt, Artificial Sequence
  mRNA product Design i-3 (hSL-A64-N5) comprising derived and/or modified sequence from LASV(AV;Clade V)__CCA30314__GPCmut5 (opt4)
aggagaaagcuuaccaugggccagaucgugaccuucuuccaggaggugccccacgugaucgaggaggugaugaacaucgugcugaucgcccugagcauccuggccgugcugaagggccuguacaacaucgccaccugcggccugaucggccugaucaccuuccugcugcugugcggcagaagcugcagcagcaaccuguacaagggcguguacgagcugcagagccuggaccugaacauggagacccugaacaugaccaugccccugagcugcaccaagaacaacagccaccacuacaucagagugggcaacgacaccggccuggagcugacccugaccaacaccagcauccugaaccacaaguucugcaaccugagcgacgcccacaagaaggaccuguacgaccacgcccugaugagcaucaucagcaccuuccaccugagcauccccaacuucaaccaguacgaggccaugagcugcgacuucaacggcggcaagaucagcgugcaguacaaccugagccacagcuacgccaucgacgccgccaaccacugcggcaccguggccaacggcauccugcagaccuucaugagaauggccuggggcggcagcuacaucgcccuggacagcggcugcggcaacugggacugcaucaugaccagcuaccaguaccugaucauccagaacaccaccugggagaaccacugccaguucagcagacccagccccaucggcuaccugggccugcugagccagagaaccagagacaucuacaucagcagaagacugcugggcaccuucaccuggacccugagcgacagcgagggcaacgccacccccggcggcuacugccugaccagauggaugcugaucgaggccgagcugaagugcuucggcaacaccgccguggccaagugcaacgagaagcacgacgaggaguucugcgacaugcugagacuguucgacuucaacaagcaggccaucagcagacugaagagccccgcccagaugagcauccagcugaucaacaaggccgugaacgcccugaucaacgaccagcugaucaugaagaaccaccugagagacaucaugugcauccccuacugcaacuacagcaaguacugguaccugaaccacaccaucaccggcaagaccagccugcccaagugcuggcuggugagcaacggcagcuaccugaacgagacccacuucagcgacgacaucgagcagcaggccgacaacaugaucaccgagaugcugcagaaggaguacauggagagacagggcaagaccccccugggccugguggaccuguucguguucagcaccagcuucuaccugaucagcaucuuccugagacuggugaagauccccacccacagacacaucgugggcaagcccugccccaagccccacagacugaaccacaugggcaucugcagcugcggccuguacaagcagcccggcgugcccgugagauggaagagaugaggacuaguuauaagacugacuagcccgaugggccucccaacgggcccuccuccccuccuugcaccgagauuaaucaaaggcucuuuucagagccaccaaaaaaaaaaaaaaaaaaaaaaaaaaaaaaaaaaaaaaaaaaaaaaaaaaaaaaaaaaaaaaaaagaauu

SEQ ID NO: 29418 - RNA, 1655 nt, Artificial Sequence
  mRNA product Design i-3 (hSL-A64-N5) comprising derived and/or modified sequence from LASV(Togo/2016/7082;Clade VI)__AMR44577__GPCmut5 (opt4)
aggagaaagcuuaccaugggccagaucaucaccuucuuccaggaggugccccacgugaucgaggaggugaugaacaucgugcugaucgcccugagccugcuggccauccugaagggcguguacaacguggccaccugcggcaucaucggccuggugaccuuccuguuccugugcggcagaagcugcagccugaucuacaagggcagcuacgagcugcagacccuggagcugaacauggagacccugaacaugaccaugccccugagcugcaccaagaacagcagccaccacuacaucagagugggcaacgagaccggccuggagcugacccugaccaacaccagcaucaucaaccacaaguucugcaaccugagcgacgcccacaagagaaaccuguacgaccacgcccugaugagcauccugagcaccuuccaccugagcauccccaacuucaaccaguacgaggccaugagcugcgacuucaacggcggcaagaucagcgugcaguacaaccugagccacgccuacgccguggacgccgccgagcacugcggcaccguggccaacggcgugcugcagaccuucaugagaauggccuggggcggcagcuacaucgcccuggacagcggcugcggcaacugggacugcaucaugaccagcuaccaguaccugaucauccagaacaccaccugggaggaccacugccaguucagcagacccagccccaucggcuaccugggccugcugagccagagaaccagagacaucuacaucagcagaagacugcugggcaccuucaccuggacccugagcgacagcgagggcaacgagacccccggcggcuacugccugaccagauggaugcugaucgaggccgagcugaagugcuucggcaacaccgccguggccaagugcaacgagaagcacgacgaggaguucugcgacaugcugagacuguucgacuucaacaagcaggccauccagagacugaagagccccgcccagaugagcauccagcugaucaacaaggccgugaacgcccugaucaacgaccagcugaucaugaagaaccaccugagagacaugaugugcauccccuacugcaacuacagcaaguacugguaccugaaccacaccagcagcggcagaaccagccugcccaagugcuggcuggugagcaacggcagcuaccugaacgagacccacuucagcgacgacaucgagcagcaggccgacaacaugaucaccgagaugcugcagaaggaguacaucgacagacagggcaagaccccccugggccugguggaccuguucguguucagcaccagcuucuaccugaucagcaucuuccugcaccugaucaagauccccacccacagacacaucgugggcaagcccugccccaagccccacagacugaaccacaugggcaucugcagcugcggccuguacaagcagcccggcgugcccaccagauggaagagaugaggacuaguuauaagacugacuagcccgaugggccucccaacgggcccuccuccccuccuugcaccgagauuaaucaaaggcucuuuucagagccaccaaaaaaaaaaaaaaaaaaaaaaaaaaaaaaaaaaaaaaaaaaaaaaaaaaaaaaaaaaaaaaaaagaauu

SEQ ID NO: 29419 - RNA, 1655 nt, Artificial Sequence
  mRNA product Design i-3 (hSL-A64-N5) comprising derived and/or modified sequence from LASV(KAK-428;Clade n.d. (VII))__ANH09740__GPCmut5 (opt4)
aggagaaagcuuaccaugggccagaucgugaccuucuuccaggaggugccccacgugaucgaggaggugaugaacaucgugcugaucgcccugagccugcuggccauccugaagggccuguacaacuucgccaccugcggcgugaucggccugaucaccuuccugcugcugugcggcagaagcugcagcgccaccuacaagggccaguacgagcugcagacccuggagcugaacauggagagccugaacaugaccaugccccugagcugcaccaagaacaacagccaccacuacaucagagccggcaacaacaccggccuggagcugacccugaccaacaccagcaucaucagccacaaguucugcaaccugagcgacgcccacaagaagaaccuguacgaccacacccugaugagcaucaucaccaccuuccaccugagcauccccaacuucaaccaguacgaggccaugagcugcgacuucaacggcggcaagaucagcauccaguacaaccugagccacagcuacgccggcgacgccgcccagcacugcggcaccguggccaacggcgugcugcagaccuucaugagaauggccuggggcggcagcuaccuggcccuggacagcggcugcagaggcugggacugcaucaucagcagcuaccaguaccugaucauccagaacaccaccugggacgaccacugccaguucagcagacccagccccaucggcuaccugggcuucgugagccagaagaccagagacaucuacaucagcagaagacugcugggcaccuucaccuggacccugagcgacagcgagggccacgacaugcccggcggcuacugccugaccagauggaugcugaucgaggccgaccugaagugcuucggcaacaccgccguggccaagugcaacgagaagcacgacgaggaguucugcgacauguggagacuguucgacuucaacaagcaggccauccagagacugaaggcccccgcccagaugaacauccagcugaucaacaaggccgugaacgcccugaucaacgaccagcugaugaugaagaaccaccugagagacaucaugugcauccccuacugcaacuacagcaaguucugguaccugaacaacaccaccaccggcagaaccagccugcccagaugcuggcugaucagcaacggcagcuaccugaacgagacccacuucagcgacgacaucgagcagcaggccgacaacaugaucaccgagaugcugcagaaggaguacauggacagacagggcaagaccccccugggccugguggaccuguucguguucagcaccagcuucuaccugaucaccaucuuccugcaccuggugaagauccccacccacagacacaucgugggcaagcccugccccaagccccacagacugaaccacaugggcaucugcagcugcggccuguacaagcagcccggcgugcccgugagauggaagagaugaggacuaguuauaagacugacuagcccgaugggccucccaacgggcccuccuccccuccuugcaccgagauuaaucaaaggcucuuuucagagccaccaaaaaaaaaaaaaaaaaaaaaaaaaaaaaaaaaaaaaaaaaaaaaaaaaaaaaaaaaaaaaaaaagaauu

SEQ ID NO: 29420 - RNA, 1655 nt, Artificial Sequence; identical to SEQ ID NO: 29414
  mRNA product Design i-3 (hSL-A64-N5) comprising derived and/or modified sequence from LASV(Pinneo-NIG-1969;Clade I)__AIT17836__GPCmut5 (opt4)

SEQ ID NO: 29421 - RNA, 1655 nt, Artificial Sequence
  mRNA product Design i-3 (hSL-A64-N5) comprising derived and/or modified sequence from LASV(ISTH0009-NIG-2011;Clade II)__AIT17404__GPCmut5 (opt4)
aggagaaagcuuaccaugggccagaucaucaccuucuuccaggaggugccccacgugaucgaggaggugaugaacaucgugcugaucgcccugagccugcuggccauccugaagggcaucuacaacguggccaccugcggccuguucggccuggugagcuuccugcugcugugcggcagaagcugcagcaccaccuacaagggcguguacgagcugcagacccuggagcuggacauggccagccugaacaugaccaugccccugagcugcaccaagaacaacagccaccacuacaucauggugggcaacgagaccggccuggagcugacccugaccaacaccagcaucaucaaccacaaguucugcaaccugagcgacgcccacaagaagaaccuguacgaccacgcccugaugagcaucaucagcaccuuccaccugagcauccccaacuucaaccaguacgaggccaugagcugcgacuucaacggcggcaagaucagcgugcaguacaaccugagccacgccuacgccguggacgccgccaaccacugcggcaccaucgccaacggcgugcugcagaccuucaugagaauggccuggggcggcagcuacaucgcccuggacagcggcugcggcagcugggacugcaucaugaccagcuaccaguaccugaucauccagaacaccaccugggaggaccacugccaguucagcagacccagccccaucggcuaccugggccugcugagccagagaaccagagacaucuacaucagcagaagacugcugggcaccuucaccuggacccugagcgacagcgagggcaacgagacccccggcggcuacugccugaccagauggaugcugaucgaggccgagcugaagugcuucggcaacaccgccguggccaagugcaacgagaagcacgacgaggaguucugcgacaugcugagacuguucgacuucaacaagcaggccaucagaagacugaagacccccgcccagaugagcauccagcugaucaacaaggccgugaacgcccugaucaacgaccagcugaucaugaagaaccaccugagagacaucaugugcauccccuacugcaacuacagcaaguacugguaccugaaccacaccgugaccggcaagaccagccugcccagaugcuggcuggugagcaacggcagcuaccugaacgagacccacuucagcgacgacaucgagcagcaggccgacaacaugaucaccgagcugcugcagaaggaguacauggacagacagggcaagaccccccugggccugguggaccuguucguguucagcaccagcuucuaccugaucagcaucuuccugcaccugaucaagauccccacccacagacacaucaccggcaagcccugccccaagccccacagacugaaccacaugggcaucugcagcugcggccuguacaagcaccccggcgugcccgugaaguggaagagaugaggacuaguuauaagacugacuagcccgaugggccucccaacgggcccuccuccccuccuugcaccgagauuaaucaaaggcucuuuucagagccaccaaaaaaaaaaaaaaaaaaaaaaaaaaaaaaaaaaaaaaaaaaaaaaaaaaaaaaaaaaaaaaaaagaauu

SEQ ID NO: 29422 - RNA, 1655 nt, Artificial Sequence
  mRNA product Design i-3 (hSL-A64-N5) comprising derived and/or modified sequence from LASV(ISTH2010-NIG-2012;Clade II)__AIT17482__GPCmut5 (opt4)
aggagaaagcuuaccaugggccagaucaucaccuucuuccaggaggugccccacgugaucgaggaggugaugaacaucgugcugaucgcccugagccugcuggccauccugaagggcaucuacaacguggccaccugcggccuguucggccuggugagcuuccugcugcugugcggcagaagcugcagcaccaccuacaagggcguguacgagcugcagacccuggagcuggacauggccagccugaacaugaccaugccccugagcugcaccaagaacaacagccaccacuacaucauggugggcaacgagaccggccuggagcugacccugaccaacaccagcaucaucaaccacaaguucugcaaccugagcgacgcccacaagaagaaccuguacgaccacgcccugaugagcaucaucagcaccuuccaccugagcauccccaacuucaaccaguacgaggccaugagcugcgacuucaacggcggcaagaucagcgugcaguacaaccugagccacgccuacgccguggacgccgccaaccacugcggcaccaucgccaacggcgugcugcagaccuucaugagaauggccuggggcggcagcuacaucgcccuggacagcggcugcggcagcugggacugcaucaugaccagcuaccaguaccugaucauccagaacaucaccugggaggaccacugccaguucagcagacccagccccaucggcuaccugggccugcugagccagagaaccagagacaucuacaucagcagaagacugcugggcaccuucaccuggacccugagcgacagcgagggcaacgagacccccggcggcuacugccugaccagauggaugcugaucgaggccgagcugaagugcuucggcaacaccgccguggccaagugcaacgagaagcacgacgaggaguucugcgacaugcugagacuguucgacuucaacaagcaggccaucagaagacugaagacccccgcccagaugagcauccagcugaucaacaaggccgugaacgcccugaucaacgaccagcugaucaugaagaaccaccugagagacaucaugugcauccccuacugcaacuacagcaaguacugguaccugaaccacaccgugaccggcaagaccagccugcccagaugcuggcuggugagcaacggcagcuaccugaacgagacccacuucagcgacgacaucgagcagcaggccgacaacaugaucaccgagcugcugcagaaggaguacaucgacagacagggcaagaccccccugggccugguggaccuguucguguucagcaccagcuucuaccugaucagcaucuuccugcaccuggugaagauccccacccacagacacguggugggcaagcccugccccaagccccacagacugaaccacaugggcaucugcagcugcggccuguacaagcaccccggcgugcccgugaaguggaagagaugaggacuaguuauaagacugacuagcccgaugggccucccaacgggcccuccuccccuccuugcaccgagauuaaucaaaggcucuuuucagagccaccaaaaaaaaaaaaaaaaaaaaaaaaaaaaaaaaaaaaaaaaaaaaaaaaaaaaaaaaaaaaaaaaagaauu

SEQ ID NO: 29423 - RNA, 1655 nt, Artificial Sequence
  mRNA product Design i-3 (hSL-A64-N5) comprising derived and/or modified sequence from LASV(Lassa virus/H.sapiens-wt/NGA/2015/ISTH_0543;Clade II)__AVO03639__GPCmut5 (opt4)
aggagaaagcuuaccaugggccagaucaucaccuucuuccaggaggugccccacgugaucgaggaggugaugaacaucgugcugaucgcccugagccugcuggccauccugaagggcaucuacaacguggccaccugcggccuguucggccuggugagcuuccugcugcugugcggcagaagcugcagcaccaccuacaagggcguguacgagcugcagacccuggagcuggacauggccaaccugaacaugaccaugccccugagcugcaccaagaacaacagccaccacuacaucauggugggcaacgagaccggccuggagcugacccugaccaacaccagcaucaucaaccacaaguucugcaaccugagcgacgcccacaagaagaaccuguacgaccacgcccugaugagcaucaucagcaccuuccaccugagcauccccaacuucaaccaguacgaggccaugagcugcgacuucaacggcggcaagaucagcgugcaguacaaccugagccacaccuacgccguggacgccgccaaccacugcggcaccaucgccaacggcgugcugcagaccuucaugagaauggccuggggcggcagcuacaucgcccuggacagcggcugcggcagcugggacugcaucaugaccagcuaccaguaccuggugauccagaacaccaccugggaggaccacugccaguucagcagacccagccccaucggcuaccugggccugcugagccagagaaccagagacaucuacaucagcagaagacugcugggcaccuucaccuggacccugagcgacagcgagggcaacgagacccccggcggcuacugccugaccagauggaugcugaucgaggccgagcugaagugcuucggcaacaccgccguggccaagugcaacgagaagcacgacgaggaguucugcgacaugcugagacuguucgacuucaacaagcaggccaucagaagacugaagacccccgcccagaugagcauccagcugaucaacaaggccgugaacgcccugaucaacgaccagcugaucaugaagaaccaccugagagacaucaugugcauccccuacugcaacuacagcaaguacugguaccugaaccacaccgugaccggcaagaccagccugcccagaugcuggcuggugagcaacggcagcuaccugaacgagacccacuucagcgacgacaucgagcagcaggccgacaacaugaucaccgagcugcugcagaaggaguacaucgacagacagggcaagaccccccugggccugguggaccuguucguguucagcaccagcuucuaccugaucagcaucuuccugcaccuggugaagauccccacccacagacacaucaccggcaagcccugccccaagccccacagacugaaccacaugggcaucugcagcugcggccuguacaagcaccccggcgugcccgugaaguggaagagaugaggacuaguuauaagacugacuagcccgaugggccucccaacgggcccuccuccccuccuugcaccgagauuaaucaaaggcucuuuucagagccaccaaaaaaaaaaaaaaaaaaaaaaaaaaaaaaaaaaaaaaaaaaaaaaaaaaaaaaaaaaaaaaaaagaauu

SEQ ID NO: 29424 - RNA, 1655 nt, Artificial Sequence
  mRNA product Design i-3 (hSL-A64-N5) comprising derived and/or modified sequence from LASV(Lassa virus/H.sapiens-wt/NGA/2016/ISTH_0009;Clade II)__AVO03571__GPCmut5 (opt4)
aggagaaagcuuaccaugggccagaucaucaccuucuuccaggaggugccccacgugaucgaggaggugaugaacaucgugcugaucgcccugagccugcuggccauccugaagggcaucuacaacguggccaccugcggccugcugggccuggugagcuuccugcugcugugcggcagaagcugcagcaccaccuacaagggcguguacgagcugcagacccuggagcuggacauggccagccugaacaugaccaugccccugagcugcaccaagaacaacagccaccacuacaucauggugggcaacgagaccggccuggagcugacccugaccaacaccagcaucaucaaccacaaguucugcaaccugagcgacgcccacaagaagaaccuguacgaccacgcccugaugagcaucaucagcaccuuccaccugagcauccccaacuucaaccaguacgaggccaugagcugcgacuucaacggcggcagaaucagcgugcaguacaaccugagccacagcuacgccguggacgccgccaaccacugcggcaccaucgccaacggcgugcugcagaccuucaugagaauggccuggggcggcagcuacaucgcccuggacagcggcugcggcagcugggacugcaucaugaccagcuaccaguaccugaucauccagaacaccaccugggaggaccacugccaguucagcagacccagccccaucggcuaccugggccugcugagccagagaaccagagacaucuacaucagcagaagacugcugggcaccuucaccuggacccugagcgacagcgagggcaacgagacccccggcggcuacugccugaccagauggaugcugaucgaggccgagcugaagugcuucggcaacaccgccguggccaagugcaacgagaagcacgacgaggaguucugcgacaugcugagacuguucgacuucaacaagcaggccaucagaagacugaagacccccgcccagaugagcauccagcugaucaacaaggccgugaacgcccugaucaacgaccagcugaucaugaagaaccaccugagagacaucaugugcauccccuacugcaacuacagcaaguacugguaccugaaccacaccgugaccggcaagaccagccugcccagaugcuggcuggugagcaacggcagcuaccugaacgagacccacuucagcgacgacaucgagcagcaggccgacaacaugaucaccgagcugcugcagaaggaguacaucgacagacagggcaagaccccccugggccugguggaccuguucguguucagcaccagcuucuaccugaucagcaucuuccugcaccuggugaagauccccacccacagacacaucaccggcaagcccugccccaagccccacagacugaaccacaugggcaucugcagcugcggccuguacaaccaccccggcgugcccgugaaguggaagagaugaggacuaguuauaagacugacuagcccgaugggccucccaacgggcccuccuccccuccuugcaccgagauuaaucaaaggcucuuuucagagccaccaaaaaaaaaaaaaaaaaaaaaaaaaaaaaaaaaaaaaaaaaaaaaaaaaaaaaaaaaaaaaaaaagaauu

SEQ ID NO: 29425 - RNA, 1655 nt, Artificial Sequence
  mRNA product Design i-3 (hSL-A64-N5) comprising derived and/or modified sequence from LASV(Lassa virus/H.sapiens-wt/NGA/2016/ISTH_0017;Clade II)__AVO03567__GPCmut5 (opt4)
aggagaaagcuuaccaugggccagaucaucaccuucuuccaggaggugccccacgugaucgaggaggugaugaacaucgugcugaucgcccugagccugcuggccauccugaagggcaucuacaacguggccaccugcggccuguucggccuggugagcuuccugcugcugugcggcagaagcugcagcaccaccuacaagggcguguacgagcugcagacccuggagcuggacauggccagccugaacaugaccaugccccugagcugcaccaagaacaacagccaccacuacaucauggugggcaacgagaccggccuggagcugacccugaccaacaccagcaucaucaaccacaaguucugcaaccugagcgacgcccacaagaagaaccuguacgaccacgcccugaugagcaucaucagcaccuuccaccugagcauccccaacuucaaccaguacgaggccaugagcugcgacuucaacggcggcaagaucagcgugcaguacaaccugagccacaccuacgccaucgacgccgccaaccacugcggcaccaucgccaacggcgugcugcagaccuucaugagaauggccuggggcggcagcuacaucgcccuggacagcggcugcggcagcugggacugcaucaugaccagcuaccaguaccugaucauccagaacaccaccugggaggaccacugccaguucagcagacccagccccaucggcuaccugggccugcugagccagagaaccagagacaucuacaucagcagaagacugcugggcaccuucaccuggacccugagcgacagcgagggcaacgagacccccggcggcuacugccugaccagauggaugcugaucgaggccgagcugaagugcuucggcaacaccgccguggccaagugcaacgagaagcacgacgaggaguucugcgacaugcugagacuguucgacuucaacaagcaggccaucagaagacugaagacccccgcccagaugagcauccagcugaucaacaaggccgugaacgcccugaucaacgaccagcugaucaugaagaaccaccugagagacaucaugugcauccccuacugcaacuacagcaaguacugguaccugaaccacaccgugaccggcaagaccagccugcccagaugcuggcuggugagcaacggcagcuaccugaacgagacccacuucagcgacgacaucgagcagcaggccgacaacaugaucaccgagcugcugcagaaggaguacauggacagacagggcaagaccccccugggccugguggaccuguucguguucagcaccagcuucuaccugaucagcaucuuccugcaccuggugagaauccccacccacagacacgugaucggcaagcccugccccaagccccacagacugaaccacaugggcaucugcagcugcggccuguacaagcaccccggcgugcccgugaaguggaagagaugaggacuaguuauaagacugacuagcccgaugggccucccaacgggcccuccuccccuccuugcaccgagauuaaucaaaggcucuuuucagagccaccaaaaaaaaaaaaaaaaaaaaaaaaaaaaaaaaaaaaaaaaaaaaaaaaaaaaaaaaaaaaaaaaagaauu

SEQ ID NO: 29426 - RNA, 1655 nt, Artificial Sequence
  mRNA product Design i-3 (hSL-A64-N5) comprising derived and/or modified sequence from LASV(Lassa virus/H.sapiens-wt/NGA/2018/ISTH_0959;Clade II)__AVV65099__GPCmut5 (opt4)
aggagaaagcuuaccaugggccagaucaucaccuucuuccaggaggugccccacgugaucgaggaggugaugaacaucgugcugaucgcccugagccugcuggccauccugaagggcaucuacaacguggugaccugcggccuguucggccuggugagcuuccugcugcugugcggcagaagcugcagcaccaccuacaagggcguguacgagcugcagacccuggagcuggacauggccagccugaacaugaccaugccccugagcugcaccaagaacaacagccaccacuacaucauggugggcaacgagaccggccuggagcugacccugaccaacaccagcaucaucaaccacaaguucugcaaccugagcgacgcccacaagaagaaccuguacgaccacgcccugaugagcaucaucagcaccuuccaccugagcauccccaacuucaaccaguacgaggccaugagcugcgacuucaacggcggcaagaucagcgugcaguacaaccugagccacgccuacgccaucgacgccgccaaccacugcggcaccaucgccaacggcgugcugcagaccuucaugagaauggccuggggcggcagcuacaucgcccuggacagcggcugcggcagcugggacugcaucaugaccagcuaccaguaccugaucauccagaacaccaccugggaggaccacugccaguucagcagacccagccccaucggcuaccugggccugcugagccagagaaccagagacaucuacaucagcagaagacugcugggcaccuucaccuggacccugagcgacagcgagggcaacgagacccccggcggcuacugccugaccagauggaugcugaucgaggccgagcugaagugcuucggcaacaccgccguggccaagugcaacgagaagcacgacgaggaguucugcgacaugcugagacuguucgacuucaacaagcaggccaucagaagacugaagacccccgcccagaugagcauccagcugaucaacaaggccgugaacgcccugaucaacgaccagcugaucaugaagaaccaccugagagacaucaugugcauccccuacugcaacuacagcaaguacugguaccugaaccacaccgugaccggcaagaccagccugcccagaugcuggcuggugagcaacggcagcuaccugaacgagacccacuucagcgacgacaucgagcagcaggccgacaacaugaucaccgagcugcugcagaaggaguacaucgacagacagggcaagaccccccugggccugguggaccuguucguguucagcaccagcuucuaccugaucagcaucuuccugcaccuggugaagauccccacccacagacacgugaucggcaagcccugccccaagccccacagacugaaccacaugggcaucugcagcugcggccuguacaagcaccccggcgugcccgugaaguggaagagaugaggacuaguuauaagacugacuagcccgaugggccucccaacgggcccuccuccccuccuugcaccgagauuaaucaaaggcucuuuucagagccaccaaaaaaaaaaaaaaaaaaaaaaaaaaaaaaaaaaaaaaaaaaaaaaaaaaaaaaaaaaaaaaaaagaauu

SEQ ID NO: 29427 - RNA, 1655 nt, Artificial Sequence
  mRNA product Design i-3 (hSL-A64-N5) comprising derived and/or modified sequence from LASV(LASV003-NIG-2008;Clade II)__AIT17580__GPCmut5 (opt4)
aggagaaagcuuaccaugggccagaucaucaccuucuuccaggaggugccccacgugaucgaggaggugaugaacaucgugcugaucgcccugagccugcuggccauccugaagggcaucuacaacguggccaccugcggccuguucggccuggugagcuuccugcugcugugcggcagaagcugcagcaccaccuacaagggcguguacgagcugcagacccuggagcuggacauggccagccugaacaugaccaugccccugagcugcaccaagaacaacagccaccacuacaucauggugggcaacgagaccggccuggagcugacccugaccaacaccagcaucaucaaccacaaguucugcaaccugagcgacgcccacaagaagaaccuguacgaccacgcccugaugagcaucaucagcaccuuccaccugagcauccccaacuucaaccaguacgaggccaugagcugcgacuucaacggcggcaagaucagcgugcaguacaaccugagccacaccuacgccguggacgccgccaaccacugcggcaccaucgccaacggcgugcugcagaccuucaugagaauggccuggggcggcagcuacaucgcccuggacagcggcugcggcagcugggacugcaucaugaccagcuaccaguaccugaucauccagaacaccaccugggaggaccacugccaguucagcagacccagccccaucggcuaccugggccugcugagccagagaaccagagacaucuacaucagcagaagacugcugggcaccuucaccuggacccugagcgacagcgagagcaacgagacccccggcggcuacugccugaccagauggaugcugaucgaggccgagcugaagugcuucggcaacaccgccguggccaagugcaacgagaagcacgacgaggaguucugcgacaugcugagacuguucgacuucaacaagcaggccaucagaagacugaaggcccccgcccagaugagcauccagcugaucaacaaggccgugaacgcccugaucaacgaccagcugaucaugaagaaccaccugagagacaucaugugcauccccuacugcaacuacagcaaguacugguaccugaaccacaccgugaccggcagaaccagccugcccagaugcuggcuggugagcaacggcagcuaccugaacgagacccacuucagcgacgacaucgagcagcaggccgacaacaugaucaccgagcugcugcagaaggaguacauggacagacagggcaagaccccccugggccugguggaccuguucguguucagcaccagcuucuaccugaucagcaucuuccugcaccuggugaagauccccacccacagacacgugaucggcaagcccugccccaagccccacagacugaaccacaugggcaucugcagcugcggccuguacaagcaccccggcgugcccgugaaguggaagagaugaggacuaguuauaagacugacuagcccgaugggccucccaacgggcccuccuccccuccuugcaccgagauuaaucaaaggcucuuuucagagccaccaaaaaaaaaaaaaaaaaaaaaaaaaaaaaaaaaaaaaaaaaaaaaaaaaaaaaaaaaaaaaaaaagaauu

SEQ ID NO: 29428 - RNA, 1655 nt, Artificial Sequence
  mRNA product Design i-3 (hSL-A64-N5) comprising derived and/or modified sequence from LASV(LASV035-NIG-2009;Clade II)__AIT17588__GPCmut5 (opt4)
aggagaaagcuuaccaugggccagaucaucaccuucuuccaggaggugccccacgugaucgaggaggugaugaacaucgugcugaucgcccugagccugcuggccauccugaagggcaucuacaacguggccaccugcggccuguucggccuggugagcuuccugcugcugugcggcagaagcugcagcaccaccuacaagggcguguacgagcugcagacccuggagcuggacauggccagccugaacaugaccaugccccugagcugcaccaagaacaacagccaccacuacaucauggugggcaacgagaccggccuggagcugacccugaccaacaccagcaucaucaaccacaaguucugcaaccugagcgacgcccacaagaagaaccuguacgaccacgcccugaugagcaucaucagcaccuuccaccugagcauccccaacuucaaccaguacgaggccaugagcugcgacuucaacggcggcaagaucagcgugcaguacaaccugagccacgccuacgccguggacgccgccaaccacugcggcaccaucgccaacggcgugcugcagaccuucaugagaauggccuggggcggcagcuacaucgcccuggacagcggcugcggcagcugggacugcaucaugaccagcuaccaguaccugaucauccagaacaccaccugggaggaccacugccaguucagcagacccagccccaucggcuaccugggccugcugagccagagaaccagagacaucuacaucagcagaagacugcugggcaccuucaccuggacccugagcgacagcgagggcaacgagacccccggcggcuacugccugaccagauggaugcugaucgaggccgagcugaagugcuucggcaacaccgccguggccaagugcaacgagaagcacgacgaggaguucugcgacaugcugagacuguucgacuucaacaagcaggccaucagaagacugaaggcccccgcccagaugagcauccagcugaucaacaaggccgugaacgcccugaucaacgaccagcugaucaugaagaaccaccugagagacaucaugugcauccccuacugcaacuacagcaaguacugguaccugaaccacaccgugaccggcaagaccagccugcccagaugcuggcuggugagcaacggcagcuaccugaacgagacccacuucagcgacgacaucgagcagcaggccgacaacaugaucaccgagcugcugcagaaggaguacaucgacagacagggcaagaccccccugggccugguggaccuguucguguucagcaccagcuucuaccugaucagcaucuuccugcaccuggugaagauccccacccacagacacgugaucggcaagcccugccccaagccccacagacugaaccacaugggcaucugcagcugcggccuguacaagcaccccggcgugcccgugaaguggaagagaugaggacuaguuauaagacugacuagcccgaugggccucccaacgggcccuccuccccuccuugcaccgagauuaaucaaaggcucuuuucagagccaccaaaaaaaaaaaaaaaaaaaaaaaaaaaaaaaaaaaaaaaaaaaaaaaaaaaaaaaaaaaaaaaaagaauu

SEQ ID NO: 29429 - RNA, 1655 nt, Artificial Sequence
  mRNA product Design i-3 (hSL-A64-N5) comprising derived and/or modified sequence from LASV(LASV1000-NIG-2009;Clade II)__AIT17782__GPCmut5 (opt4)
aggagaaagcuuaccaugggccagaucaucaccuucuuccaggaggugccccacgugaucgaggaggugaugaacaucgugcugaucgcccugagccugcuggccauccugaagggcaucuacaacguggccaccugcggccuguucggccuggugagcuuccugcugcugugcggcagaagcugcagcaccaccuacaagggcguguacgagcugcagacccuggagcuggacauggccagccugaacaugaccaugccccugagcugcaccaagaacaacagccaccacuacaucauggugggcaacgagaccggccuggagcugacccugaccaacaccagcaucaucaaccacaaguucugcaaccugagcgacgcccacaagaagaaccuguacgaccacgcccugaugagcaucaucagcaccuuccaccugagcauccccaacuucaaccaguacgaggccaugagcugcgacuucaacggcggcaagaucagcgugcaguacaaccugagccacaccuacgccguggacgccgccaaccacugcggcaccaucgccaacggcgugcugcagaccuucaugagaauggccuggggcggcagcuacaucgcccuggacagcggcugcggcagcugggacugcaucaugaccagcuaccaguaccugaucauccagaacaccaccugggaggaccacugccaguucagcagacccagccccaucggcuaccugggccugcugagccagagaaccagagacaucuacaucagcagaagacugcugggcaccuucaccuggacccugagcgacagcgagggcaacgagacccccggcggcuacugccugaccagauggaugcugaucgaggccgagcugaagugcuucggcaacaccgccguggccaagugcaacgagaagcacgacgaggaguucugcgacaugcugagacuguucgacuucaacaagcaggccaucaagagacugaagacccccgcccagaugagcauccagcugaucaacaaggccgugaacgcccugaucaacgaccagcugaucaugaagaaccaccugagagacaucaugugcauccccuacugcaacuacagcaaguacugguaccugaaccacaccgugaccggcaagaccagccugcccagaugcuggcuggugagcaacggcagcuaccugaacgagacccacuucagcgacgacaucgagcagcaggccgacaacaugaucaccgagcugcugcagaaggaguacaucgacagacagggcaagaccccccugggccugguggaccuguucguguucagcaccagcuucuaccugaucagcaucuuccugcaccuggugaagauccccacccacagacacguggugggcaagcccugccccaagccccacagacugaaccacaugggcaucugcagcugcggccuguacaagcaccccggcgugcccgugaaguggaagagaugaggacuaguuauaagacugacuagcccgaugggccucccaacgggcccuccuccccuccuugcaccgagauuaaucaaaggcucuuuucagagccaccaaaaaaaaaaaaaaaaaaaaaaaaaaaaaaaaaaaaaaaaaaaaaaaaaaaaaaaaaaaaaaaaagaauu

SEQ ID NO: 29430 - RNA, 1655 nt, Artificial Sequence
  mRNA product Design i-3 (hSL-A64-N5) comprising derived and/or modified sequence from LASV(LASV221-NIG-2010;Clade II)__AIT17624__GPCmut5 (opt4)
aggagaaagcuuaccaugggccagaucaucaccuucuuccaggaggugccccacgugaucgaggaggugaugaacaucgugcugaucgcccugagccugcuggccauccugaagggcaucuacaacguggccaccugcggccuguucggccuggugagcuuccugcugcugugcggcagaagcugcagcaccaccuacaagggcguguacgagcugcagacccuggagcuggacauggccagccugaacaugaccaugccccugagcugcaccaagaacaacagccaccacuacaucauggugggcaacgagaccggccuggagcugacccugaccaacaccagcaucaucaaccacaaguucugcaaccugagcgacgcccacaagaagaaccuguacgaccacgcccugaugagcaucaucagcaccuuccaccugagcauccccaacuucaaccaguacgaggccaugagcugcgacuucaacggcggcaagaucagcgugcaguacaaccugagccacaccuacgccaucgacgccgccaaccacugcggcaccaucgccaacggcgugcugcagaccuucaugagaauggccuggggcggcagcuacaucgcccuggacagcggcugcggcagcugggacugcaucaugaccagcuaccaguaccugaucauccagaacaccaccugggaggaccacugccaguucagcagacccagccccaucggcuaccugggccugcugagccagagaaccagagacaucuacaucagcagaagacugcugggcaccuucaccuggacccugagcgacagcgagggcaacgagacccccggcggcuacugccugaccagauggaugcugaucgaggccgagcugaagugcuucggcaacaccgccguggccaagugcaacgagaagcacgacgaggaguucugcgacaugcugagacuguucgacuucaacaagcaggccaucagaagacugaagacccccgcccagaugagcauccagcugaucaacaaggccgugaacgcccugaucaacgaccagcugaucaugaagaaccaccugagagacaucaugugcauccccuacugcaacuacagcaaguacugguaccugaaccacaccgugaccggcaagaccagccugcccagaugcuggcuggugagcaacggcagcuaccugaacgagacccacuucagcgacgacaucgagcagcaggccgacaacaugaucaccgagaugcugcagaaggaguacauggacagacagggcaagaccccccugggccugguggaccuguucguguucagcaccagcuucuaccugaucagcaucuuccugcaccuggugaagauccccacccacagacacgugaucggcaagcccugccccaagccccacagacugaaccacaugggcaucugcagcugcggccuguacaagcaccccggcgugcccgugaaguggaagagaugaggacuaguuauaagacugacuagcccgaugggccucccaacgggcccuccuccccuccuugcaccgagauuaaucaaaggcucuuuucagagccaccaaaaaaaaaaaaaaaaaaaaaaaaaaaaaaaaaaaaaaaaaaaaaaaaaaaaaaaaaaaaaaaaagaauu

SEQ ID NO: 29431 - RNA, 1655 nt, Artificial Sequence
  mRNA product Design i-3 (hSL-A64-N5) comprising derived and/or modified sequence from LASV(LASV237-NIG-2010;Clade II)__AIT17638__GPCmut5 (opt4)
aggagaaagcuuaccaugggccagaucaucaccuucuuccaggaggugccccacgugaucgaggaggugaugaacaucgugcugaucgcccugagccugcuggccauccugaagggcaucuacaacguggccaccugcggccuguucggccuggugagcuuccugcugcugugcggcagaagcugcagcaccaccuacaagggcguguacgagcugcagacccuggagcuggacauggccagccugaacaugaccaugccccugagcugcaccaagaacaacagccaccacuacaucauggugggcaacgagaccggccuggagcugacccugaccaacaccagcaucaucaaccacaaguucugcaaccugagcgacgcccacaagaaggaccuguacgaccacgcccugaugagcaucaucagcaccuuccaccugagcauccccaacuucaaccaguacgaggccaugagcugcgacuucaacggcggcaagaucagcgugcaguacaaccugagccacaccuacgccguggacgccgccaaccacugcggcaccaucgccaacggcgugcugcagaccuucaugagaauggccuggggcggcagcuacaucgcccuggacagcggcugcggcagcugggacugcaucaugaccagcuaccaguaccugaucauccagaacaccaccugggaggaccacugccaguucagcagacccagccccaucggcuaccugggccugcugagccagagaaccagagacaucuacaucagcagaagacugcugggcaccuucaccuggacccugagcgacagcgagggcaacgagacccccggcggcuacugccugaccagauggaugcugaucgaggccgagcugaagugcuucggcaacaccgccguggccaagugcaacgagaagcacgacgaggaguucugcgacaugcugagacuguucgacuucaacaagcaggccaucagaagacugaagacccccgcccagaugagcauccagcugaucaacaaggccgugaacgcccugaucaacgaccagcugaucaugaagaaccaccugagagacaucaugugcauccccuacugcaacuacagcaaguacugguaccugaaccacaccgugaccggcaagaccagccugcccagaugcuggcuggugagcaacggcagcuaccugaacgagacccacuucagcgacgacaucgagcagcaggccgacaacaugaucaccgagcugcugcagaaggaguacauggacagacagggcaagaccccccugggccugguggaccuguucguguucagcaccagcuucuaccugaucagcaucuuccugcaccugaucaagauccccacccacagacacaucaccggcaagcccugccccaagccccacagacugaaccacaugggcaucugcagcugcggccuguacaagcaccccggcgugcccgugaaguggaagagaugaggacuaguuauaagacugacuagcccgaugggccucccaacgggcccuccuccccuccuugcaccgagauuaaucaaaggcucuuuucagagccaccaaaaaaaaaaaaaaaaaaaaaaaaaaaaaaaaaaaaaaaaaaaaaaaaaaaaaaaaaaaaaaaaagaauu

SEQ ID NO: 29432 - RNA, 1655 nt, Artificial Sequence
  mRNA product Design i-3 (hSL-A64-N5) comprising derived and/or modified sequence from LASV(LASV253-NIG-2011;Clade II)__AIT17670__GPCmut5 (opt4)
aggagaaagcuuaccaugggccagaucaucaccuucuuccaggaggugccccacgugaucgaggaggugaugaacaucgugcugaucgcccugagccugcuggccauccugaagggcaucuacaacguggccaccugcggccuguucggccuggugagcuuccugcugcugugcggcagaagcugcagcaccaccuacaagggcguguacgagcugcagacccuggagcuggacauggccagccugaacaugaccaugccccugagcugcaccaagaacaacagccaccacuacaucauggugggcaacgagaccggccuggagcugacccugaccaacaccagcaucaucaaccacaaguucugcaaccugagcgacgcccacaagaagaaccuguacgaccacgcccugaugagcaucaucagcaccuuccaccugagcauccccaacuucaaccaguacgaggccaugagcugcgacuucaacggcggcaagaucagcgugcaguacaaccugagccacaccuacgccguggacgccgccaaccacugcggcaccaucgccaacggcgugcugcagaccuucaugagaauggccuggggcggcagcuacaucgcccuggacagcggcugcggcagcugggacugcaucaugaccagcuaccaguaccugaucauccagaacaccaccugggaggaccacugccaguucagcagacccagccccaucggcuaccugggccugcugagccagagaaccagagacaucuacaucagcagaagacugcugggcaccuucaccuggacccugagcgacagcgagggcaacgagacccccggcggcuacugccugaccagauggaugcugaucgaggccgagcugaagugcuucggcaacaccgccguggccaagugcaacgagaagcacgacgaggaguucugcgacaugcugagacuguucgacuucaacaagcaggccaucagaagacugaaggcccccgcccagaugagcauccagcugaucaacaaggccgugaacgcccugaucaacgaccagcugaucaugaagaaccaccugagagacaucaugugcauccccuacugcaacuacagcaaguacugguaccugaaccacaccgugaccggcagaaccagccugcccagaugcuggcuggugagcaacggcagcuaccugaacgagacccacuucagcgacgacaucgagcagcaggccgacaacaugaucaccgagcugcugcagaaggaguacaucgacagacagggcaagaccccccugggccugguggaccuguucguguucagcaccagcuucuaccugaucagcaucuuccugcaccuggugaagauccccacccacagacacaucaucggcaagcccugccccaagccccacagacugaaccacaugggcaucugcagcugcggccuguacaagcaccccggcgugcccgugaaguggaagagaugaggacuaguuauaagacugacuagcccgaugggccucccaacgggcccuccuccccuccuugcaccgagauuaaucaaaggcucuuuucagagccaccaaaaaaaaaaaaaaaaaaaaaaaaaaaaaaaaaaaaaaaaaaaaaaaaaaaaaaaaaaaaaaaaagaauu

SEQ ID NO: 29433 - RNA, 1655 nt, Artificial Sequence
  mRNA product Design i-3 (hSL-A64-N5) comprising derived and/or modified sequence from LASV(LASV254-NIG-2011;Clade II)__AIT17674__GPCmut5 (opt4)
aggagaaagcuuaccaugggccagaucaucaccuucuuccaggaggugccccacgugaucgaggaggugaugaacaucgugcugaucgcccugagccugcuggccauccugaagggcaucuacaacguggccaccugcggccuguucggccuggugagcuuccugcugcugugcggcagaagcugcagcaccaccuacaagggcguguacgagcugcagacccuggagcuggacaugaccaaccugaacaugaccaugccccugagcugcaccaagaacaacagccaccacuacaucauggugggcaacgagaccggccuggagcugacccugaccaacaccagcaucaucaaccacaaguucugcaaccugagcgacgcccacaagaagaaccuguacaaccacgcccugaugagcaucaucagcaccuuccaccugagcauccccaacuucaaccaguacgaggccaugagcugcgacuucaacggcggcaagaucagcgugcaguacaaccugagccacagcuacgccguggacgccgccaaccacugcggcaccaucgccaacggcgugcugcagaccuucaugagaauggccuggggcggcagcuacaucgcccuggacagcggcugcggcaacugggacugcaucaugaccagcuaccaguaccugaucauccagaacaccaccugggaggaccacugccaguucagcagacccagccccaucggcuaccugggccugcugagccagagaaccagagacaucuacaucagcagaagacugcugggcaccuucaccuggacccugagcgacagcgagggcaacgagacccccggcggcuacugccugaccagauggaugcugaucgaggccgagcugaagugcuucggcaacaccgccguggccaagugcaacgagaagcacgacgaggaguucugcgacaugcugagacuguucgacuucaacaagcaggccaucagaagacugaagacccccgcccaggccaacauccagcugaucaacaaggccgugaacgcccugaucaacgaccagcugaucaugaagaaccaccugagagacaucaugugcauccccuacugcaacuacagcaaguacugguaccugaaccacaccgugaccggcaagaccagccugcccagaugcuggcuggugagcaacggcagcuaccugaacgagacccacuucagcgacgacaucgagcagcaggccgacaacaugaucaccgagcugcugcagaaggaguacauggacagacagggcaagaccccccugggccugguggaccuguucguguucagcaccagcuucuaccugaucagcaucuuccugcaccuggugaagauccccacccacagacacgugaucggcaagcccugccccaagccccacagacugaaccacaugggcaucugcagcugcggccuguacaagcaccccggcgugcccgugaaguggaagagaugaggacuaguuauaagacugacuagcccgaugggccucccaacgggcccuccuccccuccuugcaccgagauuaaucaaaggcucuuuucagagccaccaaaaaaaaaaaaaaaaaaaaaaaaaaaaaaaaaaaaaaaaaaaaaaaaaaaaaaaaaaaaaaaaagaauu

SEQ ID NO: 29434 - RNA, 1655 nt, Artificial Sequence
  mRNA product Design i-3 (hSL-A64-N5) comprising derived and/or modified sequence from LASV(Nig08-A19;Clade III)__ADU56618__GPCmut5 (opt4)
aggagaaagcuuaccaugggccagaucgugaccuucuuccaggaggugccccacgugaucgaggaggugaugaacaucgugcugaucgcccugagcauccuggccauccugaagggccuguacaacaucgccaccugcggccugaucggccuggugaccuuccugcugcugagcggcagaagcugcagcaugaccuacaagggcguguacgagcugcagacccuggagcugaacaugaacacccugaacaugaccaugccccugagcugcaccaagaacaacagccaccacuacaucauggugggcaacgagaccggccuggagcugacccugaccaacaccagccugcugcaccacaaguucugcaaccugagcgacgcccacaagaagaaccuguacgaccacacccugaugagcaucaucagcaccuuccaccugagcauccccaacuucaaccaguacgaggccaugagcugcgacuucaacggcggcaagaucaccgugcaguacaaccugagccacagcuacgccaucgacgccgccaaccacugcggcaccguggccaacggcgugcugcagaccuucaugagaauggccuggggcggcagcuacaucgcccuggacagcggcugcggcaagugggacugcaucaugaccagcuaccaguaccugaucauccagaacaccaccugggaggaccacugccaguucagcagacccagccccaucggcuaccugggccugcugagccagagaaccagagacaucuacaucagcagaagacugcugggcaccuucaccuggacccugagcgacagcgagggcaacgagacccccggcggcuacugccugaccagauggaugcugaucgaggccgagcugaagugcuucggcaacaccgccguggccaagugcaacgagaagcacgacgaggaguucugcgacaugcugagacuguucgacuucaacaagcaggccaucagaagacugaaggcccccgcccagaugagcauccagcugaucaacaaggccgugaacgcccugaucaacgaccagcugaucaugaagaaccaccugagagacaucaugugcauccccuacugcaacuacagcaaguacugguaccugaaccacaccagcaccggcagaaccagccugcccagaugcuggcuggugagcaacggcagcuaccugaacgagacccacuucagcgacgacaucgagcagcaggccgacaacaugaucaccgagaugcugcagaaggaguaccuggacagacagggcaagaccccccugggccugguggaccuguucguguucagcaccagcuucuaccugaucagcaucuuccugcaccuggugaagauccccacccacagacacaucgugggcaagcccugccccaagccccacagacugaaccacaugggcaucugcagcugcggccuguacaagcagcccggcgugcccgugagauggaagagaugaggacuaguuauaagacugacuagcccgaugggccucccaacgggcccuccuccccuccuugcaccgagauuaaucaaaggcucuuuucagagccaccaaaaaaaaaaaaaaaaaaaaaaaaaaaaaaaaaaaaaaaaaaaaaaaaaaaaaaaaaaaaaaaaagaauu

SEQ ID NO: 29435 - RNA, 1658 nt, Artificial Sequence
  mRNA product Design i-3 (hSL-A64-N5) comprising derived and/or modified sequence from LASV(G1180-SLE-2010;Clade IV)__AIT17168__GPCmut5 (opt4)
aggagaaagcuuaccaugggccagaucgugaccuucuuccaggaggugccccacgugaucgaggaggugaugaacaucgugcugaucgcccugagcauccuggccgugcugaagggccuguacaacuucgccaccugcggccuggugggccugcugaccuuccugcugcugugcggcagaagcugcaccgccagcagauacaagggcguguacgagcugcagacccuggagcugaacauggagacccugaacaugaccaugccccugagcugcaccaagaacaacagccaccacuacaucauggugggcaacgagaccggccuggagcugacccugaccaacaccagcaucaucaaccacaaguucugcaaccugagcgacgcccacaagaagaaccuguacgaccacgcccugaugagcaucaucagcaccuuccaccugagcauccccaacuucaaccaguacgaggccaugagcugcgacuucaacggcggcaagaucagcgugcaguacaaccugagccacagcuacgccggcgacgccgccaaccacugcggcaccguggccaacggcgugcugcagaccuucaugagaauggccuggggcggcagcuacaucgcccuggacagcggcugcggcagcugggacugcaucaugaccagcuaccaguaccugaucauccagaacaccaccugggaggaccacugccaguucagcagacccagccccaucggcuaccugggccugcugagccagagaaccagagacaucuacaucagcagaagacugcugggcaccuucaccuggacccugagcgacagcgagggcaaggacacccccggcggcuacugccugaccagauggaugcugaucgaggccgagcugaagugcuucggcaacaccgccguggccaagugcaacgagaagcacgacgaggaguucugcgacaugcugagacuguucgacuucaacaagcaggccauccagagacugaaggcccccgcccagaugagcauccagcugaucaacaaggccgugaacgcccugaucaacgaccagcugaucaugaagaaccaccugagagacaucaugugcauccccuacugcaacuacagcaaguacugguaccugaaccacaccaccaccggcaagaccagccugcccaagugcuggcuggugagcaacggcagcuaccugaacgagacccacuucagcgacgacaucgagcagcaggccgacaacaugaucaccgagaugcugcagaaggaguacauggagagacagggcaagaccccccugggccugguggaccuguucguguucagcaccagcuucuaccugaucagcaucuuccugcaccuggugaagauccccacccacagacacaucgugggcaagagcugccccaagccccacagacugaaccacaugggcaucugcagcugcggccuguacaagcagcccggcgugcccgugaaguggaagagaugaggacuaguuauaagacugacuagcccgaugggccucccaacgggcccuccuccccuccuugcaccgagauuaaucaaaggcucuuuucagagccaccaaaaaaaaaaaaaaaaaaaaaaaaaaaaaaaaaaaaaaaaaaaaaaaaaaaaaaaaaaaaaaaaagaauu

SEQ ID NO: 29436 - RNA, 1658 nt, Artificial Sequence
  mRNA product Design i-3 (hSL-A64-N5) comprising derived and/or modified sequence from LASV(G1442-SLE-2011;Clade IV)__AIT17180__GPCmut5 (opt4)
aggagaaagcuuaccaugggccagaucgugaccuucuuccaggaggugccccacgugaucgaggaggugaugaacaucgugcugaucgcccugagcauccuggccgugcugaagggccuguacaacguggccaccugcggccugaucggccuggugaccuuccugcugcugugcggcagaagcugcaccaccacccuguacaagggcguguacgagcugcagacccuggagcugaacauggagacccugaacaugaccaugccccugagcugcaccaagaacaacagccaccacuacaucagagugggcaacgagaccggccuggagcugacccugaccaacaccagcaucaucaaccacaaguucugcaaccugagcgacgcccacaagaagaaccuguacgaccacgcccugaugagcaucaucagcaccuuccaccugagcauccccaacuucaaccaguacgaggccaugagcugcgacuucaacggcggcaagaucagcgugcaguacaaccugagccacagcuacgccggcgacgccgccaaccacugcggcaccguggccaacggcgugcugcagaccuucaugagaauggccuggggcggcagcuacaucgcccuggacagcggcugcggcaacugggacugcaucaugaccagcuaccaguaccugaucauccagaacaccaccugggacgaccacugccaguucagcagacccagccccaucggcuaccugggccugcugagccagagaaccagagacguguacaucagcagaagacugcugggcaccuucaccuggacccugagcgacagcgagggcaaggacacccccggcggcuacugccugaccagauggaugcugaucgaggccgagcugaagugcuucggcaacaccgccguggccaagugcaacgagaagcacgacgaggaguucugcgacaugcugagacuguucgacuucaacaagcaggccauccagagacugaaggcccccgcccagaugagcauccagcugaucaacaaggccgugaacgcccugaucaacgaccagcugaucaugaagaaccaccugagagacaucaugugcauccccuacugcaacuacagcaaguacugguaccugaacaacaccgccaccggcaagaccagccugcccaagugcuggcugaucagcaacggcagcuaccugaacgagacccacuucagcgacgacaucgagcaggaggccgacaacaugaucaccgagaugcugcagaaggaguacauggagagacagggcaagaccccccugggccugguggaccuguucguguucagcaccagcuucuaccugaucagcaucuuccugcaccuggugaagauccccacccacagacacaucgugggcaagagcugccccaagccccacagacugaaccacaugggcaucugcagcugcggccuguacaagcagcccggcgugcccgugagauggaagagaugaggacuaguuauaagacugacuagcccgaugggccucccaacgggcccuccuccccuccuugcaccgagauuaaucaaaggcucuuuucagagccaccaaaaaaaaaaaaaaaaaaaaaaaaaaaaaaaaaaaaaaaaaaaaaaaaaaaaaaaaaaaaaaaaagaauu

SEQ ID NO: 29437 - RNA, 1658 nt, Artificial Sequence
  mRNA product Design i-3 (hSL-A64-N5) comprising derived and/or modified sequence from LASV(G3010-SLE-2013;Clade IV)__AIT17344__GPCmut5 (opt4)
aggagaaagcuuaccaugggccagaucgugaccuucuuccaggaggugccccacgugaucgaggaggugaugaacaucgugcugaucgcccugagcauccuggccgugcugaagggccuguacaacuucgccaccugcggccuggugggccuggugaccuuccugcugcugugcggcagaagcugcaccaccagccuguacaagggcguguacgagcugcagacccuggagcugaacauggagacccugaacaugaccaugccccugagcugcaccaagaacaacagccaccacuacaucauggugggcaacgagaccggccuggagcugacccugaccaacaccagcaucaucaaccacaaguucugcaaccugagcgacgcccacaagaagaaccuguacaaccacgcccugaugagcaucaucagcaccuuccaccugagcauccccaacuucaaccaguacgaggccaugagcugcgacuucaacggcggcaagaucagcgugcaguacaaccugagccacagcuacgccggcgacgccgccagccacugcggcaccguggccaacggcgugcugcagaccuucaugagaauggccuggggcggcagcuacaucgcccuggacagcggcugcggcaagugggacugcaucaugaccagcuaccaguaccugaucauccagaacaccaccugggaggaccacugccaguucagcagacccagccccaucggcuaccugggccugcugagccagagaaccagagacaucuacaucagcagaagacugcugggcaccuucaccuggacccugagcgacagcgagggcaaggacacccccggcggcuacugccugaccagauggaugcugaucgaggccgagcugaagugcuucggcaacaccgccguggccaagugcaacgagaagcacgacgaggaguucugcgacaugcugagacuguucgacuucaacaagcaggccauccagagacugaagacccccgcccagaugagcauccagcugaucaacaaggccgugaacgcccugaucaacgaccagcugaucaugaagaaccaccugagagacaucaugugcauccccuacugcaacuacagcaaguacugguaccugaaccacaccaccaccggcaagaccagccugcccaagugcuggcuggugagcaacggcagcuaccugaacgagacccacuucagcgacgacaucgagcagcaggccgacaacaugaucaccgagaugcugcagaaggaguacauggagagacagggcaagaccccccugggccugguggaccuguucguguucagcaccagcuucuaccugaucagcaucuuccugcaccuggugaagauccccacccacagacacaucgugggcaagagcugccccaagccccacagacugaaccacaugggcaucugcagcugcggccuguacaagcagcccggcgugcccgugagauggaagagaugaggacuaguuauaagacugacuagcccgaugggccucccaacgggcccuccuccccuccuugcaccgagauuaaucaaaggcucuuuucagagccaccaaaaaaaaaaaaaaaaaaaaaaaaaaaaaaaaaaaaaaaaaaaaaaaaaaaaaaaaaaaaaaaaagaauu

SEQ ID NO: 29438 - RNA, 1658 nt, Artificial Sequence
  mRNA product Design i-3 (hSL-A64-N5) comprising derived and/or modified sequence from LASV(G502-SLE-2009;Clade IV)__AIT17126__GPCmut5 (opt4)
aggagaaagcuuaccaugggccagaucgugaccuucuuccaggaggugccccacgugaucgaggaggugaugaacaucgugcugaucgcccugagcauccuggccgugcugaagggccuguacaacuucgccaccugcggccuggugggccugcugaccuuccugcugcugugcggcagaagcugcaccaccggccuguacaagggcguguacgagcugcagacccuggagcugaacauggagacccugaacaugaccaugccccugagcugcaccaagaacaacagccaccacuacaucauggugggcaacgagaccggccuggagcugacccugaccaacaccagcaucaucaaccacaaguucugcaaccugagcgacgcccacaagaagaaccuguacgaccacgcccugaugagcaucaucagcaccuuccaccugagcauccccaacuucaaccaguacgaggccaugagcugcgacuucaacggcggcaagaucagcgugcaguacaaccugagccacagcuacgccggcgacgccgccgaccacugcggcaccguggccaacggcgugcugcagaccuucaugagaauggccuggggcggcagcuacaucgcccuggacagcggcugcggcagaugggacugcaucaugaccagcuaccaguaccugaucauccagaacaccaccugggaggaccacugccaguucagcagacccagccccaucggcuaccugggccugcugagccagagaaccagagacaucuacaucagcagaagacugcugggcaccuucaccuggacccugagcgacagcgagggcaaggacacccccggcggcuacugccugaccagauggaugcugaucgaggccgagcugaagugcuucggcaacaccgccguggccaagugcaacgagaagcacgacgaggaguucugcgacaugcugagacuguucgacuucaacaagcaggccauccagagacugaaggcccccgcccagaugagcauccagcugaucaacaaggccgugaacgcccugaucaacgaccagcuggugaugaagaaccaccugagagacaucaugugcauccccuacugcaacuacagcagauacugguaccugaaccacaccaccaccggcagaaccagccugcccaagugcuggcuggugagcaacggcagcuaccugaacgagacccacuucagcgacgacaucgagcagcaggccgacaacaugaucaccgagaugcugcagaaggaguacauggagagacagggcaagaccccccugggccugguggaccuguucguguucagcaccagcuucuaccugaucagcaucuuccugcaccuggugaagauccccacccacagacacaucgugggcaagagcugccccaagccccacagacugaaccacaugggcaucugcagcugcggccuguacaagcagcccggcgugcccgugaaguggaagagaugaggacuaguuauaagacugacuagcccgaugggccucccaacgggcccuccuccccuccuugcaccgagauuaaucaaaggcucuuuucagagccaccaaaaaaaaaaaaaaaaaaaaaaaaaaaaaaaaaaaaaaaaaaaaaaaaaaaaaaaaaaaaaaaaagaauu

SEQ ID NO: 29439 - RNA, 1658 nt, Artificial Sequence
  mRNA product Design i-3 (hSL-A64-N5) comprising derived and/or modified sequence from LASV(G733-SLE-2010;Clade IV)__AIT17154__GPCmut5 (opt4)
aggagaaagcuuaccaugggccagaucgugaccuucuuccaggaggugccccacgugaucgaggaggugaugaacaucgugcugaucgcccugagcauccuggccgugcugaagggccuguacaacuucgccaccugcggcaucgugggccuggugagcuuccugcugcugugcggcagaagcugcaccaccagccuguacaagggcguguacgagcugcagacccuggagcugaacauggagacccugaacaugaccaugccccugagcugcaccaagaacaacagccaccacuacaucauggugggcaacgagaccggccuggagcugacccugaccaacaccagcaucaucaaccacaaguucugcaaccugagcgacgcccacaagaagaaccuguacgaccacgcccugaugagcaucaucagcaccuuccaccugagcauccccaacuucaaccaguacgaggccaugagcugcgacuucaacggcggcaagaucagcgugcaguacaaccugagccacagcuacgccggcgacgccgccaaccacugcggcaccaucgccaacggcgugcugcagaccuucaugagaauggccuggggcggcagcuacaucgcccuggacagcggcugcgacagaugggacugcaucaugaccagcuaccaguaccugaucauccagaacaccaccugggaggaccacugccaguucagcagacccagccccaucggcuaccugggccugcugagccagagaaccagagacaucuacaucagcagaagacugcugggcaccuucaccuggacccugagcgacagcgagggcaaggacacccccggcggcuacugccugaccagauggaugcugaucgaggccgagcugaagugcuucggcaacaccgccguggccaagugcaacgagaagcacgacgaggaguucugcgacaugcugagacuguucgacuucaacaagcaggccauccagagacugaaggcccccgcccagaugagcauccagcugaucaacaaggccgugaacgcccugaucaacgaccagcugaucaugaagaaccaccugagagacaucaugugcauccccuacugcaacuacagcaaguacugguaccugaaccacaccaccaccggcaagaccagccugcccaagugcuggcuggugagcaacggcagcuaccugaacgagacccacuucagcgacgacaucgagcagcaggccgacaacaugaucaccgagaugcugcagaaggaguacauggagagacagggcaagaccccccugggccugguggaccuguucguguucagcaccagcuucuaccugaucagcaucuuccugcaccuggugaagauccccacccacagacacguggugggcaagagcugccccaagccccacagacugaaccacaugggcaucugcagcugcggccuguacggccagcccggcgugcccgugaaguggaagagaugaggacuaguuauaagacugacuagcccgaugggccucccaacgggcccuccuccccuccuugcaccgagauuaaucaaaggcucuuuucagagccaccaaaaaaaaaaaaaaaaaaaaaaaaaaaaaaaaaaaaaaaaaaaaaaaaaaaaaaaaaaaaaaaaagaauu

SEQ ID NO: 29440 - RNA, 1658 nt, Artificial Sequence
  mRNA product Design i-3 (hSL-A64-N5) comprising derived and/or modified sequence from MOPV/LASV reassortant(IGS-1;Clade IV)__AFY05576__GPCmut5 (opt4)
aggagaaagcuuaccaugggccagaucgugaccuucuuccaggaggugccccacgugaucgaggaggugaugaacaucgugcugaucgcccugagcgugcuggccgugcugaagggccuguacaacuucgccaccugcggccuggugggccuggugaccuuccugcugcugugcggcagaagcugcaccaccagccuguacaagggcguguacgagcugcagacccuggagcugaacauggagacccugaacaugaccaugccccugagcugcaccaagaacaacagccaccacuacaucauggugggcaacgagaccggccuggagcugacccugaccaacaccagcaucaucaaccacaaguucugcaaccugagcgacgcccacaagaagaaccuguacgaccacgcccugaugagcaucaucagcaccuuccaccugagcauccccaacuucaaccaguacgaggccaugagcugcgacuucaacggcggcaagaucagcgugcaguacaaccugagccacagcuacgccggcgacgccgccaaccacugcggcaccguggccaacggcgugcugcagaccuucaugagaauggccuggggcggcagcuacaucgcccuggacagcggcugcggcaacugggacugcaucaugaccagcuaccaguaccugaucauccagaacaccaccugggaggaccacugccaguucagcagacccagccccaucggcuaccugggccugcugagccagagaaccagagacaucuacaucagcagaagacugcugggcaccuucaccuggacccugagcgacagcgagggcgaggacacccccggcggcuacugccugaccagauggaugcugaucgaggccgagcugaagugcuucggcaacaccgccguggccaagugcaacgagaagcacgacgaggaguucugcgacaugcugagacuguucgacuucaacaagcaggccauccagagacugaaggcccccgcccagaugagcauccagcugaucaacaaggccgugaacgcccugaucaacgaccagcugaucaugaagaaccaccugagagacaucaugugcauccccuacugcaacuacagcaaguacugguaccugaaccacaccaccaccggcagaaccagccugcccaagugcuggcuggugagcaacggcagcuaccugaacgagacccacuucagcgacgacaucgagcagcaggccgacaacaugaucaccgagaugcugcagaaggaguacauggagagacagggcaagaccccccugggccugguggaccuguucguguucagcaccagcuucuaccugaucagcaucuuccugcaccuggugaagauccccacccacagacacaucgugggcaagagcugccccaagccccacagacugaaccacaugggcaucugcagcugcggccuguacaagcagcccggcgugcccgugaaguggaagagaugaggacuaguuauaagacugacuagcccgaugggccucccaacgggcccuccuccccuccuugcaccgagauuaaucaaaggcucuuuucagagccaccaaaaaaaaaaaaaaaaaaaaaaaaaaaaaaaaaaaaaaaaaaaaaaaaaaaaaaaaaaaaaaaaagaauu

SEQ ID NO: 29441 - RNA, 1658 nt, Artificial Sequence
  mRNA product Design i-3 (hSL-A64-N5) comprising derived and/or modified sequence from LASV(LM765-SLE-2012;Clade IV)__AIT17814__GPCmut5 (opt4)
aggagaaagcuuaccaugggccagaucgugaccuucuuccaggaggugccccacgugaucgaggaggugaugaacaucgugcugaucgcccugagcauccuggccgugcugaagggccuguacaacuucgccaccugcggccuggugggccuggugaccuuccugcugcugugcggcagaagcugcaccaccagccuguacaagggcguguacgagcugcagacccuggagcugaacauggagacccugaacaugaccaugccccugagcugcaccaagaacaacagccaccacuacaucauggugggcaacgagaccggccuggagcugacccugaccaacaccagcaucaucgaccacaaguucugcaaccugagcgacgcccacagaaagaaccuguacgaccacgcccugaugagcaucaucagcaccuuccaccugagcauccccaacuucaaccaguacgaggccaugagcugcgacuucaacggcggcaagaucagcgugcaguacaaccugagccacagcuacgccaaggacgccgccgaccacugcggcaccguggccaacggcgugcugcagaccuucaugagaauggccuggggcggcagcuacaucgcccuggacagcggcugcggcagaugggacugcaucaugaccagcuaccaguaccugaucauccagaacaccaccugggaggaccacugccaguucagcagacccagccccaucggcuaccugggccugcugagccagagaaccagagacaucuacaucagcagaagacugcugggcaccuucaccuggacccugagcgacagcgagggcaaggacacccccggcggcuacugccugaccagauggaugcugaucgaggccgagcugaagugcuucggcaacaccgccguggccaagugcaacgagaagcacgacgaggaguucugcgacaugcugagacuguucgacuucaacaagcaggccauccagagacugaaggcccccgcccagaugagcauccagcugaucaacaaggccgugaacgcccugaucaacgaccagcugaucaugaagaaccaccugagagacaucaugugcauccccuacugcaacuacagcaaguacugguaccugaaccacaccaccaccggcaagaccagccugcccaagugcuggcuggugagcaacggcagcuaccugaacgagacccacuucagcgacgacaucgagcagcaggccgacaacaugaucaccgagaugcugcagaaggaguacauggagagacagggcaagaccccccugggccugguggaccuguucguguucagcaccagcuucuaccugaucagcaucuuccugcaccuggugaagauccccacccacagacacaucgugggcaagcccugccccaagccccacagacugaaccacaugggcaucugcagcugcggccuguacaagcagcccggcgugcccgugaaguggaagagaugaggacuaguuauaagacugacuagcccgaugggccucccaacgggcccuccuccccuccuugcaccgagauuaaucaaaggcucuuuucagagccaccaaaaaaaaaaaaaaaaaaaaaaaaaaaaaaaaaaaaaaaaaaaaaaaaaaaaaaaaaaaaaaaaagaauu

SEQ ID NO: 29442 - RNA, 1658 nt, Artificial Sequence
  mRNA product Design i-3 (hSL-A64-N5) comprising derived and/or modified sequence from LASV(LM776-SLE-2012;Clade IV)__AIT17824__GPCmut5 (opt4)
aggagaaagcuuaccaugggccagaucgugaccuucuuccaggaggugccccacgugaucgaggaggugaugaacaucgugcugaucgcccugagcauccuggccgugcugaagggccuguacaacuucgccaccugcggccuggugggccuggugaccuuccugcugcugugcggcagaagcugcaccaccagcguguacaagggcguguacgagcugcagacccuggagcugaacauggagacccugaacaugaccaugccccugagcugcaccaagaacaacagccaccacuacaucauggugggcaacgagaccggccuggagcugacccugaccaacaccagcaucaucaaccacaaguucugcaaccugagcgacgcccacaagaagaaccuguacgaccacgcccugaugagcaucaucagcaccuuccaccugagcauccccaacuucaaccaguacgaggccaugagcugcgacuucaacggcggcaagaucagcgugcaguacaaccugagccacagcuacgccggcgacgccgccaaccacugcggcaccguggccaacggcgugcugcagaccuucaugagaauggccuggggcggcagcuacaucgcccuggacagcggcugcggcaagugggacugcaucaugaccagcuaccaguaccugaucauccagaacaccaccugggaggaccacugccaguucagcagacccagccccaucggcuaccugggccugcugagccagagaaccagagacaucuacaucagcagaagacugcugggcaccuucaccuggacccugagcgacagcgagggcaaggacacccccggcggcuacugccugaccagauggaugcugaucgaggccgagcugaagugcuucggcaacaccgccguggccaagugcaacgagaagcacgacgaggaguucugcgacaugcugagacuguucgacuucaacaagcaggccauccagagacugaaggcccccgcccagaugagcauccagcugaucaacaaggccgugaacgcccugaucaacgaccagcugaucaugaagaaccaccugagagacaucaugugcauccccuacugcaacuacagcaaguacugguaccugaaccacaccaccaccggcaagaccagccugcccaagugcuggcuggugagcaacggcagcuaccugaacgagacccacuucagcgacgacaucgagcagcaggccgacaacaugaucaccgagaugcugcagaaggaguacauggagagacagggcaagaccccccugggccugguggaccuguucguguucagcaccagcuucuaccugaucagcaucuuccugcaccuggugaagauccccacccacagacacaucgugggcaagagcugccccaagccccacagacugaaccacaugggcaucugcagcugcggccuguacaagcagcccggcgugcccgugagauggaagagaugaggacuaguuauaagacugacuagcccgaugggccucccaacgggcccuccuccccuccuugcaccgagauuaaucaaaggcucuuuucagagccaccaaaaaaaaaaaaaaaaaaaaaaaaaaaaaaaaaaaaaaaaaaaaaaaaaaaaaaaaaaaaaaaaagaauu

SEQ ID NO: 29443 - RNA, 1658 nt, Artificial Sequence
  mRNA product Design i-3 (hSL-A64-N5) comprising derived and/or modified sequence from LASV(Mad39;Clade IV)__ANH09722__GPCmut5 (opt4)
aggagaaagcuuaccaugggccagaucgugaccuucuuccaggaggugccccacgugaucgaggaggugaugaacaucgugcugaucgcccugagcauccuggccgugcugaagggccuguacaacguggccaccugcggccugaucggccuggugaccuuccugcugcugugcggcagaagcugcaccaccacccuguacaagggcguguacgagcugcaggcccuggagcugaacauggagacccugaacaugaccaugccccugagcugcaccaagaacaacagccaccacuacaucagagugggcaacgagaccggccuggagcugacccugaccaacaccagccugaucaaccacaaguucugcaaccugagcgacgcccacaagaagaaccuguacgaccacgcccugaugagcaucaucagcaccuuccaccugagcauccccaacuucaaccaguacgaggccaugagcugcgacuucaacgacggcaagaucagcgugcaguacaaccugagccacaccuacgccggcgacaccgccaaccacugcggcaccguggccaacggcgugcugcagaccuucaugagaauggccuggggcggcagcuacaucgcccuggacagcggcugcggcggcugggacugcaucaugaccagcuaccaguaccugaucauccagaacaccaccugggaggaccacugccaguucagcagacccagccccaucggcuaccugggccugcugagccagagaaccagagacaucuacaucagcagaagacugcugggcaccuucaccuggacccugagcgacagcgagggcaaggacacccccggcggcuacugccugaccagauggaugcugaucgaggccgagcugaagugcuucggcaacaccgccguggccaagugcaacgagaagcacgacgaggaguucugcgacaugcugagacuguucgacuucaacaagcaggccauccagagacugaaggcccccgcccagaugagcauccagcugaucaacaaggccgugaacgcccugaucaacgaccagcugaucaugaagaaccaccugagagacaucaugugcauccccuacugcaacuacagcaaguacugguaccugaaccacaccgugaccggcaagaccagccugcccaagugcuggcuggugagcaacggcagcuaccugaacgagacccacuucagcgacgacaucgagcagcaggccgacaacaugaucaccgagaugcugcagaaggaguacauggagagacagggcaagaccccccugggccugguggaccuguucguguucagcaccagcuucuaccugaucagcaucuuccugcaccuggugaagauccccacccacagacacguggugggcaagcccugccccaagccccacagacugaaccacaugggcaucugcagcugcggcuucuacaagcagcccggcgugcccgugagauggaagagaugaggacuaguuauaagacugacuagcccgaugggccucccaacgggcccuccuccccuccuugcaccgagauuaaucaaaggcucuuuucagagccaccaaaaaaaaaaaaaaaaaaaaaaaaaaaaaaaaaaaaaaaaaaaaaaaaaaaaaaaaaaaaaaaaagaauu

SEQ ID NO: 29444 - RNA, 1658 nt, Artificial Sequence
  mRNA product Design i-3 (hSL-A64-N5) comprising derived and/or modified sequence from LASV(Z0947-SLE-2011;Clade IV)__AIT17840__GPCmut5 (opt4)
aggagaaagcuuaccaugggccagaucgugaccuucuuccaggaggugccccacgugaucgaggaggugaugaacaucgugcugaucgcccugagcauccuggccgugcugaagggccuguacaacuucgccaccugcggccuggugggccuggugaccuuccugcugcugugcggcagaagcugcaccaucagccuguacaagggcguguacgagcugcagacccuggagcugaacauggagacccugaacaugaccaugccccugagcugcaccaagaacaacagccaccacuacaucauggugggcaacgagaccggccuggagcugacccugaccaacaccagcaucaucaaccacaaguucugcaaccugagcgacgcccacaagaagaaccuguacgaccacgcccugaugagcaucaucagcaccuuccaccugagcauccccaacuucaaccaguacgaggccaugagcugcgacuucaacggcggcaagaucagcgugcaguacaaccugagccacagcuacgccggcgacgccgccaaccacugcggcaccguggccaacggcgugcugcagaccuucaugagaauggccuggggcggcagcuacaucgcccuggacagcggcugcgacagaugggacugcaucaugaccagcuaccaguaccugaucauccagaacaccaccugggaggaccacugccaguucagcagacccagccccaucggcuaccugggccugcugagccagagaaccagagacaucuacaucagcagaagacugcugggcaccuucaccuggacccugagcgacagcgagggcaaggacacccccggcggcuacugccugaccagauggaugcugaucgaggccgagcugaagugcuucggcaacaccgccguggccaagugcaacgagaagcacgacgaggaguucugcgacaugcugagacuguucgacuucaacaagcaggccauccagagacugaaggcccccgcccagaugagcauccagcugaucaacaaggccgugaacgcccugaucaacgaccagcugaucaugaagaaccaccugagagacaucaugugcauccccuacugcaacuacagcaaguacugguaccugaaccacaccaccaccggcaagaccagccugcccaagugcuggcuggugagcaacggcagcuaccugaacgagacccacuucagcgacgacaucgagcagcaggccgacaacaugaucaccgagaugcugcagaaggaguacauggagagacagggcaagaccccccugggccugguggaccuguucguguucagcaccagcuucuaccugaucagcaucuuccugcaccuggugaagauccccacccacagacacaucgugggcaagcccugccccaagccccacagacugaaccacaugggcaucugcagcugcggccuguacaagcagcccggcgugcccgugaaguggaagagaugaggacuaguuauaagacugacuagcccgaugggccucccaacgggcccuccuccccuccuugcaccgagauuaaucaaaggcucuuuucagagccaccaaaaaaaaaaaaaaaaaaaaaaaaaaaaaaaaaaaaaaaaaaaaaaaaaaaaaaaaaaaaaaaaagaauu

SEQ ID NO: 29445 - RNA, 1658 nt, Artificial Sequence
  mRNA product Design i-3 (hSL-A64-N5) comprising derived and/or modified sequence from LASV(Josiah;Clade IV)__NP_694870__GPCmut5 (opt5)
aggagaaagcuuaccaugggccagaucgugaccuucuuucaagaggucccccacguuauugaagaggugaugaacaucgugcugauugcccucagcguccuggcugugcuuaaggggcuguacaauuucgccacaugcggacucguuggccuggugacguuucuucugcucugugggagauccugcaccacaucucuguauaaaggagucuacgaacugcagacccucgagcugaacauggaaacacuuaauaugaccaugccucugagcuguacaaagaacaauucccaucacuauaucauggugggcaacgagaccgggcucgagcugacgcuuaccaauacaucuauuaucaaccauaaauucugcaaucugagcgacgcgcacaagaaaaaccucuacgaucaugcucugauguccaucauuucuaccuuucaccugagcaucccgaauuucaaccaguaugaagccauguccugugacuuuaauggaggcaagauuagcguucaguacaaccucucucacuccuaugccggcgaugcugccaaucauugcgggacaguggcuaacggaguccugcaaaccuucaugcggauggccuggggcgggagcuacaucgcgcuugacucuggauguggcaacugggauugcauuaugacguccuaccaguaucugaucauucagaauacaaccugggaggaccacugucaguuuagccgccccucuccuaucggguaccucggacugcuuucccaaagaacacgggauaucuauauuagccgcagacugcucggcaccuucaccuggacacuguccgacucugaaggcaaggauacgcccgggggauacugccugacccgguggaugcucaucgaggccgagcugaaauguuuuggcaacacagcuguggccaagugcaaugaaaaacaugacgaggaguucugcgauaugcuucgccuguuugacuucaacaagcaggcuauucagagacucaaagccccugcgcagaugagcauccaacugauuaauaaggccgugaacgcucuuaucaaugaucagcugaucaugaagaaccaccuccgggacauuauguguauccccuauugcaauuacuccaaauauugguaccugaaccacaccacaaccgggcgcacgagccugccuaaguguuggcucgucucuaauggauccuaccugaacgaaacacauuucagcgacgauauugaacagcaagccgacaauaugaucaccgagaugcuucagaaagaguauauggaaagacagggcaagaccccgcuggggcucguugaucuguuuguguucucuaccagcuuuuaccugauuuccaucuuccuucaccucgugaaaauccccacacaucggcacauugucggaaagucuugcccuaaaccccaucgccugaaccacaugggcaucuguagcugcggccuguauaagcagccuggggugcccguuaaguggaaaagaugaggacuaguuauaagacugacuagcccgaugggccucccaacgggcccuccuccccuccuugcaccgagauuaaucaaaggcucuuuucagagccaccaaaaaaaaaaaaaaaaaaaaaaaaaaaaaaaaaaaaaaaaaaaaaaaaaaaaaaaaaaaaaaaaagaauu

SEQ ID NO: 29446 - RNA, 1655 nt, Artificial Sequence
  mRNA product Design i-3 (hSL-A64-N5) comprising derived and/or modified sequence from LASV(LP;Clade I)__AAF86701__GPCmut5 (opt5)
aggagaaagcuuaccaugggccagaucauuaccuucuuucaagaggugccccacgucaucgaagagguuaugaacauugugcugaucgcccucagccugcuugcuauucugaaggggcucuacaauaucgccacaugcggaaucauuggccugguggcguuccuuuuucugugugggaaauccugcucucucacgcugaagggaggcuaugaacugcagacccucgagcugaacauggaaacacuuaauaugaccaugccucugagcuguaccaaaaacuccucucaucacuacaucagagucgggaaugagacaggacucgagcugacacuuaccaacacgagcauuaucaaucauaaguucugcaaccuguccgacgcucacaaaaagaaucucuaugaucaugcccugaugucuauuaucagcaccuuucaccuguccauuccgaacuucaaucaguacgaagccaugagcugugacuuuaacggcggcaagaucucugugcaguauaaucucucccacagcuacgcuggggaugccgcugagcauugcggaacaguugccaacggcgugcugcaaaccuucaugcggauggcguggggagggcgcuauaucgcccuugacucuggcugugggaauugggauugcauuaugacauccuaccaguaccugaucauucagaacaccacgugggaagaccacugucaguuuagcagacccucuccuaucggauaucucggccugcuuucccaacggacacgcgauauuuacaucagcagacggcugcucggcaccuucacauggacccuguccgacucugaggggaacgagacccccggaggcuauugccugacacgcuggaugcucaucgaagcugagcugaaauguuuugggaauacggccgucgcuaagugcaacgaaaaacaugaugaggaguucugcgacaugcuuagacuguuugauuucaauaagcaggccauucggcgccucaaagcgccugcccagaugagcauccagcugauuaacaaggcugugaaugcccuuaucaacgaccaacugauuaugaagaaucaccucagagauaucauguguauccccuacugcaacuauuccaaauacugguaucugaaucacaccagcucuggacggacaucccugccuaaguguuggcucauuagcaacggcucuuaccugaaugaaacccaguucagcgacgacaucgagcagcaagcugauaacaugauuacagaaaugcuucagaaagaguacaucgaacgccaggggaagaccccgcugggacucguugacauuuuuaucuucuccacgucuuuuuaucugauuagcaucuuccugcaucuuaucaaaauucccacacacagacauaucgugggcaagccuugccccaaaccucaccggcucaaucauaugggcgucuguuccugcgggcuguacaagcaccccggagugccgaccaaguggaaacgcugaggacuaguuauaagacugacuagcccgaugggccucccaacgggcccuccuccccuccuugcaccgagauuaaucaaaggcucuuuucagagccaccaaaaaaaaaaaaaaaaaaaaaaaaaaaaaaaaaaaaaaaaaaaaaaaaaaaaaaaaaaaaaaaaagaauu

SEQ ID NO: 29447 - RNA, 1655 nt, Artificial Sequence
  mRNA product Design i-3 (hSL-A64-N5) comprising derived and/or modified sequence from LASV(803213;Clade II)__AAF86703__GPCmut5 (opt5)
aggagaaagcuuaccaugggccagaucauuaccuucuuucaagaggugccccacgucaucgaagagguuaugaacauugugcugaucgcccucagccugcuugcuauucugaaggggaucuacaauguggccacaugcggacucuucggccugaucuccuuucuucugcucugugggagaucuugcagcgucacguauaaaggaguguacgaacugcagacccuggagcucaacauggcgaaucugaacaugacaaugccucuuuccuguaccaagaauaacucucaucacuauauuaugguuggcaaugaaacagggcuggagcucacccugacaaacaccagcaucauuaaucauaaauucugcaaccuuuccgacgcucacaagaaaaaucuguacgaucaugcccucaugucuaucauuagcacguuucaccuguccaucccgaacuucaaucaguaugaggccaugagcugugacuuuaacggaggcaagauuucugugcaguacaaucugucccacagcuucgcugucgaugccgcuaaccauugcggcaccaucgccaacggggugcuccaaacauuuaugcggauggcguggggaggcucuuauaucgcccuggacuccggguguggaaauugggauugcauuaugaccagcuaccaguaccuuaucauucagaacacaaccugggaagaccacugucaguucucucgccccuccccuaucggcuaucuggggcuccugagccaaagaacgcgggauauuuacaucucccgcagacuucugggaacauuuaccuggacacucucugacagcgagggcaaugaagcucccggcggguauugccugacccgguggaugcugaucgaggccgagcucaaguguuucggaaacaccgcuguugccaaaugcaaugaaaagcaugaugaggaauuuugcgacaugcugcgccuuuucgauuucaacaaacaggcgauuaagagacugaaaacgccugcccagauguccauccagcucauuaauaaggcugugaacgcccugaucaaugaccaacuuauuaugaagaaccaucugcgggauaucauguguauccccuacugcaauuauagccgcuacugguaucucaaccacacagucaccggcaaaacaucucugccuagauguuggcugguguccaaugggagcuaccucaacgagacccacuuuucugacgacauugaacagcaggcugauaauaugaucacagagaugcugcaaaaggaguacauggaccggcagggaaaaaccccgcuuggccugguggaucucuucgucuuuagcacguccuucuaucugauuucuaucuuucugcaccuuguuaagauucccacacaucgccacaucguggggaaaccuugccccaagccucauagacucaaccacaugggaauuuguagcugcggccuguacaaacaccccggcgugccggucaaguggaagcggugaggacuaguuauaagacugacuagcccgaugggccucccaacgggcccuccuccccuccuugcaccgagauuaaucaaaggcucuuuucagagccaccaaaaaaaaaaaaaaaaaaaaaaaaaaaaaaaaaaaaaaaaaaaaaaaaaaaaaaaaaaaaaaaaagaauu

SEQ ID NO: 29448 - RNA, 1655 nt, Artificial Sequence
  mRNA product Design i-3 (hSL-A64-N5) comprising derived and/or modified sequence from LASV(GA391;Clade III)__CAA36645__GPCmut5 (opt5)
aggagaaagcuuaccaugggccagaucgugaccuucuuucaagaggucccccacguuauugaagaggugaugaacaucgugcugauugcccucagcauccuggcuauucuuaaggggcuguacaaugucgccacaugcggacucaucggccuggugacguuccuucugcucuccgggagaucuuguagccugaucuauaaaggaaccuacgaacugcagacacucgagcugaacauggaaacccuuaauaugacaaugccucuguccugcaccaagaacaauucucaucacuauauucggguuggcaacgagacagggcucgagcugacccuuacgaauaccagcauccugaaccauaaauuuuguaaucucuccgacgcgcacaagcgcaaccuguacgaucauucucugaugagcauuaucuccacauuccaccucagcauuccgaauuuuaaccaguaugaagcuaugucuugcgacuucaauggaggcaaaaucaccgugcaguacaaccugucccacagcuuugccgucgaugccgcuggccauugugggacacuugccaauggagugcugcaaaccuucaugagaauggcuuggggcgggucuuauauugcccucgacuccggaugcggcaacugggauuguaucaugacgagcuaccaguaccugaucauucagaacacaaccugggacgaucacugccaguuuucucggcccuccccuaucggguaucuuggacugcucagccaacgcacaagagacauuuacaucucccggcgccugcugggcaccuucaccuggacacucucugauagcgagggcaaugaaacgcccgggggauauugucugaccagauggaugcuuauugaggcggagcugaagugcuuuggcaacacagccguugcuaaguguaaugaaaaacaugacgaggaguucugcgauaugcuccggcuguuugacuucaacaagcaggccauccgcagacuuaaaaccccugcucagauguccauccagcugauuaauaaggccgugaacgcgcucaucaaugaucaacugauuaugaaaaaccaucugcgggacaucaugugcauucccuacuguaauuauagccgcuacugguaucucaaccacacaucuaccgggaagacgucccugccuagaugcuggcuuaucagcaauggaucuuaccugaacgaaacaaaguucagcgacgauaucgaacagcaggccgacaauaugauuaccgagaugcuccaaaaagaguacaucgaucggcagggcaagaccccgcuggggcuggucgaccuuuuuguguucuccacaucuuuuuaucucauuagcaucuuccugcaccuggugaaaauucccacccaccgccauaucgucggaaagccuugucccaaaccucacagacucaaccauaugggcauuugcuccuguggccuguacaagcagcccgggguuccggugcgguggaaaagaugaggacuaguuauaagacugacuagcccgaugggccucccaacgggcccuccuccccuccuugcaccgagauuaaucaaaggcucuuuucagagccaccaaaaaaaaaaaaaaaaaaaaaaaaaaaaaaaaaaaaaaaaaaaaaaaaaaaaaaaaaaaaaaaaagaauu

SEQ ID NO: 29449 - RNA, 1658 nt, Artificial Sequence
  mRNA product Design i-3 (hSL-A64-N5) comprising derived and/or modified sequence from LASV(AV;Clade V)__CCA30314__GPCmut5 (opt5)
aggagaaagcuuaccaugggccagaucgugaccuucuuucaagaggucccccacguuauugaagaggugaugaacaucgugcugauugcccucagcauccuggcuguccuuaaggggcuguacaauauugccacaugcggacucaucggccugaucacguuccuucugcucugugggagauccugcucuagcaaccuguauaaaggaguguacgaacugcagucccucgaccugaauauggagacccuuaacaugacaaugccucugucuuguaccaagaauaacagccaucacuauauucggguuggcaaugauacagggcucgaacugacccuuacaaacaccuccauccugaaucauaaauuuugcaaccucucugacgcgcacaagaaagaucuguacgaccaugcucugaugagcauuaucuccacguuccaccucagcauuccgaauuuuaaccaguaugaggccaugucuugugauuucaauggaggcaagaucuccgugcaguacaaccugagccacucuuaugccauugacgcugccaaucauugcggcaccgucgcuaacgggauccuucaaacauuuaugcgcauggccuggggaggcuccuacaucgcgcuggauagcggguguggaaacugggacugcauuaugaccucuuaccaguaucucaucauucagaauacaaccugggagaaccacugucaguucuccagacccagcccuaucggcuaccuggggcuucugucccaacggacgcgcgauauuuauaucucuagacggcuccugggaacauuuaccuggacacugagcgacuccgaaggcaaugccacccccggcggguacugccucacccgcuggaugcugaucgaggcugaacuuaaguguuucggaaacacagccguggcuaaaugcaaugagaagcaugaugaggaauuuugcgacaugcugagacucuucgauuuuaacaaacaggccauuagccggcugaagucuccugcgcagauguccauccagcuuauuaauaaagccguuaacgcucugaucaaugaccaacucauuaugaagaaccaucugcgcgacaucauguguauccccuauugcaauuacagcaaguauugguaccugaaccacacgauuaccggcaaaacaucucucccuaaguguuggcuggugagcaauggguccuaccuuaacgagacccacuucucugaugacaucgaacagcaggccgauaauaugauuacagagaugcugcaaaaagaauauauggagagacagggaaagaccccgcucggccuggucgaccuguucguguuuagcacguccuucuaccuuaucagcauuuuucuccggcuggugaaaauccccacacaccgccauauugucgggaagccuugccccaaaccucacagacugaaccauaugggaaucuguucuugcggccucuauaagcagcccggcguuccggugcgguggaagcgcugaggacuaguuauaagacugacuagcccgaugggccucccaacgggcccuccuccccuccuugcaccgagauuaaucaaaggcucuuuucagagccaccaaaaaaaaaaaaaaaaaaaaaaaaaaaaaaaaaaaaaaaaaaaaaaaaaaaaaaaaaaaaaaaaagaauu

SEQ ID NO: 29450 - RNA, 1655 nt, Artificial Sequence
  mRNA product Design i-3 (hSL-A64-N5) comprising derived and/or modified sequence from LASV(Togo/2016/7082;Clade VI)__AMR44577__GPCmut5 (opt5)
aggagaaagcuuaccaugggccagaucauuaccuucuuucaagaggugccccacgucaucgaagagguuaugaacauugugcugaucgcccucagccugcuugcuauucugaaggggguguacaaugucgccacaugcggaaucaucggccucgugacguuccuguuucuuugugggagauccugcucucugauuuauaaaggaagcuacgaacuccagacccuggagcugaacauggaaacacucaauaugaccaugccucuguccuguacaaagaacucuagccaucacuauauccggguuggcaaugagaccgggcuugagcugacacucaccaacacguccauuaucaaucauaaauucugcaaccugucugacgcgcacaagcgcaaucuuuacgaucaugcucugaugagcauucucuccaccuuucaccugagcaucccgaacuucaaucaguaugaagccaugucuugugacuuuaacggaggcaaaauuuccgugcaguacaaucugagccacgccuaugcugucgaugccgcugagcauugcggcacaguggccaacgggguucuccaaaccuucaugagaauggcguggggaggcucuuacaucgcccuggacuccggguguggaaauugggauugcaucaugacaagcuaccaguaucuuauuauccagaacaccacgugggaagaccacugucaguuuucucggcccuccccuauuggcuaccuggggcuccugagccaacgcacaagagauaucuauauuucccggcgccuucugggaaccuucacauggacccucucugacagcgagggcaacgagacccccggcggguacugccugacaagauggaugcugaucgaagcugagcucaaguguuuuggaaauacggccguggcuaagugcaacgaaaaacaugaugaggaguucugcgacaugcugcggcuuuuugauuucaauaagcaggccauccagcgccugaaauccccugcgcagaugagcauucaacucaucaacaaggccgucaaugcucugauuaacgaccagcuuaucaugaaaaaucaccugagagauaugauguguauucccuauugcaacuacucuaaguauugguaccucaaucacaccuccagcggccggacaucucugccuaaguguuggcuggugagcaacggguccuaccucaaugaaacccauuucucugacgacaucgagcagcaagccgauaacaugaucacagaaaugcugcagaaagaguauauugaccgccagggaaagaccccgcuuggccugguggaucucuuugucuucagcacguccuuuuaccugaucagcauuuuccugcaccuuaucaaaauucccacacauagacacaucguugggaagccuugccccaaaccucaucggcucaaucacaugggaauuuguucuugcggccuguauaagcagcccggcgugccgacccgcuggaaaagaugaggacuaguuauaagacugacuagcccgaugggccucccaacgggcccuccuccccuccuugcaccgagauuaaucaaaggcucuuuucagagccaccaaaaaaaaaaaaaaaaaaaaaaaaaaaaaaaaaaaaaaaaaaaaaaaaaaaaaaaaaaaaaaaaagaauu

SEQ ID NO: 29451 - RNA, 1655 nt, Artificial Sequence
  mRNA product Design i-3 (hSL-A64-N5) comprising derived and/or modified sequence from LASV(KAK-428;Clade n.d. (VII))__ANH09740__GPCmut5 (opt5)
aggagaaagcuuaccaugggccagaucgugaccuucuuucaagaggucccccacguuauugaagaggugaugaacaucgugcugauugcccucagccugcuugcuauccugaaggggcucuacaauuucgccacaugcggagucauuggccugaucacguuucuucugcucugugggagauccugcucugcgaccuauaaaggacaguacgaacugcagacacuggagcucaacauggaaagccugaauaugaccaugccucuuuccuguacaaagaacaauucucaucacuauauccgggcuggcaacaauaccgggcuggagcucacacugaccaacacgagcauuaucucccauaaauucugcaaucuuucugacgcccacaagaaaaaccuguacgaucauacccucaugagcauuaucacaaccuuucaccuguccauuccgaauuucaaccaguaugaggccaugagcugugacuuuaauggaggcaagaucucuauucaauacaaccugucccacagcuaugcuggcgaugccgcucagcauugcgggacaguggccaauggaguucuccagaccuucaugcgcauggcguggggcgggucuuaccuggcccuugacuccggauguagaggcugggauugcaucaucagcucuuaccaguaucugauuauccaaaacacgacaugggacgaucacugucaguuuucccggcccagcccuauuggguaccucggauucgugucccagaagacccgcgacaucuauauuucuagacggcugcuuggcacauuuaccuggacccugagcgauuccgaaggccaugacaugcccgggggauacugccucacacgcuggaugcugaucgaggcugaucugaaauguuucggcaacacggccgucgcuaagugcaaugaaaaacacgacgaggaguuuugcgauauguggagacucuucgacuucaacaagcaggccauccaacggcugaaagcgccugcccagaugaauauucagcuuaucaacaaggcugugaaugcccugauuaacgaccaacucaugaugaagaaucaucugcgcgauaucauguguauucccuauugcaacuacagcaaauuuugguaucuuaauaacaccacaaccgggagaacaucucugccucgguguuggcucaucuccaauggaagcuaccugaacgaaacccacuucucugacgauaucgagcagcaggcugacaauaugauuacggaaaugcugcagaaggaguacauggaucgccaaggcaaaacaccgcucgggcugguugaccuuuuuguguucagcaccuccuuuuaucugaucaccauuuuccuccaccuggucaagauccccacacauagacacauugugggaaaaccuugccccaagccucaucggcugaaccacaugggcaucuguucuugcggccuuuacaaacagcccggggugccgguccgcuggaagagaugaggacuaguuauaagacugacuagcccgaugggccucccaacgggcccuccuccccuccuugcaccgagauuaaucaaaggcucuuuucagagccaccaaaaaaaaaaaaaaaaaaaaaaaaaaaaaaaaaaaaaaaaaaaaaaaaaaaaaaaaaaaaaaaaagaauu

SEQ ID NO: 29452 - RNA, 1655 nt, Artificial Sequence; identical to SEQ ID NO: 29446
  mRNA product Design i-3 (hSL-A64-N5) comprising derived and/or modified sequence from LASV(Pinneo-NIG-1969;Clade I)__AIT17836__GPCmut5 (opt5)

SEQ ID NO: 29453 - RNA, 1655 nt, Artificial Sequence
  mRNA product Design i-3 (hSL-A64-N5) comprising derived and/or modified sequence from LASV(ISTH0009-NIG-2011;Clade II)__AIT17404__GPCmut5 (opt5)
aggagaaagcuuaccaugggccagaucauuaccuucuuucaagaggugccccacgucaucgaagagguuaugaacauugugcugaucgcccucagccugcuugcuauucugaaggggaucuacaauguggccacaugcggacucuucggccuggucuccuuucuucugcucugugggagaucuugcagcacgaccuauaaaggaguguacgaacugcagacacuggagcucgacauggcgucccugaacaugaccaugccucuuucuuguacaaagaauaacagccaucacuauaucaugguuggcaaugaaaccgggcuggagcucacacugaccaacacguccauuaucaaucauaaauucugcaaccuuucugaugcucacaagaaaaaucuguacgaccaugcccucaugagcauuaucuccaccuuucaccugagcauuccgaacuucaaucaguaugaggccaugucuugugauuuuaacggaggcaagaucuccgugcaguacaaucugagccacgcuuaugccgucgacgcugccaaccauugcggcacaauugcgaauggggugcuccaaaccuucaugcggauggccuggggaggcucuuacaucgcucuggauuccggguguggaagcugggacugcaucaugacaucuuaccaguaucuuauuauccagaacaccacgugggaagaucacugucaguuuucccgccccagcccuauuggcuaccuggggcuccugucccaaagaacacgggacaucuauauuucucgcagacuucugggaaccuucacauggacccucagcgauuccgagggcaacgaaacccccggcggguacugccugacacgguggaugcugaucgaggccgagcucaaguguuuuggaaauacggcuguugccaaaugcaacgaaaagcaugacgaggaguucugcgauaugcugcgccuuuuugacuucaauaaacaggcgaucagacggcugaagaccccugcccagaugagcauucagcucaucaacaaagcugugaaugcccugauuaacgaucaacuuaucaugaagaaucaucugcgcgacauuauguguauccccuauugcaacuacucuaaguauugguaccucaaucacacagucaccggcaaaacaucccugccuagauguuggcuggugagcaacgggucuuaccucaaugaaacccacuucagcgacgauaucgaacagcaggcugacaacaugauuacggagcugcuucaaaaggaguauauggaucggcagggaaaaacaccgcugggccucguggaccuguuugucuucuccaccucuuuuuaccugaucagcauuuuccuucaccucaucaagauucccacccaucgccacaucacagggaaaccuugccccaagccucauagacugaaucacaugggaauuuguuccugcggccuguauaaacaccccggcguuccggugaaguggaagcggugaggacuaguuauaagacugacuagcccgaugggccucccaacgggcccuccuccccuccuugcaccgagauuaaucaaaggcucuuuucagagccaccaaaaaaaaaaaaaaaaaaaaaaaaaaaaaaaaaaaaaaaaaaaaaaaaaaaaaaaaaaaaaaaaagaauu

SEQ ID NO: 29454 - RNA, 1655 nt, Artificial Sequence
  mRNA product Design i-3 (hSL-A64-N5) comprising derived and/or modified sequence from LASV(ISTH2010-NIG-2012;Clade II)__AIT17482__GPCmut5 (opt5)
aggagaaagcuuaccaugggccagaucauuaccuucuuucaagaggugccccacgucaucgaagagguuaugaacauugugcugaucgcccucagccugcuugcuauucugaaggggaucuacaauguggccacaugcggacucuucggccuggucuccuuucuucugcucugugggagaucuugcagcacgaccuauaaaggaguguacgaacugcagacacuggagcucgacauggcgucccugaacaugaccaugccucuuucuuguacaaagaauaacagccaucacuauaucaugguuggcaaugaaaccgggcuggagcucacacugaccaacacguccauuaucaaucauaaauucugcaaccuuucugaugcucacaagaaaaaucuguacgaccaugcccucaugagcauuaucuccaccuuucaccugagcauuccgaacuucaaucaguaugaggccaugucuugugauuuuaacggaggcaagaucuccgugcaguacaaucugagccacgcuuaugccgucgacgcugccaaccauugcggcacaauugcgaauggggugcuccaaaccuucaugcggauggccuggggaggcucuuacaucgcucuggauuccggguguggaagcugggacugcaucaugacaucuuaccaguaucuuauuauccagaacauuaccugggaagaucacugucaguuuucccgccccagcccuaucggcuaccuggggcuccugucccaaagaacgcgggacauuuauaucucucgcagacuucugggaacauucaccuggacacucagcgauuccgagggcaacgaaacccccggcggguacugccugacccgguggaugcugaucgaggccgagcucaaguguuuuggaaauacagcuguugccaaaugcaacgaaaagcaugacgaggaguucugcgauaugcugcgccuuuuugacuucaauaaacaggcgauuagacggcugaagacgccugcccagaugagcauccagcucauuaacaaagcugugaaugcccugaucaacgaucaacuuauuaugaagaaucaucugcgcgacaucauguguauccccuauugcaacuacucuaaguauugguaccucaaucacaccgucacaggcaaaaccucccugccuagauguuggcuggugagcaacgggucuuaccucaaugaaacacacuucagcgacgauauugaacagcaggcugacaacaugaucaccgagcugcuucaaaaggaguauauugaucggcagggaaaaacgccgcugggccucguggaccuguuugucuucuccacaucuuuuuaccugaucagcauuuuccuucaccucguuaagauccccacccaucgccacgugguggggaaaccuugccccaagccucauagacugaaucacaugggaauuuguuccugcggccuguauaaacaccccggcgucccggugaaguggaagcggugaggacuaguuauaagacugacuagcccgaugggccucccaacgggcccuccuccccuccuugcaccgagauuaaucaaaggcucuuuucagagccaccaaaaaaaaaaaaaaaaaaaaaaaaaaaaaaaaaaaaaaaaaaaaaaaaaaaaaaaaaaaaaaaaagaauu

SEQ ID NO: 29455 - RNA, 1655 nt, Artificial Sequence
  mRNA product Design i-3 (hSL-A64-N5) comprising derived and/or modified sequence from LASV(Lassa virus/H.sapiens-wt/NGA/2015/ISTH_0543;Clade II)__AVO03639__GPCmut5 (opt5)
aggagaaagcuuaccaugggccagaucauuaccuucuuucaagaggugccccacgucaucgaagagguuaugaacauugugcugaucgcccucagccugcuugcuauucugaaggggaucuacaauguggccacaugcggacucuucggccuggucuccuuucuucugcucugugggagaucuugcagcacgaccuauaaaggaguguacgaacugcagacacuggagcucgacauggcgaaccugaauaugaccaugccucuuuccuguacaaagaacaauucucaucacuauaucaugguuggcaacgaaaccgggcuggagcucacacugaccaauacgagcauuaucaaccauaaauucugcaaucuuuccgaugcucacaagaaaaaccuguacgaccaugcccucaugucuauuaucagcaccuuucaccuguccauuccgaauuucaaccaguaugaggccaugagcugugauuuuaauggaggcaagaucucugugcaguacaaccugucccacacauaugcugucgacgccgcuaaucauugcggcaccauugccaacggggugcuccaaacauucaugcggauggcguggggaggcagcuacaucgcccuggauucuggguguggauccugggacugcaucaugaccagcuaccaguaucuuguuauucagaacacgacaugggaagaucacugucaguuuucucgccccuccccuaucggcuaccuggggcuccugagccaaagaacccgggacauuuauaucucccgcagacuucugggaacauucaccuggacccucucugauagcgagggcaaugaaacacccggcggguacugccugacgcgguggaugcugauugaggcugagcucaaguguuuuggaaacaccgccguggcuaaaugcaaugaaaagcaugacgaggaguucugcgauaugcugcgccuuuuugacuucaacaaacaggccaucagacggcugaagaccccugcgcagauguccauccagcucauuaauaaagccgucaacgcucugaucaaugaucaacuuauuaugaagaaccaucugcgcgacaucauguguauucccuauugcaauuacagcaaguauugguaccucaaccacacagugacaggcaaaaccucucugccuagauguuggcugguguccaaugggagcuaccucaacgaaacgcacuucucugacgauaucgaacagcaggccgacaauaugaucacagagcugcuucaaaaggaguauauugaucggcagggaaaaaccccgcugggccucgucgaccuguuuguuuucagcaccuccuuuuaccugaucucuauuuuccuucaccucgugaagauccccacacaucgccacauuaccgggaaaccuugccccaagccucauagacugaaccacaugggaaucuguagcugcggccuguauaaacaccccggcgugccggucaaguggaagcggugaggacuaguuauaagacugacuagcccgaugggccucccaacgggcccuccuccccuccuugcaccgagauuaaucaaaggcucuuuucagagccaccaaaaaaaaaaaaaaaaaaaaaaaaaaaaaaaaaaaaaaaaaaaaaaaaaaaaaaaaaaaaaaaaagaauu

SEQ ID NO: 29456 - RNA, 1655 nt, Artificial Sequence
  mRNA product Design i-3 (hSL-A64-N5) comprising derived and/or modified sequence from LASV(Lassa virus/H.sapiens-wt/NGA/2016/ISTH_0009;Clade II)__AVO03571__GPCmut5 (opt5)
aggagaaagcuuaccaugggccagaucauuaccuucuuucaagaggugccccacgucaucgaagagguuaugaacauugugcugaucgcccucagccugcuugcuauucugaaggggaucuacaauguggccacaugcggacuccugggccuugucuccuuccugcuccugugugggagaucuugcagcacgaccuauaaaggaguguacgaacugcagacacucgagcuggacauggcgucccuuaacaugaccaugccucugucuuguacaaagaauaacagccaucacuauaucaugguuggcaaugaaaccgggcucgagcugacacuuaccaacacguccauuaucaaucauaaauuuugcaaccugucugaugcucacaagaaaaaucucuacgaccaugcccugaugagcauuaucuccaccuuccaccugagcauuccgaacuuuaaucaguaugaggccaugucuugugauuucaacggaggccggaucuccgugcaguacaaucucagccacucuuaugcugucgacgccgcuaaccauugcggcacaauugccaauggggugcugcaaaccuuuaugcgcauggcguggggaggcuccuacaucgcccuugauagcggguguggaucuugggacugcaucaugacauccuaccaguaucugauuauccagaacaccacgugggaagaucacugucaguucagcagacccuccccuauuggcuaccucgggcugcuuucucaacggacacgcgacaucuauauuagcagacggcugcucggaaccuuuacauggacccuguccgauagcgagggcaacgaaacccccggcggguacugccugacacgcuggaugcucaucgaggcugagcugaaguguuucggaaauacggccguugcuaagugcaacgaaaaacaugacgaggaauuuugcgauaugcuuagacuguucgacuuuaauaagcaggccauccggcgccucaaaaccccugcgcagaugucuauucagcugaucaacaaggccgugaaugcucuuauuaacgaucaacugaucaugaaaaaucaccucagagacauuauguguauccccuauugcaacuacuccaaguauugguaccugaaucacacagucaccggcaagacaagccugccucgguguuggcucgugucuaacgggagcuaccugaaugagacccauuucuccgacgauaucgaacagcaggccgacaacaugauuacggagcuucugcaaaaagaguauaucgaucgccagggaaagacaccgcucggccugguggaccuguucgucuuuucuaccagcuucuaccuuauuuccaucuuucuccaccugguuaaaauucccacccauagacacaucacagggaagccuugccccaaaccucaucggcugaaucacaugggaauuuguagcugcggccucuauaaccaccccggcgugccggugaaguggaaacgcugaggacuaguuauaagacugacuagcccgaugggccucccaacgggcccuccuccccuccuugcaccgagauuaaucaaaggcucuuuucagagccaccaaaaaaaaaaaaaaaaaaaaaaaaaaaaaaaaaaaaaaaaaaaaaaaaaaaaaaaaaaaaaaaaagaauu

SEQ ID NO: 29457 - RNA, 1655 nt, Artificial Sequence
  mRNA product Design i-3 (hSL-A64-N5) comprising derived and/or modified sequence from LASV(Lassa virus/H.sapiens-wt/NGA/2016/ISTH_0017;Clade II)__AVO03567__GPCmut5 (opt5)
aggagaaagcuuaccaugggccagaucauuaccuucuuucaagaggugccccacgucaucgaagagguuaugaacauugugcugaucgcccucagccugcuugcuauucugaaggggaucuacaauguggccacaugcggacucuucggccuggucuccuuucuucugcucugugggagaucuugcagcacgaccuauaaaggaguguacgaacugcagacacuggagcucgacauggcgucccugaacaugaccaugccucuuucuuguacaaagaauaacagccaucacuauaucaugguuggcaaugaaaccgggcuggagcucacacugaccaacacguccauuaucaaucauaaauucugcaaccuuucugaugcucacaagaaaaaucuguacgaccaugcccucaugagcauuaucuccaccuuucaccugagcauuccgaacuucaaucaguaugaggccaugucuugugauuuuaacggaggcaagaucuccgugcaguacaaucugagccacacauaugcuauugacgccgcuaaccauugcggcaccaucgccaaugggguccuccaaacauucaugcggauggcguggggaggcucuuacaucgcccuggauuccggguguggaagcugggacugcauuaugaccucuuaccaguaucuuaucauucagaacacgacaugggaagaucacugucaguuuucccgccccagcccuaucggcuaccuggggcuccugucccaaagaacccgggacauuuauaucucucgcagacuucugggaacauucaccuggacccucagcgauuccgagggcaacgaaacacccggcggguacugccugacgcgguggaugcugaucgaggcugagcucaaguguuuuggaaauaccgccguggcuaaaugcaacgaaaagcaugacgaggaguucugcgauaugcugcgccuuuuugacuucaauaaacaggccauuagacggcugaagaccccugcgcagaugagcauccagcucauuaacaaagccguuaaugcucugaucaacgaucaacuuauuaugaagaaucaucugcgcgacaucauguguauccccuauugcaacuacucuaaguauugguaccucaaucacacagugacaggcaaaaccucccugccuagauguuggcuggucagcaacgggucuuaccucaaugaaacgcacuucagcgacgauauugaacagcaggccgacaacaugaucacagagcugcuucaaaaggaguauauggaucggcagggaaaaaccccgcugggccucguggaccuguuuguguucuccaccucuuuuuaccugauuagcaucuuccuucaccucguccgcauucccacacauagacacguuaucgggaagccuugccccaaaccucaucggcugaaucacaugggaauuuguuccugcggccuguauaagcaccccggcgugccggugaaauggaagcgcugaggacuaguuauaagacugacuagcccgaugggccucccaacgggcccuccuccccuccuugcaccgagauuaaucaaaggcucuuuucagagccaccaaaaaaaaaaaaaaaaaaaaaaaaaaaaaaaaaaaaaaaaaaaaaaaaaaaaaaaaaaaaaaaaagaauu

SEQ ID NO: 29458 - RNA, 1655 nt, Artificial Sequence
  mRNA product Design i-3 (hSL-A64-N5) comprising derived and/or modified sequence from LASV(Lassa virus/H.sapiens-wt/NGA/2018/ISTH_0959;Clade II)__AVV65099__GPCmut5 (opt5)
aggagaaagcuuaccaugggccagaucauuaccuucuuucaagaggugccccacgucaucgaagagguuaugaacauugugcugaucgcccucagccugcuugcuauucugaaggggaucuacaauguggucacaugcggacucuucggccugguguccuuucuucugcucugugggagaucuugcagcacgaccuauaaaggaguuuacgaacugcagacacuggagcucgacauggccucccugaacaugaccaugccucuuucuuguacaaagaauaacagccaucacuauaucauggugggcaaugaaaccgggcuggagcucacacugaccaacacguccauuaucaaucauaaauucugcaaccuuucugaugcgcacaagaaaaaucuguacgaccaugcucucaugagcauuaucuccaccuuucaccugagcauuccgaacuucaaucaguaugaggccaugucuugugauuuuaacggaggcaagaucuccguccaguacaaucugagccacgccuaugcuauugacgccgcuaaccauugcggcacaaucgccaauggggugcuccaaaccuucaugcggauggcguggggaggcucuuacaucgcccuggauuccggguguggaagcugggacugcauuaugacaucuuaccaguaucuuaucauucagaacaccacgugggaagaucacugucaguuuucccgccccagcccuaucggcuaccuggggcuccugucccaaagaacacgggacauuuauaucucucgcagacuucugggaaccuucacauggacccucagcgauuccgagggcaacgaaacccccggcggguacugccugacacgguggaugcugaucgaggcugagcucaaguguuuuggaaauacggccguugcuaaaugcaacgaaaagcaugacgaggaguucugcgauaugcugcgccuuuuugacuucaauaaacaggccauuagacggcugaagaccccugcgcagaugagcauccagcucauuaacaaagccgugaaugcucugaucaacgaucaacuuauuaugaagaaucaucugcgcgacaucauguguauccccuauugcaacuacucuaaguauugguaccucaaucacacagucaccggcaaaacaucccugccuagauguuggcuggugagcaacgggucuuaccucaaugaaacccacuucagcgacgauauugaacagcaggccgacaacaugaucacggagcugcuucaaaaggaguauauugaucggcagggaaaaacaccgcugggccucguggaccuguuugucuucuccaccucuuuuuaccugaucagcauuuuccuucaccucguuaagauccccacccaucgccacgugauugggaaaccuugccccaagccucauagacugaaucacaugggaaucuguuccugcggccuguauaaacaccccggcgugccggucaaguggaagcggugaggacuaguuauaagacugacuagcccgaugggccucccaacgggcccuccuccccuccuugcaccgagauuaaucaaaggcucuuuucagagccaccaaaaaaaaaaaaaaaaaaaaaaaaaaaaaaaaaaaaaaaaaaaaaaaaaaaaaaaaaaaaaaaaagaauu

SEQ ID NO: 29459 - RNA, 1655 nt, Artificial Sequence
  mRNA product Design i-3 (hSL-A64-N5) comprising derived and/or modified sequence from LASV(LASV003-NIG-2008;Clade II)__AIT17580__GPCmut5 (opt5)
aggagaaagcuuaccaugggccagaucauuaccuucuuucaagaggugccccacgucaucgaagagguuaugaacauugugcugaucgcccucagccugcuugcuauucugaaggggaucuacaauguggccacaugcggacucuucggccuggucuccuuucuucugcucugugggagaucuugcagcacgaccuauaaaggaguguacgaacugcagacacuggagcucgacauggcgucccugaacaugaccaugccucuuucuuguacaaagaauaacagccaucacuauaucaugguuggcaaugaaaccgggcuggagcucacacugaccaacacguccauuaucaaucauaaauucugcaaccuuucugaugcucacaagaaaaaucuguacgaccaugcccucaugagcauuaucuccaccuuucaccugagcauuccgaacuucaaucaguaugaggccaugucuugugauuuuaacggaggcaagaucuccgugcaguacaaucugagccacacauaugcugucgacgccgcuaaccauugcggcaccauugccaauggggugcuccaaacauucaugcggauggcguggggaggcucuuacaucgcccuggauuccggguguggaagcugggacugcaucaugaccucuuaccaguaucuuauuauccagaacacgacaugggaagaucacugucaguuuucccgccccagcccuauuggcuaccuggggcuccugucccaaagaacccgggacaucuauauuucucgcagacuucugggaacauucaccuggacccucagcgauuccgagagcaacgaaacacccggcggcuacugccugacgcgguggaugcugaucgaggcugagcucaaguguuuugggaauaccgccguugcuaaaugcaacgaaaagcaugacgaggaguucugcgauaugcugcgccuuuuugacuucaauaaacaggccaucagacggcugaaggcgccugcccagaugucuauucagcucaucaacaaagcugugaaugcccugauuaacgaucaacuuaucaugaagaaucaucugcgcgacauuauguguauccccuauugcaacuacuccaaguauugguaccucaaucacacagucaccggaagaacaagccugccucgguguuggcuggugucuaacggcagcuaccucaaugaaacccacuucuccgacgauaucgaacagcaggcugacaacaugauuacggagcugcuucaaaaagaguauauggaucgccaggggaagacaccgcugggacucguggaccuguuugucuucucuaccagcuuuuaccugaucuccauuuuccuucaccucguuaaaauccccacccauagacacgugauuggcaagccuugccccaaaccucaucggcugaaucacauggggaucuguagcugcggacuguauaagcaccccggcgugccggucaaauggaagcgcugaggacuaguuauaagacugacuagcccgaugggccucccaacgggcccuccuccccuccuugcaccgagauuaaucaaaggcucuuuucagagccaccaaaaaaaaaaaaaaaaaaaaaaaaaaaaaaaaaaaaaaaaaaaaaaaaaaaaaaaaaaaaaaaaagaauu

SEQ ID NO: 29460 - RNA, 1655 nt, Artificial Sequence
  mRNA product Design i-3 (hSL-A64-N5) comprising derived and/or modified sequence from LASV(LASV035-NIG-2009;Clade II)__AIT17588__GPCmut5 (opt5)
aggagaaagcuuaccaugggccagaucauuaccuucuuucaagaggugccccacgucaucgaagagguuaugaacauugugcugaucgcccucagccugcuugcuauucugaaggggaucuacaauguggccacaugcggacucuucggccuggucuccuuucuucugcucugugggagaucuugcagcacgaccuauaaaggaguguacgaacugcagacacuggagcucgacauggcgucccugaacaugaccaugccucuuucuuguacaaagaauaacagccaucacuauaucaugguuggcaaugaaaccgggcuggagcucacacugaccaacacguccauuaucaaucauaaauucugcaaccuuucugaugcucacaagaaaaaucuguacgaccaugcccucaugagcauuaucuccaccuuucaccugagcauuccgaacuucaaucaguaugaggccaugucuugugauuuuaacggaggcaagaucuccgugcaguacaaucugagccacgcuuaugccgucgacgcugccaaccauugcggcacaauugcgaauggggugcuccaaaccuucaugcggauggccuggggaggcucuuacaucgcucuggauuccggguguggaagcugggacugcaucaugacaucuuaccaguaucuuauuauccagaacaccacgugggaagaucacugucaguuuucccgccccagcccuauuggcuaccuggggcuccugucccaaagaacacgggacaucuauauuucucgcagacuucugggaaccuucacauggacccucagcgauuccgagggcaacgaaacccccggcggguacugccugacacgguggaugcugaucgaggccgagcucaaguguuuuggaaauacggcuguugccaaaugcaacgaaaagcaugacgaggaguucugcgauaugcugcgccuuuuugacuucaauaaacaggcgaucagacggcugaaggccccugcucagaugagcauucagcucaucaacaaagccgugaaugcucugauuaacgaucaacuuaucaugaagaaucaucugcgcgacauuauguguauccccuauugcaacuacucuaaguauugguaccucaaucacaccgucacaggcaaaaccucccugccuagauguuggcuggugagcaacgggucuuaccucaaugaaacacacuucagcgacgauaucgaacagcaggccgacaacaugauuaccgagcugcuucaaaaggaguauaucgaucggcagggaaaaacgccgcugggccucguggaccuguuugucuucuccacaucuuuuuaccugauuagcaucuuccuucaccucguuaagauucccacccaucgccacgugaucgggaaaccuugccccaagccucauagacugaaucacaugggaauuuguuccugcggccuguauaaacaccccggcgugccggucaaguggaagcggugaggacuaguuauaagacugacuagcccgaugggccucccaacgggcccuccuccccuccuugcaccgagauuaaucaaaggcucuuuucagagccaccaaaaaaaaaaaaaaaaaaaaaaaaaaaaaaaaaaaaaaaaaaaaaaaaaaaaaaaaaaaaaaaaagaauu

SEQ ID NO: 29461 - RNA, 1655 nt, Artificial Sequence
  mRNA product Design i-3 (hSL-A64-N5) comprising derived and/or modified sequence from LASV(LASV1000-NIG-2009;Clade II)__AIT17782__GPCmut5 (opt5)
aggagaaagcuuaccaugggccagaucauuaccuucuuucaagaggugccccacgucaucgaagagguuaugaacauugugcugaucgcccucagccugcuugcuauucugaaggggaucuacaauguggccacaugcggacucuucggccuggucuccuuucuucugcucugugggagaucuugcagcacgaccuauaaaggaguguacgaacugcagacacuggagcucgacauggcgucccugaacaugaccaugccucuuucuuguacaaagaauaacagccaucacuauaucaugguuggcaaugaaaccgggcuggagcucacacugaccaacacguccauuaucaaucauaaauucugcaaccuuucugaugcucacaagaaaaaucuguacgaccaugcccucaugagcauuaucuccaccuuucaccugagcauuccgaacuucaaucaguaugaggccaugucuugugauuuuaacggaggcaagaucuccgugcaguacaaucugagccacacauaugcugucgacgccgcuaaccauugcggcaccauugccaauggggugcuccaaacauucaugcggauggcguggggaggcucuuacaucgcccuggauuccggguguggaagcugggacugcaucaugaccucuuaccaguaucuuauuauccagaacacgacaugggaagaucacugucaguuuucccgccccagcccuauuggcuaccuggggcuccugucccaaagaacccgggacaucuauauuucucgcagacuucugggaacauucaccuggacccucagcgauuccgagggcaacgaaacacccggcggguacugccugacgcgguggaugcugaucgaggcugagcucaaguguuuuggaaauaccgccguugcuaaaugcaacgaaaagcaugacgaggaguucugcgauaugcugcgccuuuuugacuucaauaaacaggccaucaagagacugaaaaccccugcgcagaugagcauucagcucaucaacaaggccgugaaugcucugauuaacgaucaacuuaucaugaagaaucaucugcgggacauuauguguauccccuauugcaacuacucuaaauauugguaccucaaucacacagucacaggcaagaccucccugccucgcuguuggcuggugagcaacgggucuuaccucaaugaaacgcacuucagcgacgauaucgaacagcaggccgacaacaugauuacagagcugcuucaaaaagaguauaucgauagacagggaaagaccccgcugggccucguggaccuguuugucuucuccaccucuuuuuaccugauuagcaucuuccuucaccucguuaaaauucccacacaucggcacgugguggggaagccuugccccaaaccucaucgccugaaucacaugggaaucuguuccugcggccuguauaagcaccccggcgucccggugaaguggaaaagaugaggacuaguuauaagacugacuagcccgaugggccucccaacgggcccuccuccccuccuugcaccgagauuaaucaaaggcucuuuucagagccaccaaaaaaaaaaaaaaaaaaaaaaaaaaaaaaaaaaaaaaaaaaaaaaaaaaaaaaaaaaaaaaaaagaauu

SEQ ID NO: 29462 - RNA, 1655 nt, Artificial Sequence
  mRNA product Design i-3 (hSL-A64-N5) comprising derived and/or modified sequence from LASV(LASV221-NIG-2010;Clade II)__AIT17624__GPCmut5 (opt5)
aggagaaagcuuaccaugggccagaucauuaccuucuuucaagaggugccccacgucaucgaagagguuaugaacauugugcugaucgcccucagccugcuugcuauucugaaggggaucuacaauguggccacaugcggacucuucggccuggucuccuuucuucugcucugugggagaucuugcagcacgaccuauaaaggaguguacgaacugcagacacuggagcucgacauggcgucccugaacaugaccaugccucuuucuuguacaaagaauaacagccaucacuauaucaugguuggcaaugaaaccgggcuggagcucacacugaccaacacguccauuaucaaucauaaauucugcaaccuuucugaugcucacaagaaaaaucuguacgaccaugcccucaugagcauuaucuccaccuuucaccugagcauuccgaacuucaaucaguaugaggccaugucuugugauuuuaacggaggcaagaucuccgugcaguacaaucugagccacacauaugcuauugacgccgcuaaccauugcggcaccaucgccaaugggguccuccaaacauucaugcggauggcguggggaggcucuuacaucgcccuggauuccggguguggaagcugggacugcauuaugaccucuuaccaguaucuuaucauucagaacacgacaugggaagaucacugucaguuuucccgccccagcccuaucggcuaccuggggcuccugucccaaagaacccgggacauuuauaucucucgcagacuucugggaacauucaccuggacccucagcgauuccgagggcaacgaaacacccggcggguacugccugacgcgguggaugcugaucgaggcugagcucaaguguuuuggaaauaccgccguggcuaaaugcaacgaaaagcaugacgaggaguucugcgauaugcugcgccuuuuugacuucaauaaacaggccauuagacggcugaagaccccugcgcagaugagcauccagcucauuaacaaagccguuaaugcucugaucaacgaucaacuuauuaugaagaaucaucugcgcgacaucauguguauccccuauugcaacuacucuaaguauugguaccucaaucacacagugacaggcaaaaccucccugccuagauguuggcuggucagcaacgggucuuaccucaaugaaacgcacuucagcgacgauauugaacagcaggccgacaacaugaucacagagaugcugcaaaaggaguauauggaucggcagggaaaaaccccgcuuggccugguggaccucuuuguguucuccaccucuuuuuaccugauuagcaucuuccugcaccuugucaagauucccacacaucgccacguuaucgggaaaccuugccccaagccucauagacucaaucacaugggaauuuguuccugcggccuguauaaacaccccggcgugccggugaaguggaagcggugaggacuaguuauaagacugacuagcccgaugggccucccaacgggcccuccuccccuccuugcaccgagauuaaucaaaggcucuuuucagagccaccaaaaaaaaaaaaaaaaaaaaaaaaaaaaaaaaaaaaaaaaaaaaaaaaaaaaaaaaaaaaaaaaagaauu

SEQ ID NO: 29463 - RNA, 1655 nt, Artificial Sequence
  mRNA product Design i-3 (hSL-A64-N5) comprising derived and/or modified sequence from LASV(LASV237-NIG-2010;Clade II)__AIT17638__GPCmut5 (opt5)
aggagaaagcuuaccaugggccagaucauuaccuucuuucaagaggugccccacgucaucgaagagguuaugaacauugugcugaucgcccucagccugcuugcuauucugaaggggaucuacaauguggccacaugcggacucuucggccuggucuccuuucuucugcucugugggagaucuugcagcacgaccuauaaaggaguguacgaacugcagacacuggagcucgacauggcgucccugaacaugaccaugccucuuucuuguacaaagaauaacagccaucacuauaucaugguuggcaaugaaaccgggcuggagcucacacugaccaacacguccauuaucaaucauaaauucugcaaccuuucugaugcucacaagaaagaccuguacgaucaugcccucaugagcauuaucuccaccuuucaccugagcauuccgaauuucaaccaguaugaggccaugucuugugacuuuaauggaggcaagaucuccgugcaguacaaccugagccacacauaugcugucgaugccgcuaaucauugcggcaccauugccaacggggugcuccaaacauucaugcggauggcguggggaggcucuuacaucgcccuggacuccggguguggaagcugggauugcaucaugaccucuuaccaguaucuuauuauccagaauacgacaugggaagaccacugucaguuuucccgccccagcccuauuggcuaccuggggcuccugucccaaagaacccgggauaucuauauuucucgcagacuucugggaacauucaccuggacccucagcgacuccgagggcaacgaaacacccggcggguacugccugacgcgguggaugcugaucgaggcugagcucaaguguuuuggaaacaccgccguugcuaaaugcaaugaaaagcaugaugaggaguucugcgacaugcugcgccuuuuugauuucaacaaacaggccaucagacggcugaagaccccugcgcagaugagcauucagcucaucaauaaagccgugaacgcucugauuaaugaccaacuuaucaugaagaaccaucugcgcgacauuauguguauccccuauugcaauuacucuaaguauugguaccucaaccacacagucacaggcaaaaccucccugccuagauguuggcuggugagcaaugggucuuaccucaacgaaacgcacuucagcgaugacaucgaacagcaggccgauaauaugauuacagagcugcuucaaaaggaguauauggaccggcagggaaaaaccccgcugggccucguggaucuguuugucuucuccaccucuuuuuaccugaucagcauuuuccuucaccucaucaagauucccacacaucgccacaucaccgggaaaccuugccccaagccucauagacugaaccacaugggaauuuguuccugcggccuguauaaacaccccggcguuccggugaaguggaagcggugaggacuaguuauaagacugacuagcccgaugggccucccaacgggcccuccuccccuccuugcaccgagauuaaucaaaggcucuuuucagagccaccaaaaaaaaaaaaaaaaaaaaaaaaaaaaaaaaaaaaaaaaaaaaaaaaaaaaaaaaaaaaaaaaagaauu

SEQ ID NO: 29464 - RNA, 1655 nt, Artificial Sequence
  mRNA product Design i-3 (hSL-A64-N5) comprising derived and/or modified sequence from LASV(LASV253-NIG-2011;Clade II)__AIT17670__GPCmut5 (opt5)
aggagaaagcuuaccaugggccagaucauuaccuucuuucaagaggugccccacgucaucgaagagguuaugaacauugugcugaucgcccucagccugcuugcuauucugaaggggaucuacaauguggccacaugcggacucuucggccuggucuccuuucuucugcucugugggagaucuugcagcacgaccuauaaaggaguguacgaacugcagacacuggagcucgacauggcgucccugaacaugaccaugccucuuucuuguacaaagaauaacagccaucacuauaucaugguuggcaaugaaaccgggcuggagcucacacugaccaacacguccauuaucaaucauaaauucugcaaccuuucugaugcucacaagaaaaaucuguacgaccaugcccucaugagcauuaucuccaccuuucaccugagcauuccgaacuucaaucaguaugaggccaugucuugugauuuuaacggaggcaagaucuccgugcaguacaaucugagccacacauaugcugucgacgccgcuaaccauugcggcaccauugccaauggggugcuccaaacauucaugcggauggcguggggaggcucuuacaucgcccuggauuccggguguggaagcugggacugcaucaugaccucuuaccaguaucuuauuauccagaacacgacaugggaagaucacugucaguuuucccgccccagcccuauuggcuaccuggggcuccugucccaaagaacccgggacaucuauauuucucgcagacuucugggaacauucaccuggacccucagcgauuccgagggcaacgaaacacccggcggguacugccugacgcgguggaugcugaucgaggcugagcucaaguguuuuggaaauaccgccguugcuaaaugcaacgaaaagcaugacgaggaguucugcgauaugcugcgccuuuuugacuucaauaaacaggccaucagacggcugaaggcgccugcccagaugagcauucagcucaucaacaaagcugugaaugcccugauuaacgaucaacuuaucaugaagaaucaucugcgcgacauuauguguauccccuauugcaacuacucuaaguauugguaccucaaucacacagucaccggcagaacaucccugccucgguguuggcuggugagcaacgggucuuaccucaaugaaacccacuucagcgacgauaucgaacagcaggcugacaacaugauuacggagcugcuucaaaaagaguauaucgaucgccagggaaagacaccgcugggccucguggaccuguuugucuucuccaccucuuuuuaccugauuagcaucuuccuucaccucguuaaaauucccacccauagacacaucauugggaagccuugccccaaaccucaucggcugaaucacaugggaaucuguuccugcggccuguauaagcaccccggcgugccggugaaauggaagcgcugaggacuaguuauaagacugacuagcccgaugggccucccaacgggcccuccuccccuccuugcaccgagauuaaucaaaggcucuuuucagagccaccaaaaaaaaaaaaaaaaaaaaaaaaaaaaaaaaaaaaaaaaaaaaaaaaaaaaaaaaaaaaaaaaagaauu

SEQ ID NO: 29465 - RNA, 1655 nt, Artificial Sequence
  mRNA product Design i-3 (hSL-A64-N5) comprising derived and/or modified sequence from LASV(LASV254-NIG-2011;Clade II)__AIT17674__GPCmut5 (opt5)
aggagaaagcuuaccaugggccagaucauuaccuucuuucaagaggugccccacgucaucgaagagguuaugaacauugugcugaucgcccucagccugcuugcuauucugaaggggaucuacaauguggccacaugcggacucuucggccuggucuccuuucuucugcucugugggagaucuugcagcacgaccuauaaaggaguguacgaacugcagacacuggagcucgacaugaccaaccugaauaugacaaugccucuuuccuguaccaagaacaauucucaucacuauaucaugguuggcaacgaaacagggcuggagcucacccugacgaauaccagcauuaucaaccauaaauucugcaaucuuuccgaugcgcacaagaaaaaccuguacaaucaugcucucaugucuauuaucagcacauuucaccuguccauuccgaacuucaaucaguaugaggccaugagcugugacuuuaacggaggcaagaucucugugcaguacaaucugucccacagcuaugccgucgaugcugccaaccauugcggcaccauugcuaacggggugcuccaaacauucaugcggauggccuggggaggcucuuacaucgcgcuggacuccggguguggaaauugggauugcaucaugaccagcuaccaguaucuuauuauccagaacacgacaugggaagaccacugucaguuuucucgccccuccccuauuggcuaccuggggcuccugagccaaagaacccgggauaucuauauuucccgcagacuucugggaacauucaccuggacccucucugacagcgagggcaaugaaacacccggcggguacugccugacgcgguggaugcugaucgaggccgagcucaaguguuuuggaaacaccgcuguugccaaaugcaaugaaaagcaugaugaggaguucugcgacaugcugcgccuuuuugauuucaacaaacaggcuaucagacggcugaagaccccugcccaggcgaauauucagcucaucaacaaagccgugaaugcucugauuaacgaccaacuuaucaugaagaaucaucugcgcgauauuauguguauccccuauugcaacuacuccaaguauugguaccucaaucacacagucacaggcaaaaccagccugccuagauguuggcuggugucuaacggguccuaccucaaugaaacgcacuucagcgacgacaucgaacagcaggccgauaacaugauuacagagcugcuucaaaaggaguauauggaccggcagggaaaaaccccgcugggccucguggaucuguuugucuucucuaccagcuuuuaccugaucuccauuuuccuucaccucguuaagauccccacacaucgccacgugauugggaaaccuugccccaagccucauagacugaaccacaugggaaucuguucuugcggccuguauaaacaccccggcgugccggucaaguggaagcggugaggacuaguuauaagacugacuagcccgaugggccucccaacgggcccuccuccccuccuugcaccgagauuaaucaaaggcucuuuucagagccaccaaaaaaaaaaaaaaaaaaaaaaaaaaaaaaaaaaaaaaaaaaaaaaaaaaaaaaaaaaaaaaaaagaauu

SEQ ID NO: 29466 - RNA, 1655 nt, Artificial Sequence
  mRNA product Design i-3 (hSL-A64-N5) comprising derived and/or modified sequence from LASV(Nig08-A19;Clade III)__ADU56618__GPCmut5 (opt5)
aggagaaagcuuaccaugggccagaucgugaccuucuuucaagaggucccccacguuauugaagaggugaugaacaucgugcugauugcccucagcauccuggcuauucuuaaggggcuguacaauaucgccacaugcggacucaucggccuggucacguuccuucugcucuccgggagaucuuguagcaugaccuauaaaggaguguacgaacugcagacacuggagcucaacaugaauacccugaacaugacaaugccucuuuccugcaccaagaauaacucucaucacuauauuaugguuggcaaugaaacagggcuggagcucacccugacgaacaccagccuucugcaucacaaauuuuguaaucucuccgacgcgcauaagaaaaaccuguacgaucacacacugaugucuaucauuagcaccuuccaccucuccaucccgaauuuuaaccaguaugaggcuaugagcugcgacuucaauggaggcaagauuacagugcaguacaaccugucucauuccuaugccaucgaugccgcuaaucacuguggcaccgucgccaacggggugcuucaaacguuuaugcggauggcuuggggaggcagcuacauugcccuggacucugggugcggaaagugggauuguaucaugacauccuaccaguaucucaucauucagaacaccacaugggaagaccauugccaguucagccgccccucuccuaucggcuaccuggggcuucugucccaaagaacccgggauauuuauaucagccgcagacuccugggaaccuuuacauggacgcuguccgacucugagggcaaugaaacccccggcggguacugucucacacgguggaugcugauugaggcggagcuuaaaugcuucggaaacaccgccguugcuaaguguaaugaaaaacacgaugaggaauuuugcgacaugcugcgccucuucgauuuuaacaagcaggccaucagacggcugaaagcuccugcccagaugagcauccagcuuauuaauaaggcggugaacgcccugaucaaugaccaacucauuaugaagaaccaucugcgcgauaucaugugcauucccuauuguaauuacuccaaauauugguaccugaaccacacaagcaccggcagaacgucucucccucggugcuggcuggucuccaaugggagcuaccuuaacgagacacacuucucugacgacaucgaacagcaggcugauaauaugaucaccgagaugcugcaaaaggaguaucucgaccgccagggaaaaaccccgcugggccugguggaucuuuucguguuuagcacauccuucuaccucauuucuaucuuucugcaucuggucaagauucccacccacagacauaucguugggaaaccuugucccaagccucaccggcucaaccacaugggaauuugcagcuguggccuguauaaacagcccggcgugccggugcgcuggaagagaugaggacuaguuauaagacugacuagcccgaugggccucccaacgggcccuccuccccuccuugcaccgagauuaaucaaaggcucuuuucagagccaccaaaaaaaaaaaaaaaaaaaaaaaaaaaaaaaaaaaaaaaaaaaaaaaaaaaaaaaaaaaaaaaaagaauu

SEQ ID NO: 29467 - RNA, 1658 nt, Artificial Sequence
  mRNA product Design i-3 (hSL-A64-N5) comprising derived and/or modified sequence from LASV(G1180-SLE-2010;Clade IV)__AIT17168__GPCmut5 (opt5)
aggagaaagcuuaccaugggccagaucgugaccuucuuucaagaggucccccacguuauugaagaggugaugaacaucgugcugauugcccucagcauccuggcuguccuuaaggggcuguacaauuucgccacaugcggacucgugggccugcuuacguuucugcuccugugugggagauccugcaccgcgucucgguauaaaggaguuuacgaacugcagacacucgagcugaacauggaaacccuuaauaugacaaugccucugagcuguaccaagaacaauucccaucacuauauuauggugggcaacgagacagggcucgagcugacccuuacgaauaccucuaucaucaaccauaaauucugcaaucugagcgacgcucacaagaaaaaccucuacgaucaugcccugauguccauuaucucuacauuucaccugagcauuccgaauuucaaccaguaugaagccauguccugugacuuuaauggaggcaagaucagcguccaguacaaccucucucacuccuaugcuggcgaugccgcuaaucauugcgggaccguggccaacggaguucugcaaacauucaugcgcauggcguggggcgggagcuacauugcccuugacucuggauguggcuccugggauugcaucaugaccagcuaccaguaucugauuauccagaacacgacaugggaggaccacugucaguuuucuagacccuccccuaucggguaccucggacugcuuagccaacggacccgcgauauuuauaucuccagacggcugcucggcacauucaccuggacccugucugacagcgaaggcaaggauacacccgggggauacugccugacgcgcuggaugcucauugaggcugagcugaaauguuuuggcaauaccgccguggcuaagugcaacgaaaaacaugacgaggaguucugcgauaugcuuagacuguuugacuucaauaagcaggccauccagcggcucaaagcgccugcccagauguccauucaacugaucaacaaggcugucaaugcccuuaucaacgaucagcugauuaugaagaaucaccuccgcgacaucauguguauucccuauugcaacuacagcaaauauugguaccugaaucacacaaccacagggaagaccucucugccuaaauguuggcucguguccaacggaagcuaccugaaugaaacgcauuucucugacgauaucgaacagcaagcugacaacaugauuacagagaugcuucagaaggaguauauggaaagacagggcaaaaccccgcuggggcucguggaucuguuugucuucagcaccuccuuuuaccugaucucuaucuuccuucaccucguuaagauucccacacaucggcacaucgugggaaaaagcugcccuaagccccaucgccugaaucacaugggcauuuguuccugcggccuguauaagcagccuggggugcccgucaaauggaagagaugaggacuaguuauaagacugacuagcccgaugggccucccaacgggcccuccuccccuccuugcaccgagauuaaucaaaggcucuuuucagagccaccaaaaaaaaaaaaaaaaaaaaaaaaaaaaaaaaaaaaaaaaaaaaaaaaaaaaaaaaaaaaaaaaagaauu

SEQ ID NO: 29468 - RNA, 1658 nt, Artificial Sequence
  mRNA product Design i-3 (hSL-A64-N5) comprising derived and/or modified sequence from LASV(G1442-SLE-2011;Clade IV)__AIT17180__GPCmut5 (opt5)
aggagaaagcuuaccaugggccagaucgugaccuucuuucaagaggucccccacguuauugaagaggugaugaacaucgugcugauugcccucagcauccuggcuguccuuaaggggcuguacaauguggccacaugcggacucauuggccugguuacguuccuucugcucugugggagauccugcaccacaacccuguauaaaggaguguacgaacugcagacacucgagcugaacauggaaacccuuaauaugacaaugccucugucuuguaccaagaacaauagccaucacuauauccgggucggcaacgagacggggcucgagcugacccuuacaaauaccuccaucauuaaccauaaauuuugcaaucugucugacgcgcacaagaaaaaccucuacgaucaugcucugaugagcaucauuuccacauuccaccugucuaucccgaauuuuaaccaguaugaagccaugagcugugacuucaauggaggcaagauuuccgugcaguacaaccucagccacucuuaugccggcgaugcugccaaucauugcgggaccguugcuaacggagugcugcaaacguuuaugcgcauggccuggggcggguccuacaucgcgcuugacagcggauguggcaacugggauugcauuaugacaucuuaccaguaucugaucauccagaauaccacaugggacgaucacugucaguucuccagacccagcccuauuggguaccucggacugcuuucucaacggacccgcgacgucuauaucuccagacggcugcucggcaccuuuacauggacgcugagcgauuccgagggcaaggacacccccgggggauacugccugacacgcuggaugcucauugaagccgagcugaaauguuucggcaacaccgcuguggccaagugcaaugagaaacaugaugaagaguuuugcgacaugcuuagacuguucgauuuuaacaagcaggcuauccagcggcucaaagccccugcgcagaugucuauucaacugaucaauaaggccgugaacgcucuuaucaaugaccagcugauuaugaagaaccaccuccgcgacaucauguguauucccuauugcaauuacagcaaauauugguaccugaacaauacagccaccgggaagacgucccugccuaaauguuggcucaucagcaacggaucuuaccugaaugaaacacacuucuccgaugacauugagcaggaagcugauaacaugaucaccgagaugcuucaaaaggaguauauggaaagacagggcaaaaccccgcuggggcucgucgaccuguucguuuuuagcacaucuuucuaccugaucagcauuuuucuucaucucgugaagauccccacccaccggcauauugugggaaaauccugcccuaagccccaccgccugaaucauaugggcaucuguucuugcggccuguauaagcagccugggguccccgugagauggaaacggugaggacuaguuauaagacugacuagcccgaugggccucccaacgggcccuccuccccuccuugcaccgagauuaaucaaaggcucuuuucagagccaccaaaaaaaaaaaaaaaaaaaaaaaaaaaaaaaaaaaaaaaaaaaaaaaaaaaaaaaaaaaaaaaaagaauu

SEQ ID NO: 29469 - RNA, 1658 nt, Artificial Sequence
  mRNA product Design i-3 (hSL-A64-N5) comprising derived and/or modified sequence from LASV(G3010-SLE-2013;Clade IV)__AIT17344__GPCmut5 (opt5)
aggagaaagcuuaccaugggccagaucgugaccuucuuucaagaggucccccacguuauugaagaggugaugaacaucgugcugauugcccucagcauccuggcuguccuuaaggggcuguacaauuucgccacaugcggacucgugggccugguuacguuucuucugcucugugggagauccugcaccacaucucuguauaaaggaguguacgaacugcagacccucgagcugaacauggaaacacuuaauaugaccaugccucugagcuguacaaagaacaauucccaucacuauauuauggucggcaacgagaccgggcucgagcugacgcuuaccaauacaucuaucaucaaccauaaauucugcaaucugagcgacgcgcacaagaaaaaccucuacaaucaugcucugauguccauuaucucuaccuuucaccugagcauuccgaacuucaaucaguaugaagccauguccugugauuuuaacggaggcaagaucagcgugcaguacaaucucucucacuccuaugccggcgacgcugccagccauugcgggacaguugcuaacggagugcugcaaaccuucaugcggauggccuggggcgggucuuacauugcgcuugauuccggauguggcaagugggacugcaucaugacgagcuaccaguaucugauuauccagaacacaaccugggaggaucacugucaguuuucucgccccuccccuaucggguaccucggacugcuuagccaaagaacacgggacauuuauaucucccgcagacugcucggcaccuucaccuggacacugucugauagcgaaggcaaagacacgcccgggggauacugccugacccgguggaugcucauugaggccgagcugaaguguuuuggcaauacagcugucgccaaaugcaacgaaaagcaugaugaggaguucugcgacaugcuucgccuguuugauuucaauaaacaggcuauccagagacucaagaccccugcccagauguccauucaacugaucaacaaggcggugaaugcccuuaucaacgaccagcugauuaugaaaaaucaccuccgggauaucauguguauucccuauugcaacuacagcaaguauugguaccugaaucacacaaccacggggaaaacaucucugccuaaguguuggcucguguccaacggaagcuaccugaaugaaacccauuucucugacgacaucgaacagcaagcugauaacaugauuaccgagaugcuucagaaagaguauauggaacgccagggcaagacaccgcuggggcucgucgaccuguuuguuuucagcaccuccuuuuaccugaucucuaucuuccuucaccucgugaaaauucccacacauagacacaucgugggaaagagcugcccuaagccccaucggcugaaucacaugggcauuuguuccugcggccuguauaaacagccugggguccccgugcgcuggaagagaugaggacuaguuauaagacugacuagcccgaugggccucccaacgggcccuccuccccuccuugcaccgagauuaaucaaaggcucuuuucagagccaccaaaaaaaaaaaaaaaaaaaaaaaaaaaaaaaaaaaaaaaaaaaaaaaaaaaaaaaaaaaaaaaaagaauu

SEQ ID NO: 29470 - RNA, 1658 nt, Artificial Sequence
  mRNA product Design i-3 (hSL-A64-N5) comprising derived and/or modified sequence from LASV(G502-SLE-2009;Clade IV)__AIT17126__GPCmut5 (opt5)
aggagaaagcuuaccaugggccagaucgugaccuucuuucaagaggucccccacguuauugaagaggugaugaacaucgugcugauugcccucagcauccuggcuguccuuaaggggcuguacaauuucgccacaugcggacucgugggccugcuuacguuucugcuccugugugggagauccugcaccacaggacuguauaaaggcguuuacgaacuccagacccuggagcuuaacauggaaacacugaauaugaccaugccucucucuuguacaaagaacaauagccaucacuauauuaugguggggaacgagaccggacuggagcuuacgcugaccaauacauccaucaucaaccauaaauucugcaaucucucugacgcgcacaagaaaaaccuguacgaucaugcucugaugagcauuaucuccaccuuucaccucucuauuccgaauuucaaccaguaugaagccaugagcugugacuuuaauggcggcaagaucuccguccaguacaaccugagccacucuuaugccggggaugcugccgaccauugcggaacaguggcuaauggcguucuucaaaccuucaugcggauggccuggggaggguccuacauugcgcuggauagcggcugugggcgcugggacugcaucaugacgucuuaccaguaucucauuauccagaacacaaccugggaggaucacugucaguuuuccagacccagcccuaucggauaccugggccuucugucucaacggacacgcgacauuuauaucuccagacggcuccugggcaccuucaccuggacacugagcgauuccgaagggaaggacacgcccggaggcuacugccucacccgcuggaugcugauugaggccgagcuuaaauguuuugggaacacagcuguggccaagugcaaugaaaaacaugaugaggaguucugcgacaugcugagacucuuugauuucaacaagcaggcuauccagcggcugaaagccccugcgcagaugucuauucaacuuaucaauaaggccgucaacgcucugaucaaugaccagcucgugaugaagaaccaucugcgcgacauuauguguauccccuauugcaauuacagcagauauugguaccugaaccacaccacaaccggacggacgucccucccuaaauguuggcuggugagcaauggcucuuaccuuaacgaaacacacuucuccgaugacauugaacagcaagccgauaauaugaucaccgagaugcugcagaaggaguauauggaacgccaggggaaaaccccgcucggacuggucgaccuguuuguuuucagcacaucuuuuuaccuuauuagcaucuuccuccaccuggugaagauccccacccauagacacauugugggcaaauccugcccuaagccccaucggcugaaccacaugggcaucuguucuugcgggcucuauaaacagccuggaguccccgugaaguggaagcgcugaggacuaguuauaagacugacuagcccgaugggccucccaacgggcccuccuccccuccuugcaccgagauuaaucaaaggcucuuuucagagccaccaaaaaaaaaaaaaaaaaaaaaaaaaaaaaaaaaaaaaaaaaaaaaaaaaaaaaaaaaaaaaaaaagaauu

SEQ ID NO: 29471 - RNA, 1658 nt, Artificial Sequence
  mRNA product Design i-3 (hSL-A64-N5) comprising derived and/or modified sequence from LASV(G733-SLE-2010;Clade IV)__AIT17154__GPCmut5 (opt5)
aggagaaagcuuaccaugggccagaucgugaccuucuuucaagaggucccccacguuauugaagaggugaugaacaucgugcugauugcccucagcauccuggcuguccuuaaggggcuguacaauuucgccacaugcggaauugugggccucguuuccuuucugcuucugugugggagaucuugcacgaccagccucuauaaaggaguguacgaacugcagacacuggagcucaacauggaaacccugaauaugacaaugccucuuuccuguaccaagaacaauucucaucacuauaucauggucggcaacgagacagggcuggagcucacccugacgaauaccagcaucauuaaccauaaauucugcaaucuuuccgacgcgcacaagaaaaaccuguacgaucaugcucucaugucuaucauuagcacauuucaccuguccaucccgaauuucaaccaguaugaagccaugagcugugacuuuaauggaggcaagauuucugugcaguacaaccugucccacagcuaugccggcgaugcugccaaucauugcgggaccaucgcuaacggaguucuccaaacauucaugcggauggccuggggcgggucuuacauugcgcuggacuccggaugugaucgcugggacugcaucaugaccagcuaccaguaucuuaucauucagaacacgacaugggaggaucacugucaguuuucuagacccuccccuaucggcuaccuggggcuccugagccaacggacccgcgacauuuauaucuccagacggcuucugggaacauucaccuggacccucucugauagcgaaggcaaggacacacccggcggguacugccugacgcgcuggaugcugauugaggccgagcucaaauguuuuggaaauaccgcuguggccaagugcaacgaaaaacaugaugaggaguucugcgacaugcugagacuuuuugauuucaauaagcaggcuauccagcggcugaaagccccugcgcagauguccauccaacucauuaacaaggccgucaaugcucugaucaacgaccagcuuauuaugaagaaucaucugcgcgacaucauguguauucccuauugcaacuacagcaaauauugguaccucaaucacacaaccacaggcaagaccucucugccuaaauguuggcugguguccaacgggagcuaccucaaugaaacgcacuucucugaugacaucgaacagcaagccgauaacaugaucacagagaugcugcagaaggaguauauggaaagacagggaaaaaccccgcuuggccugguggaccucuuugucuucagcaccuccuuuuaccugauuucuaucuuccugcaccuuguuaagauucccacacaucggcacgugguggggaaaagcugcccuaagccccaucgccucaaucacaugggaaucuguuccugcggccuguauggccagccugggguccccgugaaguggaaaagaugaggacuaguuauaagacugacuagcccgaugggccucccaacgggcccuccuccccuccuugcaccgagauuaaucaaaggcucuuuucagagccaccaaaaaaaaaaaaaaaaaaaaaaaaaaaaaaaaaaaaaaaaaaaaaaaaaaaaaaaaaaaaaaaaagaauu

SEQ ID NO: 29472 - RNA, 1658 nt, Artificial Sequence
  mRNA product Design i-3 (hSL-A64-N5) comprising derived and/or modified sequence from MOPV/LASV reassortant(IGS-1;Clade IV)__AFY05576__GPCmut5 (opt5)
aggagaaagcuuaccaugggccagaucgugaccuucuuucaagaggucccccacguuauugaagaggugaugaacaucgugcugauugcccucagcguccuggcugugcuuaaggggcuguacaauuucgccacaugcggacucguuggccuggugacguuucuucugcucugugggagauccugcaccacaucucuguauaaaggagucuacgaacugcagacccucgagcugaacauggaaacacuuaauaugaccaugccucugagcuguacaaagaacaauucccaucacuauaucauggugggcaacgagaccgggcucgagcugacgcuuaccaauacaucuauuaucaaccauaaauucugcaaucugagcgacgcgcacaagaaaaaccucuacgaucaugcucugauguccaucauuucuaccuuucaccugagcaucccgaauuucaaccaguaugaagccauguccugugacuuuaauggaggcaagauuagcguucaguacaaccucucucacuccuaugccggcgaugcugccaaucauugcgggacaguggcuaacggaguccugcaaaccuucaugcggauggccuggggcgggagcuacaucgcgcuugacucuggauguggcaacugggauugcauuaugacguccuaccaguaucugaucauucagaauacaaccugggaggaccacugucaguuuagccgccccucuccuaucggguaccucggacugcuuucccaaagaacacgggauaucuauauuagccgcagacugcucggcaccuucaccuggacacuguccgacucugaaggcgaggauacgcccgggggauacugccugacccgguggaugcucaucgaggccgaacugaaguguuuuggcaacacagcuguggccaaaugcaaugagaagcaugacgaagaguucugcgauaugcuucgccuguuugacuucaacaaacaggcuauucagagacucaaggccccugcgcagaugagcauccaacugauuaauaaagccgugaacgcucuuaucaaugaucagcugaucaugaagaaccaccuccgggacauuauguguauccccuauugcaauuacuccaaguauugguaccugaaccacaccacaaccgggcgcacgagccugccuaaauguuggcucgucucuaauggauccuaccugaacgaaacacauuucagcgacgauauugagcagcaagccgacaauaugaucaccgagaugcuucagaaggaauauauggagagacagggcaaaaccccgcuggggcucguugaucuguuuguguucucuaccagcuuuuaccugauuuccaucuuccuucaccucgugaagauccccacacaucggcacauugucggaaaaucuugcccuaagccccaucgccugaaccacaugggcaucuguagcugcggccuguauaaacagccuggggugcccguuaaguggaagagaugaggacuaguuauaagacugacuagcccgaugggccucccaacgggcccuccuccccuccuugcaccgagauuaaucaaaggcucuuuucagagccaccaaaaaaaaaaaaaaaaaaaaaaaaaaaaaaaaaaaaaaaaaaaaaaaaaaaaaaaaaaaaaaaaagaauu

SEQ ID NO: 29473 - RNA, 1658 nt, Artificial Sequence
  mRNA product Design i-3 (hSL-A64-N5) comprising derived and/or modified sequence from LASV(LM765-SLE-2012;Clade IV)__AIT17814__GPCmut5 (opt5)
aggagaaagcuuaccaugggccagaucgugaccuucuuucaagaggucccccacguuauugaagaggugaugaacaucgugcugauugcccucagcauccuggcuguccuuaaggggcuguacaauuucgccacaugcggacucgugggccugguuacguuucuucugcucugugggagauccugcaccacaucucuguauaaaggaguguacgaacugcagacccucgagcugaacauggaaacacuuaauaugaccaugccucugagcuguacaaagaacaauucccaucacuauauuauggucggcaacgagaccgggcucgagcugacgcuuaccaauacaucuaucaucgaccauaaauucugcaaccugagcgaugcgcaccggaagaaucucuacgaccaugcucugauguccauuaucucuaccuuucaccugagcauuccgaacuucaaucaguaugaagccauguccugugauuuuaacggaggcaaaaucagcgugcaguacaaucucucucacuccuaugccaaggacgcugccgaucauugcggcacaguugcuaacggggugcugcaaaccuucaugcgcauggccuggggaggcagcuacauugcgcuugacucuggguguggaagaugggauugcaucaugacguccuaccaguaucugauuauccagaauacaaccugggaggaccacugucaguuuagccggcccucuccuaucggcuaccucgggcugcuuucccaacgcacaagagauauuuauaucagccggcgccugcucggaaccuucaccuggacacuguccgacucugaaggcaaggauacgcccggcggguacugccugaccagauggaugcucauugaggccgagcugaaauguuuuggaaacacagcugucgccaagugcaacgaaaaacaugacgaggaguucugcgauaugcuucggcuguuugacuucaauaagcaggcuauccagcgccucaaagccccugcgcagaugagcauucaacugaucaacaaggccgugaaugcucuuaucaacgaccagcugauuaugaagaaucaccucagagauaucauguguauucccuauugcaacuacuccaaauauugguaccugaaucacaccacaaccggcaagacgagccugccuaaauguuggcucgugucuaacggguccuaccugaaugaaacacauuucagcgacgauaucgaacagcaagccgacaacaugauuaccgagaugcuucagaaggaguauauggaacggcagggaaaaaccccgcugggccucgucgaucuguuuguuuucucuaccagcuuuuaccugaucuccaucuuccuucaccucgugaagauucccacacaucgccacaucguggggaaaccuugccccaagccucauagacugaaucacaugggaauuuguucuugcggccuguauaagcagcccggcgucccggugaaauggaagcggugaggacuaguuauaagacugacuagcccgaugggccucccaacgggcccuccuccccuccuugcaccgagauuaaucaaaggcucuuuucagagccaccaaaaaaaaaaaaaaaaaaaaaaaaaaaaaaaaaaaaaaaaaaaaaaaaaaaaaaaaaaaaaaaaagaauu

SEQ ID NO: 29474 - RNA, 1658 nt, Artificial Sequence
  mRNA product Design i-3 (hSL-A64-N5) comprising derived and/or modified sequence from LASV(LM776-SLE-2012;Clade IV)__AIT17824__GPCmut5 (opt5)
aggagaaagcuuaccaugggccagaucgugaccuucuuucaagaggucccccacguuauugaagaggugaugaacaucgugcugauugcccucagcauccuggcuguccuuaaggggcuguacaauuucgccacaugcggacucgugggccugguuacguuucuucugcucugugggagauccugcaccacaucuguguauaaaggagucuacgaacugcagacccuggagcucaacauggaaacacugaauaugaccaugccucuuagcuguacaaagaacaauucccaucacuauauuauggugggcaacgagaccgggcuggagcucacgcugaccaauacaucuaucaucaaccauaaauucugcaaucuuagcgacgcgcacaagaaaaaccuguacgaucaugcucucauguccauuaucucuaccuuucaccugagcauuccgaauuucaaccaguaugaagccauguccugugacuuuaauggaggcaagaucagcguucaguacaaccugucucacuccuaugccggcgaugcugccaaucauugcgggacaguggcuaacggaguccuccaaaccuucaugcggauggccuggggcgggagcuacauugcgcuggacucuggauguggcaagugggauugcaucaugacguccuaccaguaucuuauuauccagaacacaaccugggaggaccacugucaguuuagccgccccucuccuaucggguaccugggacuccugucccaaagaacacgggauauuuauaucagccgcagacuucugggcaccuucaccuggacacucuccgacucugaaggcaaagauacgcccgggggauacugccugacccgguggaugcugauugaggccgagcucaaguguuuuggcaauacagcuguggccaaaugcaacgaaaagcaugacgaggaguucugcgauaugcugcgccuuuuugacuucaauaaacaggcuauccagagacugaaggccccugcgcagaugagcauucaacucaucaacaaggccgugaaugcucugaucaacgaucagcuuauuaugaaaaaucaucugcgggacaucauguguauucccuauugcaacuacuccaaguauugguaccucaaucacaccacaaccgggaaaacgagccugccuaaguguuggcuggucucuaacggauccuaccucaaugaaacacacuucagcgacgauaucgaacagcaagccgacaacaugauuaccgagaugcugcagaaagaguauauggaacgccagggcaagaccccgcuugggcugguugaucucuuuguguucucuaccagcuuuuaccugaucuccaucuuccugcaccuugugaaaauucccacacauagacacaucgucggaaagucuugcccuaagccccaucggcucaaucacaugggcauuuguagcugcggccuguauaaacagccuggggugcccguucgcuggaagagaugaggacuaguuauaagacugacuagcccgaugggccucccaacgggcccuccuccccuccuugcaccgagauuaaucaaaggcucuuuucagagccaccaaaaaaaaaaaaaaaaaaaaaaaaaaaaaaaaaaaaaaaaaaaaaaaaaaaaaaaaaaaaaaaaagaauu

SEQ ID NO: 29475 - RNA, 1658 nt, Artificial Sequence
  mRNA product Design i-3 (hSL-A64-N5) comprising derived and/or modified sequence from LASV(Mad39;Clade IV)__ANH09722__GPCmut5 (opt5)
aggagaaagcuuaccaugggccagaucgugaccuucuuucaagaggucccccacguuauugaagaggugaugaacaucgugcugauugcccucagcauccuggcuguccuuaaggggcuguacaauguggccacaugcggacucauuggccugguuacguuccuucugcucugugggagauccugcaccacaacccuguauaaaggaguguacgaacugcaggcgcucgagcugaacauggaaacacuuaauaugaccaugccucugucuuguacaaagaacaauagccaucacuauauccgggucggcaacgagaccgggcucgagcugacgcuuaccaauacaucccugaucaaccauaaauuuugcaaucucucugacgcucacaagaaaaaccuguacgaucaugcccugaugagcauuaucuccaccuuccaccucucuauuccgaauuuuaaccaguaugaagccaugagcugugacuucaaugauggaaagaucuccgugcaguacaaccugagccacacauaugcuggcgacaccgccaaucauugcggcacgguugcuaacggggugcuucaaacauuuaugcgcauggccuggggaggcucuuacauugcgcuggauuccggguguggaggcugggacugcaucaugaccagcuaccaguaucucauuauccagaacacaaccugggaggaucacugucaguucucuagacccuccccuaucggguaccugggacuucugagccaacggacccgcgacauuuauaucucuagacggcuccugggcacauuuacguggacccuguccgauagcgaaggcaaggacacacccgggggauacugccucacccgcuggaugcugauugaggccgagcuuaaauguuucggcaauacagcugucgccaagugcaacgaaaaacaugaugaggaauuuugcgacaugcugagacucuucgauuuuaauaagcaggcuauccagcggcugaaagccccugcgcagauguccauucaacuuaucaacaaggccgugaaugcucugaucaacgaccagcucauuaugaagaaucaucugcgcgacaucauguguauucccuauugcaacuacucuaaauauugguaccugaaucacaccgugacggggaagacaagccucccuaaauguuggcuggucuccaacggaagcuaccuuaaugagacccacuucucugaugacaucgaacagcaagccgauaacaugauuaccgagaugcugcagaaggaguauauggaaagacagggcaaaacaccgcucgggcugguugaccuguucguguuuuccaccagcuucuaccuuaucucuaucuuucuccaccuggugaagauucccacacaucggcacgucgugggaaaaccuugccccaagccucaucgccugaaucacaugggcaucuguagcugcggcuucuauaagcagcccgggguuccggugagauggaaacggugaggacuaguuauaagacugacuagcccgaugggccucccaacgggcccuccuccccuccuugcaccgagauuaaucaaaggcucuuuucagagccaccaaaaaaaaaaaaaaaaaaaaaaaaaaaaaaaaaaaaaaaaaaaaaaaaaaaaaaaaaaaaaaaaagaauu

SEQ ID NO: 29476 - RNA, 1658 nt, Artificial Sequence
  mRNA product Design i-3 (hSL-A64-N5) comprising derived and/or modified sequence from LASV(Z0947-SLE-2011;Clade IV)__AIT17840__GPCmut5 (opt5)
aggagaaagcuuaccaugggccagaucgugaccuucuuucaagaggucccccacguuauugaagaggugaugaacaucgugcugauugcccucagcauccuggcuguccuuaaggggcuguacaauuucgccacaugcggacucgugggccugguuacguuucuucugcucugugggagauccugcaccauuucucuguauaaaggaguguacgaacugcagacacucgagcugaacauggaaacccuuaauaugacaaugccucugagcuguaccaagaacaauucccaucacuauaucauggucggcaacgagacagggcucgagcugacccuuacgaauaccucuaucauuaaccauaaauucugcaaucugagcgacgcgcacaagaaaaaccucuacgaucaugcucugauguccaucauuucuacauuucaccugagcaucccgaauuucaaccaguaugaagccauguccugugacuuuaauggaggcaagauuagcgugcaguacaaccucucucacuccuaugccggcgaugcugccaaucauugcgggaccguugcuaacggagugcugcaaacauucaugcggauggccuggggcgggagcuacaucgcgcuugacucuggaugugaucgcugggacugcauuaugaccuccuaccaguaucugaucauccagaacacgacaugggaggaucacugucaguuuagcagacccucuccuauuggcuaccucgggcugcuuucccaacggacccgcgacaucuauauuagcagacggcugcucggaacauucaccuggacccuguccgauucugaaggcaaggacacacccggcggguacugccugacgcgcuggaugcucaucgaggccgagcugaaauguuuuggaaauaccgcugucgccaagugcaacgaaaaacaugaugaggaguucugcgacaugcuuagacuguuugauuucaauaagcaggcuauucagcggcucaaagccccugcgcagaugagcauccaacugaucaacaaggccgugaaugcucuuauuaacgaccagcugaucaugaagaaucaccuccgcgacauuauguguauccccuauugcaacuacuccaaauauugguaccugaaucacacaaccacaggcaagaccagccugccuaaauguuggcucgugucuaacggguccuaccugaaugaaacgcauuucagcgaugacauugaacagcaagccgauaacaugaucacagagaugcuucagaaggaguauauggaaagacagggaaaaaccccgcugggccucgucgaccuguuuguuuucucuaccagcuuuuaccugaucuccauuuuccuucaccucgugaagauccccacacaucggcacauuguggggaaaccuugccccaagccucaucgccugaaucacaugggaaucuguucuugcggccuguauaagcagcccggcgucccggugaaauggaagagaugaggacuaguuauaagacugacuagcccgaugggccucccaacgggcccuccuccccuccuugcaccgagauuaaucaaaggcucuuuucagagccaccaaaaaaaaaaaaaaaaaaaaaaaaaaaaaaaaaaaaaaaaaaaaaaaaaaaaaaaaaaaaaaaaagaauu

SEQ ID NO: 29477 - RNA, 1689 nt, Artificial Sequence
  mRNA product Design i-3 (hSL-A100) comprising derived and/or modified sequence from LASV(Josiah;Clade IV)__NP_694870__GPCmut5 (opt1)
aggagaaagcuuaccaugggccagaucgugaccuucuuccaggaggucccccacgugaucgaggaggugaugaacaucguccugaucgcccucagcgugcuggccgugcugaaggggcucuacaacuucgcgaccugcggccuggucgggcuggugacguuccuccugcugugcggccgcuccugcaccaccagccucuacaaggggguguacgagcugcagacccuggagcucaacauggagacgcugaacaugaccaugccgcuguccugcaccaagaacaacagccaccacuacaucauggucggcaacgagaccggccucgagcugacgcugaccaacaccuccaucaucaaccacaaguucugcaaccucagcgacgcccacaagaagaaccuguacgaccacgcccugauguccaucaucagcaccuuccaccucuccauccccaacuucaaccaguacgaggccaugagcugcgacuucaacgggggcaagaucuccgugcaguacaaccugagccacuccuacgccggggacgcggccaaccacugcggcacgguggccaacgggguccugcagaccuucaugcggauggccuggggcggcagcuacaucgcgcucgacuccgggugcggcaacugggacugcaucaugaccagcuaccaguaccugaucauccagaacaccacgugggaggaccacugccaguucucccggcccagccccaucggguaccugggccuccugucccagcgcacccgggacaucuacaucagccgccggcugcucggcaccuucaccuggacgcugagcgacuccgaggggaaggacaccccgggcggguacugccugacccgcuggaugcucaucgaggccgagcugaagugcuucggcaacaccgccguggccaagugcaacgagaagcacgacgaggaguucugcgacaugcugcggcuguucgacuucaacaagcaggccauccagcgccugaaggcgcccgcccagaugagcauccagcugaucaacaaggccgugaacgcccucaucaacgaccagcugaucaugaagaaccaccuccgggacaucaugugcauccccuacugcaacuacuccaaguacugguaccucaaccacacgaccaccggccgcaccagccugcccaagugcuggcuggucuccaacggcagcuaccucaacgagacgcacuucuccgacgacaucgagcagcaggccgacaacaugaucaccgagaugcugcagaaggaguacauggagcggcaggggaagacgccccugggccucguggaccuguucguguucagcaccuccuucuaccugaucagcaucuuccugcaccucgucaagaucccgacccaccgccacaucguggggaaguccugccccaagccccaccggcugaaccacaugggcaucugcagcugcgggcuguacaagcagcccggcgugccggucaaguggaagcgcugaggacuaguuauaagacugacuagcccgaugggccucccaacgggcccuccuccccuccuugcaccgagauuaaucaaaggcucuuuucagagccaccaaaaaaaaaaaaaaaaaaaaaaaaaaaaaaaaaaaaaaaaaaaaaaaaaaaaaaaaaaaaaaaaaaaaaaaaaaaaaaaaaaaaaaaaaaaaaaaaaaaaa

SEQ ID NO: 29478 - RNA, 1686 nt, Artificial Sequence
  mRNA product Design i-3 (hSL-A100) comprising derived and/or modified sequence from LASV(LP;Clade I)__AAF86701__GPCmut5 (opt1)
aggagaaagcuuaccaugggccagaucaucaccuucuuccaggaggugccccacgucaucgaggaggugaugaacaucgugcugaucgcccucagccugcuggccauccucaaggggcuguacaacaucgcgaccugcggcaucaucgggcuggucgccuuccucuuccugugcggcaaguccugcagccugacgcucaagggcggguacgagcugcagacccuggagcucaacauggagacccugaacaugaccaugccgcuguccugcacgaagaacagcucccaccacuacauccgcgugggcaacgagaccgggcucgagcugacccugaccaacacgagcaucaucaaccacaaguucugcaaccucuccgacgcccacaagaagaaccuguacgaccacgcccugaugagcaucaucuccaccuuccaccucagcauccccaacuucaaccaguacgaggccauguccugcgacuucaacggcgggaagaucagcgugcaguacaaccugucccacagcuacgcgggcgacgccgccgagcacugcgggaccgucgccaacggcgugcugcagaccuucaugcggauggcguggggcgggcgcuacaucgcccucgacuccggcugcgggaacugggacugcaucaugacgagcuaccaguaccugaucauccagaacaccaccugggaggaccacugccaguucucccggcccagccccaucggcuaccugggccuccugucccagcgcacccgggacaucuacaucagccgccggcugcucgggacguucaccuggacccugagcgacuccgagggcaacgagacccccgggggcuacugccugacgcgcuggaugcucaucgaggccgagcugaagugcuucgggaacaccgccguggccaagugcaacgagaagcacgacgaggaguucugcgacaugcugcggcuguucgacuucaacaagcaggcgauccgccggcugaaggcccccgcccagaugagcauccagcugaucaacaaggccgucaacgcccucaucaacgaccagcugaucaugaagaaccaccuccgcgacaucaugugcauccccuacugcaacuacuccaaguacugguaccucaaccacaccagcuccggccggaccagccugcccaagugcuggcugaucuccaacgggagcuaccucaacgagacgcaguucuccgacgacaucgagcagcaggcggacaacaugaucaccgagaugcugcagaaggaguacaucgagcgccagggcaagaccccgcuggggcucguggacaucuucaucuucagcaccuccuucuaccugaucagcaucuuccugcaccugaucaagaucccgacgcaccggcacaucgugggcaagcccugccccaagccccaccgccucaaccacaugggggucugcuccugcggccuguacaagcacccgggcgugcccaccaaguggaagcggugaggacuaguuauaagacugacuagcccgaugggccucccaacgggcccuccuccccuccuugcaccgagauuaaucaaaggcucuuuucagagccaccaaaaaaaaaaaaaaaaaaaaaaaaaaaaaaaaaaaaaaaaaaaaaaaaaaaaaaaaaaaaaaaaaaaaaaaaaaaaaaaaaaaaaaaaaaaaaaaaaaaaa

SEQ ID NO: 29479 - RNA, 1686 nt, Artificial Sequence
  mRNA product Design i-3 (hSL-A100) comprising derived and/or modified sequence from LASV(803213;Clade II)__AAF86703__GPCmut5 (opt1)
aggagaaagcuuaccaugggccagaucaucaccuucuuccaggaggugccccacgucaucgaggaggugaugaacaucgugcugaucgcccucagccugcuggccauccucaaggggaucuacaacgucgcgaccugcggccuguucgggcugaucuccuuccuccugcugugcggccgcagcugcuccgugacguacaaggggguguacgagcuccagacccuggagcugaacauggccaaccucaacaugaccaugccgcugagcugcaccaagaacaacucccaccacuacaucauggucggcaacgagacgggccuggagcucacccugaccaacaccagcaucaucaaccacaaguucugcaaccuguccgacgcccacaagaagaaccucuacgaccacgcccugaugagcaucaucuccacguuccaccugagcauccccaacuucaaccaguacgaggccauguccugcgacuucaacgggggcaagaucagcgugcaguacaaccucucccacagcuucgcgguggacgccgccaaccacugcgggaccaucgccaacggcguccugcagaccuucaugcggauggcguggggcggguccuacaucgcccuggacagcggcugcgggaacugggacugcaucaugaccuccuaccaguaccucaucauccagaacacgaccugggaggaccacugccaguucagccgccccucccccaucggcuaccuggggcugcucagccagcggacccgcgacaucuacaucagccggcgccugcugggcaccuucacguggacccucuccgacagcgagggcaacgaggcccccgggggcuacugccugacccgguggaugcugaucgaggccgagcucaagugcuucgggaacaccgccguggcgaagugcaacgagaagcacgacgaggaguucugcgacaugcugcgccuguucgacuucaacaagcaggccaucaagcggcucaagacgcccgcccagauguccauccagcugaucaacaaggccgugaacgcccugaucaacgaccagcucaucaugaagaaccaccuccgcgacaucaugugcauccccuacugcaacuacagccgguacugguaccugaaccacaccgucaccgggaagaccucccugccccgcugcuggcuggugagcaacggcuccuaccugaacgagacgcacuucagcgacgacaucgagcagcaggcggacaacaugaucaccgagaugcuccagaaggaguacauggaccggcagggcaagaccccgcuggggcugguggaccucuucgucuucuccaccagcuucuaccugaucuccaucuuccugcaccuggugaagaucccgacgcaccgccacaucgugggcaagcccugccccaagccccaccggcucaaccacauggggaucugcagcugcggccuguacaagcacccggggguccccgugaaguggaagcgcugaggacuaguuauaagacugacuagcccgaugggccucccaacgggcccuccuccccuccuugcaccgagauuaaucaaaggcucuuuucagagccaccaaaaaaaaaaaaaaaaaaaaaaaaaaaaaaaaaaaaaaaaaaaaaaaaaaaaaaaaaaaaaaaaaaaaaaaaaaaaaaaaaaaaaaaaaaaaaaaaaaaaa

SEQ ID NO: 29480 - RNA, 1686 nt, Artificial Sequence
  mRNA product Design i-3 (hSL-A100) comprising derived and/or modified sequence from LASV(GA391;Clade III)__CAA36645__GPCmut5 (opt1)
aggagaaagcuuaccaugggccagaucgugaccuucuuccaggaggucccccacgugaucgaggaggugaugaacaucguccugaucgcccucagcauccuggccauccugaaggggcucuacaacguggcgaccugcggccugaucgggcuggugacguuccuccugcuguccggccgcagcugcucccucaucuacaaggggaccuacgagcugcagacccuggagcucaacauggagacccugaacaugacgaugccgcugagcugcaccaagaacaacucccaccacuacauccgggucggcaacgagaccggccucgagcugacccugacgaacaccagcauccucaaccacaaguucugcaaccuguccgacgcccacaagcgcaaccuguacgaccacagccucauguccaucaucagcaccuuccaccuguccauccccaacuucaaccaguacgaggccaugagcugcgacuucaacgggggcaagaucaccgugcaguacaaccugucccacagcuucgccguggacgccgcggggcacugcggcacgcucgccaacgggguccugcagaccuucaugcggauggccuggggcggcuccuacaucgcccuggacagcgggugcggcaacugggacugcaucaugaccuccuaccaguaccucaucauccagaacaccacgugggacgaccacugccaguucagccggcccucccccaucggguaccugggccugcucagccagcgcacccgggacaucuacaucagccgccggcugcugggcaccuucaccuggacgcucuccgacagcgaggggaacgagaccccgggcggguacugccugacccgcuggaugcugaucgaggcggagcucaagugcuucggcaacaccgccguggccaagugcaacgagaagcacgacgaggaguucugcgacaugcugcggcuguucgacuucaacaagcaggccauccgccggcucaagacgcccgcccagauguccauccagcugaucaacaaggcggugaacgcccugaucaacgaccagcucaucaugaagaaccaccuccgcgacaucaugugcauccccuacugcaacuacagccgguacugguaccugaaccacaccuccaccggcaagaccagccugccccgcugcuggcugaucuccaacggcagcuaccugaacgagacgaaguucuccgacgacaucgagcagcaggccgacaacaugaucaccgagaugcuccagaaggaguacaucgaccggcaggggaagacgccccugggccuggucgaccuguucguguucagcaccuccuucuaccucaucagcaucuuccugcaccuggugaagaucccgacccaccgccacaucgucgggaagcccugccccaagccccaccggcucaaccacaugggcaucugcuccugcgggcuguacaagcagccgggcgugcccgugcgcuggaagcggugaggacuaguuauaagacugacuagcccgaugggccucccaacgggcccuccuccccuccuugcaccgagauuaaucaaaggcucuuuucagagccaccaaaaaaaaaaaaaaaaaaaaaaaaaaaaaaaaaaaaaaaaaaaaaaaaaaaaaaaaaaaaaaaaaaaaaaaaaaaaaaaaaaaaaaaaaaaaaaaaaaaaa

SEQ ID NO: 29481 - RNA, 1689 nt, Artificial Sequence
  mRNA product Design i-3 (hSL-A100) comprising derived and/or modified sequence from LASV(AV;Clade V)__CCA30314__GPCmut5 (opt1)
aggagaaagcuuaccaugggccagaucgugaccuucuuccaggaggucccccacgugaucgaggaggugaugaacaucguccugaucgcccucagcauccuggccgugcugaaggggcucuacaacaucgcgaccugcggccugaucgggcugaucacguuccuccugcugugcggccgcuccugcagcuccaaccucuacaaggggguguacgagcugcagagccuggaccucaacauggagacccugaacaugaccaugccgcuguccugcaccaagaacaacagccaccacuacauccgggucggcaacgacacgggccucgagcugacccugaccaacaccuccauccucaaccacaaguucugcaaccugagcgacgcccacaagaaggaccuguacgaccacgcccucauguccaucaucagcacguuccaccuguccauccccaacuucaaccaguacgaggccaugagcugcgacuucaacgggggcaagaucuccgugcaguacaaccugagccacuccuacgccaucgacgcggccaaccacugcgggaccguggccaacggcauccuccagaccuucaugcgcauggccuggggcgggagcuacaucgcgcuggacuccggcugcgggaacugggacugcaucaugaccagcuaccaguaccugaucauccagaacacgaccugggagaaccacugccaguucucccgccccagccccaucggcuaccucgggcugcugagccagcggacccgcgacaucuacaucucccggcgccuccugggcaccuucacguggacccugagcgacuccgagggcaacgccacccccgggggcuacugccucacccgguggaugcugaucgaggccgagcugaagugcuucgggaacacggccgucgccaagugcaacgagaagcacgacgaggaguucugcgacaugcuccgccuguucgacuucaacaagcaggcgaucagccggcugaagucccccgcccagaugagcauccagcucaucaacaaggccgugaacgcccugaucaacgaccagcugaucaugaagaaccaccuccgcgacaucaugugcauccccuacugcaacuacuccaaguacugguaccugaaccacaccaucaccgggaagaccagccugcccaagugcuggcucguguccaacggcagcuaccugaacgagacgcacuucuccgacgacaucgagcagcaggccgacaacaugaucaccgagaugcugcagaaggaguacauggagcggcagggcaagaccccgcucgggcuggucgaccuguucguguucagcaccuccuucuaccugaucagcaucuuccuccgccuggugaagaucccgacgcaccggcacaucgucggcaagcccugccccaagccccaccgccugaaccacauggggaucugcuccugcggccucuacaagcagccgggggugcccgugcgguggaagcgcugaggacuaguuauaagacugacuagcccgaugggccucccaacgggcccuccuccccuccuugcaccgagauuaaucaaaggcucuuuucagagccaccaaaaaaaaaaaaaaaaaaaaaaaaaaaaaaaaaaaaaaaaaaaaaaaaaaaaaaaaaaaaaaaaaaaaaaaaaaaaaaaaaaaaaaaaaaaaaaaaaaaaa

SEQ ID NO: 29482 - RNA, 1686 nt, Artificial Sequence
  mRNA product Design i-3 (hSL-A100) comprising derived and/or modified sequence from LASV(Togo/2016/7082;Clade VI)__AMR44577__GPCmut5 (opt1)
aggagaaagcuuaccaugggccagaucaucaccuucuuccaggaggugccccacgucaucgaggaggugaugaacaucgugcugaucgcccucagccugcuggccauccucaagggggucuacaacguggcgaccugcggcaucaucgggcuggugacguuccuguuccucugcggccgcuccugcagccugaucuacaagggguccuacgagcugcagacccucgagcugaacauggagacccugaacaugaccaugccgcucagcugcacgaagaacuccagccaccacuacauccgggucggcaacgagaccggccuggagcugacccucaccaacacguccaucaucaaccacaaguucugcaaccugagcgacgcccacaagcgcaaccuguacgaccacgcccucauguccauccugagcaccuuccaccuguccauccccaacuucaaccaguacgaggccaugagcugcgacuucaacgggggcaagaucuccgugcaguacaaccucagccacgccuacgcgguggacgccgccgagcacugcgggaccgucgccaacggcgugcugcagaccuucaugcggauggcguggggcggguccuacaucgcccuggacagcggcugcgggaacugggacugcaucaugacguccuaccaguaccucaucauccagaacaccaccugggaggaccacugccaguucagccggcccucccccaucggcuaccuggggcugcucagccagcgcacccgggacaucuacaucagccgccggcugcugggcacguucaccuggacccucuccgacagcgagggcaacgagacccccgggggcuacugccugacgcgcuggaugcugaucgaggccgagcucaagugcuucgggaacaccgccguggccaagugcaacgagaagcacgacgaggaguucugcgacaugcugcggcuguucgacuucaacaagcaggcgauccagcgccucaagucccccgcccagaugagcauccagcugaucaacaaggccgucaacgcccugaucaacgaccagcucaucaugaagaaccaccuccgggacaugaugugcauccccuacugcaacuacuccaaguacugguaccugaaccacaccagcuccgggcgcaccagccugcccaagugcuggcugguguccaacggcagcuaccugaacgagacgcacuucuccgacgacaucgagcagcaggccgacaacaugaucaccgagaugcuccagaaggaguacaucgaccggcagggcaagaccccgcuggggcugguggaccucuucgucuucagcaccuccuucuaccugaucagcaucuuccugcaccugaucaagaucccgacgcaccgccacaucgugggcaagcccugccccaagccccaccggcucaaccacauggggaucugcuccugcggccuguacaagcagccgggggugcccacccgcuggaagcggugaggacuaguuauaagacugacuagcccgaugggccucccaacgggcccuccuccccuccuugcaccgagauuaaucaaaggcucuuuucagagccaccaaaaaaaaaaaaaaaaaaaaaaaaaaaaaaaaaaaaaaaaaaaaaaaaaaaaaaaaaaaaaaaaaaaaaaaaaaaaaaaaaaaaaaaaaaaaaaaaaaaaa

SEQ ID NO: 29483 - RNA, 1686 nt, Artificial Sequence
  mRNA product Design i-3 (hSL-A100) comprising derived and/or modified sequence from LASV(KAK-428;Clade n.d. (VII))__ANH09740__GPCmut5 (opt1)
aggagaaagcuuaccaugggccagaucgugaccuucuuccaggaggucccccacgugaucgaggaggugaugaacaucguccugaucgcccucagccugcuggccauccucaaggggcuguacaacuucgcgaccugcggcgugaucgggcugaucacguuccuccugcugugcggccgcuccugcagcgccaccuacaaggggcaguacgagcuccagacccuggagcugaacauggagucccucaacaugaccaugccgcugagcugcacgaagaacaacucccaccacuacauccgggccggcaacaacaccggccuggagcucacccugaccaacacgagcaucaucucccacaaguucugcaaccugagcgacgcccacaagaagaaccucuacgaccacacccugauguccaucaucaccaccuuccaccugagcauccccaacuucaaccaguacgaggccauguccugcgacuucaacgggggcaagaucagcauccaguacaaccucucccacagcuacgcgggggacgccgcccagcacugcggcacgguggccaacgggguccugcagaccuucaugcgcauggcguggggcggcuccuaccuggcccucgacagcgggugccgcggcugggacugcaucaucuccagcuaccaguaccugaucauccagaacaccaccugggacgaccacugccaguucucccggcccagccccaucggguaccugggcuucgugagccagaagacgcgcgacaucuacaucucccggcgccuccugggcaccuucaccuggacccugagcgacuccgaggggcacgacaugccgggcggguacugccucacgcgguggaugcugaucgaggccgaccugaagugcuucggcaacaccgccguggccaagugcaacgagaagcacgacgaggaguucugcgacauguggcgccucuucgacuucaacaagcaggcgauccagcggcugaaggcccccgcccagaugaacauccagcugaucaacaaggccgucaacgcccucaucaacgaccagcugaugaugaagaaccaccuccgcgacaucaugugcauccccuacugcaacuacagcaaguucugguaccugaacaacaccaccacgggccggaccucccugccccgcugcuggcugaucagcaacggcuccuaccucaacgagacccacuucagcgacgacaucgagcagcaggcggacaacaugaucaccgagaugcugcagaaggaguacauggaccggcaggggaagacgccccugggccucguggaccuguucguguucuccaccagcuucuaccugaucaccaucuuccuccaccuggucaagaucccgacccaccgccacaucguggggaagcccugccccaagccccaccggcugaaccacaugggcaucugcuccugcgggcuguacaagcagccgggcgugcccguccgcuggaagcggugaggacuaguuauaagacugacuagcccgaugggccucccaacgggcccuccuccccuccuugcaccgagauuaaucaaaggcucuuuucagagccaccaaaaaaaaaaaaaaaaaaaaaaaaaaaaaaaaaaaaaaaaaaaaaaaaaaaaaaaaaaaaaaaaaaaaaaaaaaaaaaaaaaaaaaaaaaaaaaaaaaaaa

SEQ ID NO: 29484 - RNA, 1686 nt, Artificial Sequence; identical to SEQ ID NO: 29478
  mRNA product Design i-3 (hSL-A100) comprising derived and/or modified sequence from LASV(Pinneo-NIG-1969;Clade I)__AIT17836__GPCmut5 (opt1)

SEQ ID NO: 29485 - RNA, 1686 nt, Artificial Sequence
  mRNA product Design i-3 (hSL-A100) comprising derived and/or modified sequence from LASV(ISTH0009-NIG-2011;Clade II)__AIT17404__GPCmut5 (opt1)
aggagaaagcuuaccaugggccagaucaucaccuucuuccaggaggugccccacgucaucgaggaggugaugaacaucgugcugaucgcccucagccugcuggccauccucaaggggaucuacaacgucgcgaccugcggccuguucgggcugguguccuuccuccugcugugcggccgcagcugcuccacgaccuacaaggggguguacgagcuccagacccuggagcuggacauggccagccucaacaugaccaugccgcuguccugcacgaagaacaacagccaccacuacaucauggucggcaacgagaccggccuggagcucacccugaccaacacguccaucaucaaccacaaguucugcaaccugagcgacgcccacaagaagaaccucuacgaccacgcccugauguccaucaucagcaccuuccaccuguccauccccaacuucaaccaguacgaggccaugagcugcgacuucaacgggggcaagaucuccgugcaguacaaccucagccacgcguacgccguggacgccgccaaccacugcgggaccaucgcgaacggcguccugcagaccuucaugcggauggccuggggcggguccuacaucgcccuggacagcggcugcggguccugggacugcaucaugacgagcuaccaguaccucaucauccagaacaccaccugggaggaccacugccaguucucccgccccagccccaucggcuaccuggggcugcucagccagcggacccgcgacaucuacaucucccggcgccugcugggcacguucaccuggacccucagcgacuccgagggcaacgagacccccgggggcuacugccugacgcgguggaugcugaucgaggccgagcucaagugcuucgggaacaccgccguggcgaagugcaacgagaagcacgacgaggaguucugcgacaugcugcgccuguucgacuucaacaagcaggccauccggcgccucaagacccccgcccagaugagcauccagcugaucaacaaggccgugaacgcccugaucaacgaccagcucaucaugaagaaccaccuccgggacaucaugugcaucccguacugcaacuacuccaaguacugguaccugaaccacaccgucacggggaagaccagccugccccgcugcuggcugguguccaacggcagcuaccugaacgagacccacuucuccgacgacaucgagcagcaggcggacaacaugaucaccgagcuccugcagaaggaguacauggaccggcagggcaagacgccccuggggcucguggaccuguucgucuucagcaccuccuucuaccugaucagcaucuuccugcaccucaucaagaucccgacccaccgccacaucaccggcaagcccugccccaagccccaccggcugaaccacauggggaucugcuccugcggccuguacaagcacccgggggugcccgugaaguggaagcgcugaggacuaguuauaagacugacuagcccgaugggccucccaacgggcccuccuccccuccuugcaccgagauuaaucaaaggcucuuuucagagccaccaaaaaaaaaaaaaaaaaaaaaaaaaaaaaaaaaaaaaaaaaaaaaaaaaaaaaaaaaaaaaaaaaaaaaaaaaaaaaaaaaaaaaaaaaaaaaaaaaaaaa

SEQ ID NO: 29486 - RNA, 1686 nt, Artificial Sequence
  mRNA product Design i-3 (hSL-A100) comprising derived and/or modified sequence from LASV(ISTH2010-NIG-2012;Clade II)__AIT17482__GPCmut5 (opt1)
aggagaaagcuuaccaugggccagaucaucaccuucuuccaggaggugccccacgucaucgaggaggugaugaacaucgugcugaucgcccucagccugcuggccauccucaaggggaucuacaacgucgcgaccugcggccuguucgggcugguguccuuccuccugcugugcggccgcagcugcuccacgaccuacaaggggguguacgagcuccagacccuggagcuggacauggccagccucaacaugaccaugccgcuguccugcacgaagaacaacagccaccacuacaucauggucggcaacgagaccggccuggagcucacccugaccaacacguccaucaucaaccacaaguucugcaaccugagcgacgcccacaagaagaaccucuacgaccacgcccugauguccaucaucagcaccuuccaccuguccauccccaacuucaaccaguacgaggccaugagcugcgacuucaacgggggcaagaucuccgugcaguacaaccucagccacgcguacgccguggacgccgccaaccacugcgggaccaucgcgaacggcguccugcagaccuucaugcggauggccuggggcggguccuacaucgcccuggacagcggcugcggguccugggacugcaucaugacgagcuaccaguaccucaucauccagaacaucaccugggaggaccacugccaguucucccgccccagccccaucggcuaccuggggcugcucagccagcggacccgcgacaucuacaucucccggcgccugcugggcaccuucacguggacccucagcgacuccgagggcaacgagacccccgggggcuacugccugacccgguggaugcugaucgaggccgagcucaagugcuucgggaacacggccguggcgaagugcaacgagaagcacgacgaggaguucugcgacaugcugcgccuguucgacuucaacaagcaggccauccggcgccucaagacccccgcccagaugagcauccagcugaucaacaaggccgugaacgcccugaucaacgaccagcucaucaugaagaaccaccuccgggacaucaugugcauccccuacugcaacuacuccaaguacugguaccugaaccacaccgucaccgggaagacgagccugccccgcugcuggcugguguccaacggcagcuaccugaacgagacccacuucuccgacgacaucgagcagcaggcggacaacaugaucaccgagcuccugcagaaggaguacaucgaccggcagggcaagaccccgcuggggcucguggaccuguucgucuucagcacguccuucuaccugaucagcaucuuccugcaccucgugaagaucccgacccaccgccacguggucggcaagcccugccccaagccccaccggcugaaccacauggggaucugcuccugcggccuguacaagcacccgggggugcccgugaaguggaagcgcugaggacuaguuauaagacugacuagcccgaugggccucccaacgggcccuccuccccuccuugcaccgagauuaaucaaaggcucuuuucagagccaccaaaaaaaaaaaaaaaaaaaaaaaaaaaaaaaaaaaaaaaaaaaaaaaaaaaaaaaaaaaaaaaaaaaaaaaaaaaaaaaaaaaaaaaaaaaaaaaaaaaaa

SEQ ID NO: 29487 - RNA, 1686 nt, Artificial Sequence
  mRNA product Design i-3 (hSL-A100) comprising derived and/or modified sequence from LASV(Lassa virus/H.sapiens-wt/NGA/2015/ISTH_0543;Clade II)__AVO03639__GPCmut5 (opt1)
aggagaaagcuuaccaugggccagaucaucaccuucuuccaggaggugccccacgucaucgaggaggugaugaacaucgugcugaucgcccucagccugcuggccauccucaaggggaucuacaacgucgcgaccugcggccuguucgggcugguguccuuccuccugcugugcggccgcagcugcuccacgaccuacaaggggguguacgagcuccagacccuggagcuggacauggccaaccucaacaugaccaugccgcugagcugcacgaagaacaacucccaccacuacaucauggucggcaacgagaccggccuggagcucacccugaccaacacgagcaucaucaaccacaaguucugcaaccuguccgacgcccacaagaagaaccucuacgaccacgcccugaugagcaucaucuccaccuuccaccugagcauccccaacuucaaccaguacgaggccauguccugcgacuucaacgggggcaagaucagcgugcaguacaaccucucccacaccuacgcgguggacgccgccaaccacugcgggaccaucgccaacggcguccugcagacguucaugcggauggcguggggcgggagcuacaucgcccuggacuccggcugcgggagcugggacugcaucaugaccuccuaccaguaccucgugauccagaacaccaccugggaggaccacugccaguucagccgccccucccccaucggcuaccuggggcugcucagccagcggacgcgcgacaucuacaucagccggcgccugcugggcaccuucaccuggacccucuccgacagcgagggcaacgagacgcccgggggcuacugccugacccgguggaugcugaucgaggccgagcucaagugcuucgggaacaccgccguggccaagugcaacgagaagcacgacgaggaguucugcgacaugcugcgccuguucgacuucaacaagcaggcgauccggcgccucaagacccccgcccagauguccauccagcugaucaacaaggccgucaacgcccugaucaacgaccagcucaucaugaagaaccaccuccgggacaucaugugcauccccuacugcaacuacagcaaguacugguaccugaaccacacggugaccgggaagaccucccugccccgcugcuggcuggugagcaacggcuccuaccugaacgagacccacuucagcgacgacaucgagcagcaggccgacaacaugaucacggagcuccugcagaaggaguacaucgaccggcagggcaagaccccgcuggggcucgucgaccuguucguguucuccaccagcuucuaccugaucuccaucuuccugcaccucgugaagaucccgacccaccgccacaucacgggcaagcccugccccaagccccaccggcugaaccacauggggaucugcagcugcggccuguacaagcacccggggguccccgugaaguggaagcgcugaggacuaguuauaagacugacuagcccgaugggccucccaacgggcccuccuccccuccuugcaccgagauuaaucaaaggcucuuuucagagccaccaaaaaaaaaaaaaaaaaaaaaaaaaaaaaaaaaaaaaaaaaaaaaaaaaaaaaaaaaaaaaaaaaaaaaaaaaaaaaaaaaaaaaaaaaaaaaaaaaaaaa

SEQ ID NO: 29488 - RNA, 1686 nt, Artificial Sequence
  mRNA product Design i-3 (hSL-A100) comprising derived and/or modified sequence from LASV(Lassa virus/H.sapiens-wt/NGA/2016/ISTH_0009;Clade II)__AVO03571__GPCmut5 (opt1)
aggagaaagcuuaccaugggccagaucaucaccuucuuccaggaggugccccacgucaucgaggaggugaugaacaucgugcugaucgcccucagccugcuggccauccucaaggggaucuacaacgucgcgaccugcggccugcuggggcucguguccuuccugcugcucugcggccgcagcugcuccacgaccuacaaggggguguacgagcugcagacccuggagcucgacauggccagccugaacaugaccaugccgcuguccugcacgaagaacaacagccaccacuacaucauggucggcaacgagaccggccucgagcugacccugaccaacacguccaucaucaaccacaaguucugcaaccucagcgacgcccacaagaagaaccuguacgaccacgcccugauguccaucaucagcaccuuccaccucuccauccccaacuucaaccaguacgaggccaugagcugcgacuucaacgggggccggaucuccgugcaguacaaccugagccacuccuacgcgguggacgccgccaaccacugcgggaccaucgccaacggcguccugcagaccuucaugcgcauggcguggggcgggagcuacaucgcccucgacuccggcugcgggagcugggacugcaucaugacguccuaccaguaccugaucauccagaacaccaccugggaggaccacugccaguucagccggcccagccccaucggcuaccuggggcuccugucccagcgcacccgggacaucuacaucagccgccggcugcucggcacguucaccuggacccuguccgacagcgagggcaacgagacccccgggggcuacugccugacgcgcuggaugcucaucgaggccgagcugaagugcuucgggaacaccgccguggccaagugcaacgagaagcacgacgaggaguucugcgacaugcugcggcuguucgacuucaacaagcaggcgauccgccggcugaagacccccgcccagauguccauccagcugaucaacaaggccgugaacgcccucaucaacgaccagcugaucaugaagaaccaccuccgcgacaucaugugcaucccguacugcaacuacagcaaguacugguaccucaaccacaccgucacggggaagaccucccugccccggugcuggcuggugagcaacggcuccuaccucaacgagacccacuucagcgacgacaucgagcagcaggccgacaacaugaucaccgagcugcugcagaaggaguacaucgaccgccagggcaagacgccccucgggcugguggaccuguucgucuucuccaccagcuucuaccugaucuccaucuuccuccaccuggugaagaucccgacccaccggcacaucaccggcaagcccugccccaagccccaccgccugaaccacauggggaucugcagcugcggccucuacaaccacccgggggugcccgucaaguggaagcggugaggacuaguuauaagacugacuagcccgaugggccucccaacgggcccuccuccccuccuugcaccgagauuaaucaaaggcucuuuucagagccaccaaaaaaaaaaaaaaaaaaaaaaaaaaaaaaaaaaaaaaaaaaaaaaaaaaaaaaaaaaaaaaaaaaaaaaaaaaaaaaaaaaaaaaaaaaaaaaaaaaaaa

SEQ ID NO: 29489 - RNA, 1686 nt, Artificial Sequence
  mRNA product Design i-3 (hSL-A100) comprising derived and/or modified sequence from LASV(Lassa virus/H.sapiens-wt/NGA/2016/ISTH_0017;Clade II)__AVO03567__GPCmut5 (opt1)
aggagaaagcuuaccaugggccagaucaucaccuucuuccaggaggugccccacgucaucgaggaggugaugaacaucgugcugaucgcccucagccugcuggccauccucaaggggaucuacaacgucgcgaccugcggccuguucgggcugguguccuuccuccugcugugcggccgcagcugcuccacgaccuacaaggggguguacgagcuccagacccuggagcuggacauggccagccucaacaugaccaugccgcuguccugcacgaagaacaacagccaccacuacaucauggucggcaacgagaccggccuggagcucacccugaccaacacguccaucaucaaccacaaguucugcaaccugagcgacgcccacaagaagaaccucuacgaccacgcccugauguccaucaucagcaccuuccaccuguccauccccaacuucaaccaguacgaggccaugagcugcgacuucaacgggggcaagaucuccgugcaguacaaccucagccacaccuacgcgaucgacgccgccaaccacugcgggaccaucgccaacggcgugcugcagacguucaugcggauggcguggggcggguccuacaucgcccuggacagcggcugcggguccugggacugcaucaugaccagcuaccaguaccucaucauccagaacaccaccugggaggaccacugccaguucucccgccccagccccaucggcuaccuggggcugcucagccagcggacgcgcgacaucuacaucucccggcgccugcugggcaccuucaccuggacccucagcgacuccgagggcaacgagacgcccgggggcuacugccugacccgguggaugcugaucgaggccgagcucaagugcuucgggaacaccgccgucgccaagugcaacgagaagcacgacgaggaguucugcgacaugcugcgccuguucgacuucaacaagcaggcgauccggcgccucaagacccccgcccagaugagcauccagcugaucaacaaggccgugaacgcccugaucaacgaccagcucaucaugaagaaccaccuccgggacaucaugugcauccccuacugcaacuacuccaaguacugguaccugaaccacacggugaccgggaagaccagccugccccgcugcuggcuggucuccaacggcagcuaccugaacgagacccacuucuccgacgacaucgagcagcaggccgacaacaugaucacggagcuccugcagaaggaguacauggaccggcagggcaagaccccgcuggggcucguggaccuguucguguucagcaccuccuucuaccugaucagcaucuuccugcaccucguccgcaucccgacccaccggcacgugaucggcaagcccugccccaagccccaccgccugaaccacauggggaucugcuccugcggccuguacaagcacccgggggugcccgucaaguggaagcggugaggacuaguuauaagacugacuagcccgaugggccucccaacgggcccuccuccccuccuugcaccgagauuaaucaaaggcucuuuucagagccaccaaaaaaaaaaaaaaaaaaaaaaaaaaaaaaaaaaaaaaaaaaaaaaaaaaaaaaaaaaaaaaaaaaaaaaaaaaaaaaaaaaaaaaaaaaaaaaaaaaaaa

SEQ ID NO: 29490 - RNA, 1686 nt, Artificial Sequence
  mRNA product Design i-3 (hSL-A100) comprising derived and/or modified sequence from LASV(Lassa virus/H.sapiens-wt/NGA/2018/ISTH_0959;Clade II)__AVV65099__GPCmut5 (opt1)
aggagaaagcuuaccaugggccagaucaucaccuucuuccaggaggugccccacgucaucgaggaggugaugaacaucgugcugaucgcccucagccugcuggccauccucaaggggaucuacaacgucgugaccugcggccuguucgggcugguguccuuccuccugcugugcggccgcagcugcuccacgaccuacaagggggucuacgagcuccagacccuggagcuggacauggcgagccucaacaugaccaugccgcuguccugcacgaagaacaacagccaccacuacaucauggugggcaacgagaccggccuggagcucacccugaccaacacguccaucaucaaccacaaguucugcaaccugagcgacgcccacaagaagaaccucuacgaccacgcccugauguccaucaucagcaccuuccaccuguccauccccaacuucaaccaguacgaggccaugagcugcgacuucaacgggggcaagaucuccgugcaguacaaccucagccacgccuacgcgaucgacgccgccaaccacugcgggaccaucgccaacggcguccugcagaccuucaugcggauggcguggggcggguccuacaucgcccuggacagcggcugcggguccugggacugcaucaugacgagcuaccaguaccucaucauccagaacaccaccugggaggaccacugccaguucucccgccccagccccaucggcuaccuggggcugcucagccagcggacccgcgacaucuacaucucccggcgccugcugggcacguucaccuggacccucagcgacuccgagggcaacgagacccccgggggcuacugccugacgcgguggaugcugaucgaggccgagcucaagugcuucgggaacaccgccguggccaagugcaacgagaagcacgacgaggaguucugcgacaugcugcgccuguucgacuucaacaagcaggcgauccggcgccucaagacccccgcccagaugagcauccagcugaucaacaaggccgugaacgcccugaucaacgaccagcucaucaugaagaaccaccuccgggacaucaugugcaucccguacugcaacuacuccaaguacugguaccugaaccacaccgucacggggaagaccagccugccccgcugcuggcugguguccaacggcagcuaccugaacgagacccacuucuccgacgacaucgagcagcaggccgacaacaugaucaccgagcuccugcagaaggaguacaucgaccggcagggcaagacgccccuggggcucguggaccuguucgucuucagcaccuccuucuaccugaucagcaucuuccugcaccucgugaagaucccgacccaccgccacgugaucggcaagcccugccccaagccccaccggcugaaccacauggggaucugcuccugcggccuguacaagcacccggggguccccgugaaguggaagcgcugaggacuaguuauaagacugacuagcccgaugggccucccaacgggcccuccuccccuccuugcaccgagauuaaucaaaggcucuuuucagagccaccaaaaaaaaaaaaaaaaaaaaaaaaaaaaaaaaaaaaaaaaaaaaaaaaaaaaaaaaaaaaaaaaaaaaaaaaaaaaaaaaaaaaaaaaaaaaaaaaaaaaa

SEQ ID NO: 29491 - RNA, 1686 nt, Artificial Sequence
  mRNA product Design i-3 (hSL-A100) comprising derived and/or modified sequence from LASV(LASV003-NIG-2008;Clade II)__AIT17580__GPCmut5 (opt1)
aggagaaagcuuaccaugggccagaucaucaccuucuuccaggaggugccccacgucaucgaggaggugaugaacaucgugcugaucgcccucagccugcuggccauccucaaggggaucuacaacgucgcgaccugcggccuguucgggcugguguccuuccuccugcugugcggccgcagcugcuccacgaccuacaaggggguguacgagcuccagacccuggagcuggacauggccagccucaacaugaccaugccgcuguccugcacgaagaacaacagccaccacuacaucauggucggcaacgagaccggccuggagcucacccugaccaacacguccaucaucaaccacaaguucugcaaccugagcgacgcccacaagaagaaccucuacgaccacgcccugauguccaucaucagcaccuuccaccuguccauccccaacuucaaccaguacgaggccaugagcugcgacuucaacgggggcaagaucuccgugcaguacaaccucagccacaccuacgcgguggacgccgccaaccacugcgggaccaucgccaacggcguccugcagacguucaugcggauggcguggggcggguccuacaucgcccuggacagcggcugcggguccugggacugcaucaugaccagcuaccaguaccucaucauccagaacaccaccugggaggaccacugccaguucucccgccccagccccaucggcuaccuggggcugcucagccagcggacgcgcgacaucuacaucucccggcgccugcugggcaccuucaccuggacccucagcgacuccgagagcaacgagacgccgggcggguacugccugacccgguggaugcugaucgaggccgagcucaagugcuucggcaacaccgccguggccaagugcaacgagaagcacgacgaggaguucugcgacaugcugcgccuguucgacuucaacaagcaggcgauccggcgccucaaggcccccgcccagauguccauccagcugaucaacaaggccgugaacgcccugaucaacgaccagcucaucaugaagaaccaccuccgggacaucaugugcauccccuacugcaacuacagcaaguacugguaccugaaccacaccgucacgggccgcaccucccugccccggugcuggcuggugagcaacggguccuaccugaacgagacccacuucagcgacgacaucgagcagcaggcggacaacaugaucaccgagcuccugcagaaggaguacauggaccgccagggcaagacgccccugggccucguggaccuguucgucuucuccaccagcuucuaccugaucuccaucuuccugcaccucgugaagaucccgacccaccggcacgugaucgggaagcccugccccaagccccaccgccugaaccacaugggcaucugcagcugcgggcuguacaagcacccgggcguccccgugaaguggaagcggugaggacuaguuauaagacugacuagcccgaugggccucccaacgggcccuccuccccuccuugcaccgagauuaaucaaaggcucuuuucagagccaccaaaaaaaaaaaaaaaaaaaaaaaaaaaaaaaaaaaaaaaaaaaaaaaaaaaaaaaaaaaaaaaaaaaaaaaaaaaaaaaaaaaaaaaaaaaaaaaaaaaaa

SEQ ID NO: 29492 - RNA, 1686 nt, Artificial Sequence
  mRNA product Design i-3 (hSL-A100) comprising derived and/or modified sequence from LASV(LASV035-NIG-2009;Clade II)__AIT17588__GPCmut5 (opt1)
aggagaaagcuuaccaugggccagaucaucaccuucuuccaggaggugccccacgucaucgaggaggugaugaacaucgugcugaucgcccucagccugcuggccauccucaaggggaucuacaacgucgcgaccugcggccuguucgggcugguguccuuccuccugcugugcggccgcagcugcuccacgaccuacaaggggguguacgagcuccagacccuggagcuggacauggccagccucaacaugaccaugccgcuguccugcacgaagaacaacagccaccacuacaucauggucggcaacgagaccggccuggagcucacccugaccaacacguccaucaucaaccacaaguucugcaaccugagcgacgcccacaagaagaaccucuacgaccacgcccugauguccaucaucagcaccuuccaccuguccauccccaacuucaaccaguacgaggccaugagcugcgacuucaacgggggcaagaucuccgugcaguacaaccucagccacgcguacgccguggacgccgccaaccacugcgggaccaucgcgaacggcguccugcagaccuucaugcggauggccuggggcggguccuacaucgcccuggacagcggcugcggguccugggacugcaucaugacgagcuaccaguaccucaucauccagaacaccaccugggaggaccacugccaguucucccgccccagccccaucggcuaccuggggcugcucagccagcggacccgcgacaucuacaucucccggcgccugcugggcacguucaccuggacccucagcgacuccgagggcaacgagacccccgggggcuacugccugacgcgguggaugcugaucgaggccgagcucaagugcuucgggaacaccgccguggcgaagugcaacgagaagcacgacgaggaguucugcgacaugcugcgccuguucgacuucaacaagcaggccauccggcgccucaaggcccccgcccagaugagcauccagcugaucaacaaggccgugaacgcgcugaucaacgaccagcucaucaugaagaaccaccuccgggacaucaugugcauccccuacugcaacuacuccaaguacugguaccugaaccacaccgucaccgggaagacgagccugccccgcugcuggcugguguccaacggcagcuaccugaacgagacccacuucuccgacgacaucgagcagcaggccgacaacaugaucaccgagcuccugcagaaggaguacaucgaccggcagggcaagaccccgcuggggcucguggaccuguucgucuucagcacguccuucuaccugaucagcaucuuccugcaccucgugaagaucccgacccaccgccacgugaucggcaagcccugccccaagccccaccggcugaaccacauggggaucugcuccugcggccuguacaagcacccggggguccccgugaaguggaagcgcugaggacuaguuauaagacugacuagcccgaugggccucccaacgggcccuccuccccuccuugcaccgagauuaaucaaaggcucuuuucagagccaccaaaaaaaaaaaaaaaaaaaaaaaaaaaaaaaaaaaaaaaaaaaaaaaaaaaaaaaaaaaaaaaaaaaaaaaaaaaaaaaaaaaaaaaaaaaaaaaaaaaaa

SEQ ID NO: 29493 - RNA, 1686 nt, Artificial Sequence
  mRNA product Design i-3 (hSL-A100) comprising derived and/or modified sequence from LASV(LASV1000-NIG-2009;Clade II)__AIT17782__GPCmut5 (opt1)
aggagaaagcuuaccaugggccagaucaucaccuucuuccaggaggugccccacgucaucgaggaggugaugaacaucgugcugaucgcccucagccugcuggccauccucaaggggaucuacaacgucgcgaccugcggccuguucgggcugguguccuuccuccugcugugcggccgcagcugcuccacgaccuacaaggggguguacgagcuccagacccuggagcuggacauggccagccucaacaugaccaugccgcuguccugcacgaagaacaacagccaccacuacaucauggucggcaacgagaccggccuggagcucacccugaccaacacguccaucaucaaccacaaguucugcaaccugagcgacgcccacaagaagaaccucuacgaccacgcccugauguccaucaucagcaccuuccaccuguccauccccaacuucaaccaguacgaggccaugagcugcgacuucaacgggggcaagaucuccgugcaguacaaccucagccacaccuacgcgguggacgccgccaaccacugcgggaccaucgccaacggcguccugcagacguucaugcggauggcguggggcggguccuacaucgcccuggacagcggcugcggguccugggacugcaucaugaccagcuaccaguaccucaucauccagaacaccaccugggaggaccacugccaguucucccgccccagccccaucggcuaccuggggcugcucagccagcggacgcgcgacaucuacaucucccggcgccugcugggcaccuucaccuggacccucagcgacuccgagggcaacgagacgcccgggggcuacugccugacccgguggaugcugaucgaggccgagcucaagugcuucgggaacaccgccguggccaagugcaacgagaagcacgacgaggaguucugcgacaugcugcgccuguucgacuucaacaagcaggcgaucaagcggcucaagacccccgcccagaugagcauccagcugaucaacaaggccgugaacgcccugaucaacgaccagcucaucaugaagaaccaccuccgcgacaucaugugcauccccuacugcaacuacuccaaguacugguaccugaaccacacggucaccgggaagaccagccugccccggugcuggcugguguccaacggcagcuaccugaacgagacccacuucuccgacgacaucgagcagcaggccgacaacaugaucacggagcuccugcagaaggaguacaucgaccgccagggcaagaccccgcuggggcucguggaccuguucgucuucagcaccuccuucuaccugaucagcaucuuccugcaccucgugaagaucccgacccaccggcacguggucggcaagcccugccccaagccccaccgccugaaccacauggggaucugcuccugcggccuguacaagcacccgggggugcccgugaaguggaagcggugaggacuaguuauaagacugacuagcccgaugggccucccaacgggcccuccuccccuccuugcaccgagauuaaucaaaggcucuuuucagagccaccaaaaaaaaaaaaaaaaaaaaaaaaaaaaaaaaaaaaaaaaaaaaaaaaaaaaaaaaaaaaaaaaaaaaaaaaaaaaaaaaaaaaaaaaaaaaaaaaaaaaa

SEQ ID NO: 29494 - RNA, 1686 nt, Artificial Sequence
  mRNA product Design i-3 (hSL-A100) comprising derived and/or modified sequence from LASV(LASV221-NIG-2010;Clade II)__AIT17624__GPCmut5 (opt1)
aggagaaagcuuaccaugggccagaucaucaccuucuuccaggaggugccccacgucaucgaggaggugaugaacaucgugcugaucgcccucagccugcuggccauccucaaggggaucuacaacgucgcgaccugcggccuguucgggcugguguccuuccuccugcugugcggccgcagcugcuccacgaccuacaaggggguguacgagcuccagacccuggagcuggacauggccagccucaacaugaccaugccgcuguccugcacgaagaacaacagccaccacuacaucauggucggcaacgagaccggccuggagcucacccugaccaacacguccaucaucaaccacaaguucugcaaccugagcgacgcccacaagaagaaccucuacgaccacgcccugauguccaucaucagcaccuuccaccuguccauccccaacuucaaccaguacgaggccaugagcugcgacuucaacgggggcaagaucuccgugcaguacaaccucagccacaccuacgcgaucgacgccgccaaccacugcgggaccaucgccaacggcgugcugcagacguucaugcggauggcguggggcggguccuacaucgcccuggacagcggcugcggguccugggacugcaucaugaccagcuaccaguaccucaucauccagaacaccaccugggaggaccacugccaguucucccgccccagccccaucggcuaccuggggcugcucagccagcggacgcgcgacaucuacaucucccggcgccugcugggcaccuucaccuggacccucagcgacuccgagggcaacgagacgcccgggggcuacugccugacccgguggaugcugaucgaggccgagcucaagugcuucgggaacaccgccgucgccaagugcaacgagaagcacgacgaggaguucugcgacaugcugcgccuguucgacuucaacaagcaggcgauccggcgccucaagacccccgcccagaugagcauccagcugaucaacaaggccgugaacgcccugaucaacgaccagcucaucaugaagaaccaccuccgggacaucaugugcauccccuacugcaacuacuccaaguacugguaccugaaccacacggugaccgggaagaccagccugccccgcugcuggcuggucuccaacggcagcuaccugaacgagacccacuucuccgacgacaucgagcagcaggccgacaacaugaucacggagaugcuccagaaggaguacauggaccggcagggcaagaccccgcuggggcugguggaccucuucguguucagcaccuccuucuaccugaucagcaucuuccugcaccuggucaagaucccgacccaccgccacgugaucggcaagcccugccccaagccccaccggcucaaccacauggggaucugcuccugcggccuguacaagcacccgggggugcccgucaaguggaagcgcugaggacuaguuauaagacugacuagcccgaugggccucccaacgggcccuccuccccuccuugcaccgagauuaaucaaaggcucuuuucagagccaccaaaaaaaaaaaaaaaaaaaaaaaaaaaaaaaaaaaaaaaaaaaaaaaaaaaaaaaaaaaaaaaaaaaaaaaaaaaaaaaaaaaaaaaaaaaaaaaaaaaaa

SEQ ID NO: 29495 - RNA, 1686 nt, Artificial Sequence
  mRNA product Design i-3 (hSL-A100) comprising derived and/or modified sequence from LASV(LASV237-NIG-2010;Clade II)__AIT17638__GPCmut5 (opt1)
aggagaaagcuuaccaugggccagaucaucaccuucuuccaggaggugccccacgucaucgaggaggugaugaacaucgugcugaucgcccucagccugcuggccauccucaaggggaucuacaacgucgcgaccugcggccuguucgggcugguguccuuccuccugcugugcggccgcagcugcuccacgaccuacaaggggguguacgagcuccagacccuggagcuggacauggccagccucaacaugaccaugccgcuguccugcacgaagaacaacagccaccacuacaucauggucggcaacgagaccggccuggagcucacccugaccaacacguccaucaucaaccacaaguucugcaaccugagcgacgcccacaagaaggaccucuacgaccacgcccugauguccaucaucagcaccuuccaccuguccauccccaacuucaaccaguacgaggccaugagcugcgacuucaacgggggcaagaucuccgugcaguacaaccucagccacaccuacgcgguggacgccgccaaccacugcgggaccaucgccaacggcguccugcagacguucaugcggauggcguggggcggguccuacaucgcccuggacagcggcugcggguccugggacugcaucaugaccagcuaccaguaccucaucauccagaacaccaccugggaggaccacugccaguucucccgccccagccccaucggcuaccuggggcugcucagccagcggacgcgcgacaucuacaucucccggcgccugcugggcaccuucaccuggacccucagcgacuccgagggcaacgagacgcccgggggcuacugccugacccgguggaugcugaucgaggccgagcucaagugcuucgggaacaccgccguggccaagugcaacgagaagcacgacgaggaguucugcgacaugcugcgccuguucgacuucaacaagcaggcgauccggcgccucaagacccccgcccagaugagcauccagcugaucaacaaggccgugaacgcccugaucaacgaccagcucaucaugaagaaccaccuccgggacaucaugugcauccccuacugcaacuacuccaaguacugguaccugaaccacacggucaccgggaagaccagccugccccgcugcuggcugguguccaacggcagcuaccugaacgagacccacuucuccgacgacaucgagcagcaggccgacaacaugaucacggagcuccugcagaaggaguacauggaccggcagggcaagaccccgcuggggcucguggaccuguucgucuucagcaccuccuucuaccugaucagcaucuuccugcaccucaucaagaucccgacccaccgccacaucacgggcaagcccugccccaagccccaccggcugaaccacauggggaucugcuccugcggccuguacaagcacccgggggugcccgugaaguggaagcgcugaggacuaguuauaagacugacuagcccgaugggccucccaacgggcccuccuccccuccuugcaccgagauuaaucaaaggcucuuuucagagccaccaaaaaaaaaaaaaaaaaaaaaaaaaaaaaaaaaaaaaaaaaaaaaaaaaaaaaaaaaaaaaaaaaaaaaaaaaaaaaaaaaaaaaaaaaaaaaaaaaaaaa

SEQ ID NO: 29496 - RNA, 1686 nt, Artificial Sequence
  mRNA product Design i-3 (hSL-A100) comprising derived and/or modified sequence from LASV(LASV253-NIG-2011;Clade II)__AIT17670__GPCmut5 (opt1)
aggagaaagcuuaccaugggccagaucaucaccuucuuccaggaggugccccacgucaucgaggaggugaugaacaucgugcugaucgcccucagccugcuggccauccucaaggggaucuacaacgucgcgaccugcggccuguucgggcugguguccuuccuccugcugugcggccgcagcugcuccacgaccuacaaggggguguacgagcuccagacccuggagcuggacauggccagccucaacaugaccaugccgcuguccugcacgaagaacaacagccaccacuacaucauggucggcaacgagaccggccuggagcucacccugaccaacacguccaucaucaaccacaaguucugcaaccugagcgacgcccacaagaagaaccucuacgaccacgcccugauguccaucaucagcaccuuccaccuguccauccccaacuucaaccaguacgaggccaugagcugcgacuucaacgggggcaagaucuccgugcaguacaaccucagccacaccuacgcgguggacgccgccaaccacugcgggaccaucgccaacggcguccugcagacguucaugcggauggcguggggcggguccuacaucgcccuggacagcggcugcggguccugggacugcaucaugaccagcuaccaguaccucaucauccagaacaccaccugggaggaccacugccaguucucccgccccagccccaucggcuaccuggggcugcucagccagcggacgcgcgacaucuacaucucccggcgccugcugggcaccuucaccuggacccucagcgacuccgagggcaacgagacgcccgggggcuacugccugacccgguggaugcugaucgaggccgagcucaagugcuucgggaacaccgccguggccaagugcaacgagaagcacgacgaggaguucugcgacaugcugcgccuguucgacuucaacaagcaggcgauccggcgccucaaggcccccgcccagaugagcauccagcugaucaacaaggccgugaacgcccugaucaacgaccagcucaucaugaagaaccaccuccgggacaucaugugcaucccguacugcaacuacuccaaguacugguaccugaaccacaccgucacggggcgcaccagccugccccggugcuggcugguguccaacggcagcuaccugaacgagacccacuucuccgacgacaucgagcagcaggcggacaacaugaucaccgagcuccugcagaaggaguacaucgaccgccagggcaagacgccccuggggcucguggaccuguucgucuucagcaccuccuucuaccugaucagcaucuuccugcaccucgugaagaucccgacccaccggcacaucaucggcaagcccugccccaagccccaccgccugaaccacauggggaucugcuccugcggccuguacaagcacccgggggugcccgucaaguggaagcggugaggacuaguuauaagacugacuagcccgaugggccucccaacgggcccuccuccccuccuugcaccgagauuaaucaaaggcucuuuucagagccaccaaaaaaaaaaaaaaaaaaaaaaaaaaaaaaaaaaaaaaaaaaaaaaaaaaaaaaaaaaaaaaaaaaaaaaaaaaaaaaaaaaaaaaaaaaaaaaaaaaaaa

SEQ ID NO: 29497 - RNA, 1686 nt, Artificial Sequence
  mRNA product Design i-3 (hSL-A100) comprising derived and/or modified sequence from LASV(LASV254-NIG-2011;Clade II)__AIT17674__GPCmut5 (opt1)
aggagaaagcuuaccaugggccagaucaucaccuucuuccaggaggugccccacgucaucgaggaggugaugaacaucgugcugaucgcccucagccugcuggccauccucaaggggaucuacaacgucgcgaccugcggccuguucgggcugguguccuuccuccugcugugcggccgcagcugcuccacgaccuacaaggggguguacgagcuccagacccuggagcuggacaugaccaaccucaacaugacgaugccgcugagcugcaccaagaacaacucccaccacuacaucauggucggcaacgagaccggccuggagcucacccugacgaacaccagcaucaucaaccacaaguucugcaaccuguccgacgcccacaagaagaaccucuacaaccacgcccugaugagcaucaucuccaccuuccaccugagcauccccaacuucaaccaguacgaggccauguccugcgacuucaacgggggcaagaucagcgugcaguacaaccucucccacagcuacgccguggacgcggccaaccacugcgggaccaucgccaacggcguccugcagacguucaugcggauggccuggggcggguccuacaucgcgcuggacagcggcugcgggaacugggacugcaucaugaccuccuaccaguaccucaucauccagaacaccaccugggaggaccacugccaguucagccgccccucccccaucggcuaccuggggcugcucagccagcggacgcgcgacaucuacaucagccggcgccugcugggcaccuucaccuggacccucuccgacagcgagggcaacgagacgcccgggggcuacugccugacccgguggaugcugaucgaggccgagcucaagugcuucgggaacaccgccguggccaagugcaacgagaagcacgacgaggaguucugcgacaugcugcgccuguucgacuucaacaagcaggccauccggcgccucaagacccccgcgcaggccaacauccagcugaucaacaaggccgugaacgcccugaucaacgaccagcucaucaugaagaaccaccuccgggacaucaugugcauccccuacugcaacuacuccaaguacugguaccugaaccacacggucaccgggaagaccagccugccccgcugcuggcugguguccaacggcagcuaccugaacgagacccacuucuccgacgacaucgagcagcaggccgacaacaugaucacggagcuccugcagaaggaguacauggaccggcagggcaagaccccgcuggggcucguggaccuguucgucuucagcaccuccuucuaccugaucagcaucuuccugcaccucgugaagaucccgacccaccgccacgugaucggcaagcccugccccaagccccaccggcugaaccacauggggaucugcuccugcggccuguacaagcacccggggguccccgugaaguggaagcgcugaggacuaguuauaagacugacuagcccgaugggccucccaacgggcccuccuccccuccuugcaccgagauuaaucaaaggcucuuuucagagccaccaaaaaaaaaaaaaaaaaaaaaaaaaaaaaaaaaaaaaaaaaaaaaaaaaaaaaaaaaaaaaaaaaaaaaaaaaaaaaaaaaaaaaaaaaaaaaaaaaaaaa

SEQ ID NO: 29498 - RNA, 1686 nt, Artificial Sequence
  mRNA product Design i-3 (hSL-A100) comprising derived and/or modified sequence from LASV(Nig08-A19;Clade III)__ADU56618__GPCmut5 (opt1)
aggagaaagcuuaccaugggccagaucgugaccuucuuccaggaggucccccacgugaucgaggaggugaugaacaucguccugaucgcccucagcauccuggccauccugaaggggcucuacaacaucgcgaccugcggccugaucgggcuggugacguuccuccugcuguccggccgcagcugcuccaugaccuacaaggggguguacgagcuccagacccuggagcugaacaugaacacccucaacaugacgaugccgcugagcugcaccaagaacaacucccaccacuacaucauggucggcaacgagaccggccuggagcucacccugacgaacaccagccugcuccaccacaaguucugcaaccuguccgacgcccacaagaagaaccuguacgaccacacccucaugagcaucaucuccaccuuccaccugagcauccccaacuucaaccaguacgaggccauguccugcgacuucaacgggggcaagaucacggugcaguacaaccugagccacuccuacgccaucgacgccgcgaaccacugcgggaccguggccaacggcguccuccagaccuucaugcggauggccuggggcgggagcuacaucgcccuggacuccggcugcgggaagugggacugcaucaugaccagcuaccaguaccugaucauccagaacacgaccugggaggaccacugccaguucucccggcccagccccaucggcuaccucgggcugcugucccagcgcacccgggacaucuacaucagccgccggcuccugggcaccuucacguggacccugagcgacuccgagggcaacgagacccccgggggcuacugccucacccgcuggaugcugaucgaggcggagcugaagugcuucgggaacacggccguggccaagugcaacgagaagcacgacgaggaguucugcgacaugcuccggcuguucgacuucaacaagcaggccauccgccggcugaaggcccccgcgcagaugagcauccagcucaucaacaaggccgugaacgcccugaucaacgaccagcugaucaugaagaaccaccuccgcgacaucaugugcauccccuacugcaacuacuccaaguacugguaccugaaccacaccagcaccgggcggaccucccugccccgcugcuggcucgucagcaacggcuccuaccugaacgagacgcacuucagcgacgacaucgagcagcaggccgacaacaugaucaccgagaugcugcagaaggaguaccucgaccggcagggcaagaccccgcuggggcugguggaccuguucguguucuccaccagcuucuaccucaucuccaucuuccugcaccuggucaagaucccgacgcaccgccacaucgugggcaagcccugccccaagccccaccggcucaaccacauggggaucugcagcugcggccuguacaagcagccgggggugcccguccgcuggaagcggugaggacuaguuauaagacugacuagcccgaugggccucccaacgggcccuccuccccuccuugcaccgagauuaaucaaaggcucuuuucagagccaccaaaaaaaaaaaaaaaaaaaaaaaaaaaaaaaaaaaaaaaaaaaaaaaaaaaaaaaaaaaaaaaaaaaaaaaaaaaaaaaaaaaaaaaaaaaaaaaaaaaaa

SEQ ID NO: 29499 - RNA, 1689 nt, Artificial Sequence
  mRNA product Design i-3 (hSL-A100) comprising derived and/or modified sequence from LASV(G1180-SLE-2010;Clade IV)__AIT17168__GPCmut5 (opt1)
aggagaaagcuuaccaugggccagaucgugaccuucuuccaggaggucccccacgugaucgaggaggugaugaacaucguccugaucgcccucagcauccuggccgugcugaaggggcucuacaacuucgcgaccugcggccugguggggcugcucaccuuccugcugcucugcggccgcuccugcaccgccagccgguacaagggggucuacgagcugcagacccuggagcucaacauggagacccugaacaugacgaugccgcuguccugcaccaagaacaacagccaccacuacaucauggugggcaacgagaccggccucgagcugacccugacgaacaccuccaucaucaaccacaaguucugcaaccucagcgacgcccacaagaagaaccuguacgaccacgcccugauguccaucaucagcaccuuccaccucuccauccccaacuucaaccaguacgaggccaugagcugcgacuucaacgggggcaagaucuccgugcaguacaaccugagccacuccuacgcgggggacgccgccaaccacugcggcaccgucgccaacggggugcugcagacguucaugcgcauggcguggggcggcagcuacaucgcccucgacuccgggugcggcagcugggacugcaucaugaccuccuaccaguaccugaucauccagaacaccaccugggaggaccacugccaguucagccggcccucccccaucggguaccugggccuccugagccagcgcacgcgggacaucuacaucagccgccggcugcucggcaccuucaccuggacccuguccgacagcgaggggaaggacacgccgggcggguacugccugacccgcuggaugcucaucgaggccgagcugaagugcuucggcaacaccgccguggccaagugcaacgagaagcacgacgaggaguucugcgacaugcugcggcuguucgacuucaacaagcaggcgauccagcgccugaaggcccccgcccagauguccauccagcugaucaacaaggccgucaacgcccucaucaacgaccagcugaucaugaagaaccaccuccgggacaucaugugcauccccuacugcaacuacagcaaguacugguaccucaaccacaccacgaccggcaagaccucccugcccaagugcuggcuggugagcaacggcuccuaccucaacgagacccacuucagcgacgacaucgagcagcaggcggacaacaugaucacggagaugcugcagaaggaguacauggagcgccaggggaagacgccccugggccucguggaccuguucgucuucuccaccagcuucuaccugaucuccaucuuccugcaccucgugaagaucccgacccaccggcacaucgugggcaagagcugccccaagccccaccgccugaaccacauggggaucugcuccugcgggcuguacaagcagcccggcgucccggugaaguggaagcggugaggacuaguuauaagacugacuagcccgaugggccucccaacgggcccuccuccccuccuugcaccgagauuaaucaaaggcucuuuucagagccaccaaaaaaaaaaaaaaaaaaaaaaaaaaaaaaaaaaaaaaaaaaaaaaaaaaaaaaaaaaaaaaaaaaaaaaaaaaaaaaaaaaaaaaaaaaaaaaaaaaaaa

SEQ ID NO: 29500 - RNA, 1689 nt, Artificial Sequence
  mRNA product Design i-3 (hSL-A100) comprising derived and/or modified sequence from LASV(G1442-SLE-2011;Clade IV)__AIT17180__GPCmut5 (opt1)
aggagaaagcuuaccaugggccagaucgugaccuucuuccaggaggucccccacgugaucgaggaggugaugaacaucguccugaucgcccucagcauccuggccgugcugaaggggcucuacaacguggcgaccugcggccugaucgggcuggucacguuccuccugcugugcggccgcuccugcaccaccacccucuacaaggggguguacgagcugcagacgcuggagcucaacauggagacccugaacaugaccaugccgcugagcugcaccaagaacaacucccaccacuacauccgggugggcaacgagacgggccucgagcugacccugaccaacaccagcaucaucaaccacaaguucugcaaccucuccgacgcccacaagaagaaccuguacgaccacgcccugaugagcaucaucuccacguuccaccucagcauccccaacuucaaccaguacgaggccauguccugcgacuucaacgggggcaagaucagcguccaguacaaccugucccacagcuacgccggggacgcggccaaccacugcggcaccguggccaacggggugcugcagaccuucaugcgcauggccuggggcggcuccuacaucgcgcucgacagcgggugcggcaacugggacugcaucaugaccuccuaccaguaccugaucauccagaacacgaccugggacgaccacugccaguucagccgccccucccccaucggguaccugggccuccugagccagcggacccgcgacgucuacaucucccggcgccugcucggcaccuucacguggacccugagcgacagcgaggggaaggacaccccgggcggguacugccugacccgguggaugcucaucgaggccgagcugaagugcuucggcaacacggccguggccaagugcaacgagaagcacgacgaggaguucugcgacaugcugcgccucuucgacuucaacaagcaggccauccagcggcugaaggcgcccgcccagauguccauccagcugaucaacaaggccgugaacgcccucaucaacgaccagcugaucaugaagaaccaccuccgcgacaucaugugcauccccuacugcaacuacagcaaguacugguaccugaacaacaccgccaccggcaagaccucccugcccaagugcuggcugaucagcaacggcuccuaccucaacgagacgcacuucagcgacgacaucgagcaggaggcggacaacaugaucaccgagaugcugcagaaggaguacauggagcggcaggggaagacgccccugggccucgucgaccuguucguguucuccaccagcuucuaccugaucuccaucuuccugcaccucgugaagaucccgacccaccgccacaucgucggcaagagcugccccaagccccaccggcugaaccacauggggaucugcuccugcgggcuguacaagcagcccggcgugccggugcgcuggaagcggugaggacuaguuauaagacugacuagcccgaugggccucccaacgggcccuccuccccuccuugcaccgagauuaaucaaaggcucuuuucagagccaccaaaaaaaaaaaaaaaaaaaaaaaaaaaaaaaaaaaaaaaaaaaaaaaaaaaaaaaaaaaaaaaaaaaaaaaaaaaaaaaaaaaaaaaaaaaaaaaaaaaaa

SEQ ID NO: 29501 - RNA, 1689 nt, Artificial Sequence
  mRNA product Design i-3 (hSL-A100) comprising derived and/or modified sequence from LASV(G3010-SLE-2013;Clade IV)__AIT17344__GPCmut5 (opt1)
aggagaaagcuuaccaugggccagaucgugaccuucuuccaggaggucccccacgugaucgaggaggugaugaacaucguccugaucgcccucagcauccuggccgugcugaaggggcucuacaacuucgcgaccugcggccugguggggcuggucacguuccuccugcugugcggccgcuccugcaccaccagccucuacaaggggguguacgagcugcagacccuggagcucaacauggagacgcugaacaugaccaugccgcuguccugcaccaagaacaacagccaccacuacaucauggugggcaacgagaccggccucgagcugacgcugaccaacaccuccaucaucaaccacaaguucugcaaccucagcgacgcccacaagaagaaccuguacaaccacgcccugauguccaucaucagcaccuuccaccucuccauccccaacuucaaccaguacgaggccaugagcugcgacuucaacgggggcaagaucuccguccaguacaaccugagccacuccuacgccggggacgcggccagccacugcggcacgguggccaacggggugcugcagaccuucaugcggauggccuggggcggcuccuacaucgcgcucgacagcgggugcggcaagugggacugcaucaugaccuccuaccaguaccugaucauccagaacaccacgugggaggaccacugccaguucagccgccccucccccaucggguaccugggccuccugagccagcggacccgcgacaucuacaucagccggcgccugcucggcaccuucaccuggacgcuguccgacagcgaggggaaggacaccccgggcggguacugccugacccgguggaugcucaucgaggccgagcugaagugcuucggcaacaccgccgucgccaagugcaacgagaagcacgacgaggaguucugcgacaugcugcgccucuucgacuucaacaagcaggccauccagcggcugaagacgcccgcgcagauguccauccagcugaucaacaaggccgugaacgcccucaucaacgaccagcugaucaugaagaaccaccuccgcgacaucaugugcauccccuacugcaacuacagcaaguacugguaccugaaccacaccaccaccggcaagacgucccugcccaagugcuggcuggugagcaacggcuccuaccucaacgagacccacuucagcgacgacaucgagcagcaggccgacaacaugaucaccgagaugcugcagaaggaguacauggagcggcaggggaagacgccccugggccucgucgaccuguucguguucuccaccagcuucuaccugaucuccaucuuccugcaccucgugaagaucccgacccaccgccacaucgucggcaagagcugccccaagccccaccggcugaaccacauggggaucugcuccugcgggcuguacaagcagcccggcgugccggugcgcuggaagcggugaggacuaguuauaagacugacuagcccgaugggccucccaacgggcccuccuccccuccuugcaccgagauuaaucaaaggcucuuuucagagccaccaaaaaaaaaaaaaaaaaaaaaaaaaaaaaaaaaaaaaaaaaaaaaaaaaaaaaaaaaaaaaaaaaaaaaaaaaaaaaaaaaaaaaaaaaaaaaaaaaaaaa

SEQ ID NO: 29502 - RNA, 1689 nt, Artificial Sequence
  mRNA product Design i-3 (hSL-A100) comprising derived and/or modified sequence from LASV(G502-SLE-2009;Clade IV)__AIT17126__GPCmut5 (opt1)
aggagaaagcuuaccaugggccagaucgugaccuucuuccaggaggucccccacgugaucgaggaggugaugaacaucguccugaucgcccucagcauccuggccgugcugaaggggcucuacaacuucgcgaccugcggccugguggggcugcucacguuccugcugcucugcggccgcuccugcaccaccgggcuguacaagggcgucuacgagcugcagacccucgagcugaacauggagacgcugaacaugaccaugccgcucagcugcaccaagaacaacucccaccacuacaucauggugggcaacgagaccgggcuggagcugacgcucaccaacaccagcaucaucaaccacaaguucugcaaccuguccgacgcccacaagaagaaccuguacgaccacgcccucaugagcaucaucuccaccuuccaccugagcauccccaacuucaaccaguacgaggccauguccugcgacuucaacggcgggaagaucagcgugcaguacaaccugucccacagcuacgccggcgacgcggccgaccacugcgggacggucgccaacggcgugcuccagaccuucaugcggauggccuggggcggguccuacaucgcgcuggacagcggcugcgggcggugggacugcaucaugaccuccuaccaguaccugaucauccagaacaccacgugggaggaccacugccaguucagccgccccucccccaucggcuaccucggccugcugagccagcggacccgcgacaucuacaucucccggcgccuccuggggaccuucaccuggacgcugagcgacagcgagggcaaggacacccccgggggcuacugccucacccgguggaugcugaucgaggccgagcugaagugcuucgggaacaccgccguggccaagugcaacgagaagcacgacgaggaguucugcgacaugcuccgccuguucgacuucaacaagcaggccauccagcggcugaaggcgcccgcccagauguccauccagcucaucaacaaggccgucaacgcccugaucaacgaccagcuggugaugaagaaccaccuccgcgacaucaugugcauccccuacugcaacuacagccgguacugguaccugaaccacacgaccaccggccgcaccucccugcccaagugcuggcucgugagcaacggguccuaccugaacgagacgcacuucagcgacgacaucgagcagcaggccgacaacaugaucaccgagaugcugcagaaggaguacauggagcggcagggcaagaccccgcucgggcuggucgaccuguucguguucuccaccagcuucuaccugaucuccaucuuccuccaccuggugaagaucccgacgcaccgccacaucgucggcaagagcugccccaagccccaccggcugaaccacauggggaucugcuccugcggccucuacaagcagcccggcgugccggugaaguggaagcgcugaggacuaguuauaagacugacuagcccgaugggccucccaacgggcccuccuccccuccuugcaccgagauuaaucaaaggcucuuuucagagccaccaaaaaaaaaaaaaaaaaaaaaaaaaaaaaaaaaaaaaaaaaaaaaaaaaaaaaaaaaaaaaaaaaaaaaaaaaaaaaaaaaaaaaaaaaaaaaaaaaaaaa

SEQ ID NO: 29503 - RNA, 1689 nt, Artificial Sequence
  mRNA product Design i-3 (hSL-A100) comprising derived and/or modified sequence from LASV(G733-SLE-2010;Clade IV)__AIT17154__GPCmut5 (opt1)
aggagaaagcuuaccaugggccagaucgugaccuucuuccaggaggucccccacgugaucgaggaggugaugaacaucguccugaucgcccucagcauccuggccgugcugaaggggcucuacaacuucgcgaccugcggcaucguggggcuggucuccuuccugcuccugugcggccgcagcugcacgaccucccuguacaaggggguguacgagcuccagacccuggagcugaacauggagacccucaacaugacgaugccgcugagcugcaccaagaacaacucccaccacuacaucauggugggcaacgagaccggccuggagcucacccugacgaacaccagcaucaucaaccacaaguucugcaaccuguccgacgcccacaagaagaaccucuacgaccacgcccugaugagcaucaucuccaccuuccaccugagcauccccaacuucaaccaguacgaggccauguccugcgacuucaacgggggcaagaucagcguccaguacaaccucucccacagcuacgccggggacgcggccaaccacugcggcaccaucgccaacggggugcugcagacguucaugcggauggccuggggcggcuccuacaucgcgcuggacagcgggugcgaccggugggacugcaucaugaccuccuaccaguaccucaucauccagaacaccaccugggaggaccacugccaguucagccgccccucccccaucggcuaccuggggcugcucagccagcggacgcgcgacaucuacaucagccggcgccugcugggcaccuucaccuggacccucuccgacagcgagggcaaggacacgcccgggggcuacugccugacccgguggaugcugaucgaggccgagcucaagugcuucgggaacaccgccguggccaagugcaacgagaagcacgacgaggaguucugcgacaugcugcgccuguucgacuucaacaagcaggccauccagcggcucaaggcgcccgcccagauguccauccagcugaucaacaaggccgucaacgcccugaucaacgaccagcucaucaugaagaaccaccuccgcgacaucaugugcauccccuacugcaacuacagcaaguacugguaccugaaccacaccacgaccgggaagaccucccugcccaagugcuggcuggugagcaacggcuccuaccugaacgagacccacuucagcgacgacaucgagcagcaggccgacaacaugaucacggagaugcuccagaaggaguacauggagcggcagggcaagaccccgcuggggcugguggaccucuucgucuucuccaccagcuucuaccugaucuccaucuuccugcaccuggugaagaucccgacccaccgccacguggucggcaagagcugccccaagccccaccggcucaaccacauggggaucugcuccugcggccuguacgggcagcccggcgugccggugaaguggaagcgcugaggacuaguuauaagacugacuagcccgaugggccucccaacgggcccuccuccccuccuugcaccgagauuaaucaaaggcucuuuucagagccaccaaaaaaaaaaaaaaaaaaaaaaaaaaaaaaaaaaaaaaaaaaaaaaaaaaaaaaaaaaaaaaaaaaaaaaaaaaaaaaaaaaaaaaaaaaaaaaaaaaaaa

SEQ ID NO: 29504 - RNA, 1689 nt, Artificial Sequence
  mRNA product Design i-3 (hSL-A100) comprising derived and/or modified sequence from MOPV/LASV reassortant(IGS-1;Clade IV)__AFY05576__GPCmut5 (opt1)
aggagaaagcuuaccaugggccagaucgugaccuucuuccaggaggucccccacgugaucgaggaggugaugaacaucguccugaucgcccucagcgugcuggccgugcugaaggggcucuacaacuucgcgaccugcggccuggucgggcuggugacguuccuccugcugugcggccgcuccugcaccaccagccucuacaaggggguguacgagcugcagacccuggagcucaacauggagacgcugaacaugaccaugccgcuguccugcaccaagaacaacagccaccacuacaucauggucggcaacgagaccggccucgagcugacgcugaccaacaccuccaucaucaaccacaaguucugcaaccucagcgacgcccacaagaagaaccuguacgaccacgcccugauguccaucaucagcaccuuccaccucuccauccccaacuucaaccaguacgaggccaugagcugcgacuucaacgggggcaagaucuccgugcaguacaaccugagccacuccuacgccggggacgcggccaaccacugcggcacgguggccaacgggguccugcagaccuucaugcggauggccuggggcggcagcuacaucgcgcucgacuccgggugcggcaacugggacugcaucaugaccagcuaccaguaccugaucauccagaacaccacgugggaggaccacugccaguucucccggcccagccccaucggguaccugggccuccugucccagcgcacccgggacaucuacaucagccgccggcugcucggcaccuucaccuggacgcugagcgacuccgagggggaggacaccccgggcggguacugccugacccgcuggaugcucaucgaggccgagcugaagugcuucggcaacaccgccguggccaagugcaacgagaagcacgacgaggaguucugcgacaugcugcggcuguucgacuucaacaagcaggccauccagcgccugaaggcgcccgcccagaugagcauccagcugaucaacaaggccgugaacgcccucaucaacgaccagcugaucaugaagaaccaccuccgggacaucaugugcauccccuacugcaacuacuccaaguacugguaccucaaccacacgaccaccggccgcaccagccugcccaagugcuggcuggucuccaacggcagcuaccucaacgagacgcacuucuccgacgacaucgagcagcaggccgacaacaugaucaccgagaugcugcagaaggaguacauggagcggcaggggaagacgccccugggccucguggaccuguucguguucagcaccuccuucuaccugaucagcaucuuccugcaccucgucaagaucccgacccaccgccacaucguggggaaguccugccccaagccccaccggcugaaccacaugggcaucugcagcugcgggcuguacaagcagcccggcgugccggucaaguggaagcgcugaggacuaguuauaagacugacuagcccgaugggccucccaacgggcccuccuccccuccuugcaccgagauuaaucaaaggcucuuuucagagccaccaaaaaaaaaaaaaaaaaaaaaaaaaaaaaaaaaaaaaaaaaaaaaaaaaaaaaaaaaaaaaaaaaaaaaaaaaaaaaaaaaaaaaaaaaaaaaaaaaaaaa

SEQ ID NO: 29505 - RNA, 1689 nt, Artificial Sequence
  mRNA product Design i-3 (hSL-A100) comprising derived and/or modified sequence from LASV(LM765-SLE-2012;Clade IV)__AIT17814__GPCmut5 (opt1)
aggagaaagcuuaccaugggccagaucgugaccuucuuccaggaggucccccacgugaucgaggaggugaugaacaucguccugaucgcccucagcauccuggccgugcugaaggggcucuacaacuucgcgaccugcggccugguggggcuggucacguuccuccugcugugcggccgcuccugcaccaccagccucuacaaggggguguacgagcugcagacccuggagcucaacauggagacgcugaacaugaccaugccgcuguccugcaccaagaacaacagccaccacuacaucauggugggcaacgagaccggccucgagcugacgcugaccaacaccuccaucaucgaccacaaguucugcaaccucagcgacgcccaccggaagaaccuguacgaccacgcccugauguccaucaucagcaccuuccaccucuccauccccaacuucaaccaguacgaggccaugagcugcgacuucaacgggggcaagaucuccguccaguacaaccugagccacuccuacgccaaggacgcggccgaccacugcgggacgguggccaacggcgugcugcagaccuucaugcgcauggccuggggcgggagcuacaucgcgcucgacuccggcugcgggcgcugggacugcaucaugaccagcuaccaguaccugaucauccagaacaccacgugggaggaccacugccaguucucccggcccagccccaucggcuaccuggggcuccugucccagcgcacccgggacaucuacaucagccgccggcugcucggcaccuucaccuggacgcugagcgacuccgagggcaaggacacccccgggggcuacugccugacccgcuggaugcucaucgaggccgagcugaagugcuucgggaacaccgccgucgccaagugcaacgagaagcacgacgaggaguucugcgacaugcugcggcuguucgacuucaacaagcaggccauccagcgccugaaggcgcccgcccagaugagcauccagcugaucaacaaggccgugaacgcccucaucaacgaccagcugaucaugaagaaccaccuccgggacaucaugugcauccccuacugcaacuacuccaaguacugguaccucaaccacacgaccaccgggaagaccagccugcccaagugcuggcugguguccaacggcagcuaccucaacgagacgcacuucuccgacgacaucgagcagcaggccgacaacaugaucaccgagaugcugcagaaggaguacauggagcgccagggcaagaccccgcuggggcucgucgaccuguucguguucagcaccuccuucuaccugaucagcaucuuccugcaccucgugaagaucccgacgcaccggcacaucgucggcaagcccugccccaagccccaccgccugaaccacauggggaucugcuccugcggccuguacaagcagccgggggugcccgugaaguggaagcggugaggacuaguuauaagacugacuagcccgaugggccucccaacgggcccuccuccccuccuugcaccgagauuaaucaaaggcucuuuucagagccaccaaaaaaaaaaaaaaaaaaaaaaaaaaaaaaaaaaaaaaaaaaaaaaaaaaaaaaaaaaaaaaaaaaaaaaaaaaaaaaaaaaaaaaaaaaaaaaaaaaaaa

SEQ ID NO: 29506 - RNA, 1689 nt, Artificial Sequence
  mRNA product Design i-3 (hSL-A100) comprising derived and/or modified sequence from LASV(LM776-SLE-2012;Clade IV)__AIT17824__GPCmut5 (opt1)
aggagaaagcuuaccaugggccagaucgugaccuucuuccaggaggucccccacgugaucgaggaggugaugaacaucguccugaucgcccucagcauccuggccgugcugaaggggcucuacaacuucgcgaccugcggccugguggggcuggucacguuccuccugcugugcggccgcuccugcaccaccagcguguacaaggggguguacgagcuccagacccuggagcugaacauggagacgcucaacaugaccaugccgcuguccugcaccaagaacaacagccaccacuacaucauggucggcaacgagaccggccuggagcucacgcugaccaacaccuccaucaucaaccacaaguucugcaaccugagcgacgcccacaagaagaaccucuacgaccacgcccugauguccaucaucagcaccuuccaccuguccauccccaacuucaaccaguacgaggccaugagcugcgacuucaacgggggcaagaucuccgugcaguacaaccucagccacuccuacgccggggacgcggccaaccacugcggcacgguggccaacgggguccugcagaccuucaugcggauggccuggggcggcagcuacaucgcgcuggacuccgggugcggcaagugggacugcaucaugaccagcuaccaguaccucaucauccagaacaccacgugggaggaccacugccaguucucccgccccagccccaucggguaccugggccugcucucccagcggacccgcgacaucuacaucagccggcgccugcugggcaccuucaccuggacgcucagcgacuccgaggggaaggacaccccgggcggguacugccugacccgguggaugcugaucgaggccgagcucaagugcuucggcaacaccgccguggccaagugcaacgagaagcacgacgaggaguucugcgacaugcugcgccuguucgacuucaacaagcaggccauccagcggcucaaggcgcccgcccagaugagcauccagcugaucaacaaggccgugaacgcccugaucaacgaccagcucaucaugaagaaccaccuccgcgacaucaugugcauccccuacugcaacuacuccaaguacugguaccugaaccacacgaccaccggcaagaccagccugcccaagugcuggcuggucuccaacggcagcuaccugaacgagacgcacuucuccgacgacaucgagcagcaggccgacaacaugaucaccgagaugcuccagaaggaguacauggagcggcaggggaagacgccccugggccugguggaccucuucguguucagcaccuccuucuaccugaucagcaucuuccugcaccuggucaagaucccgacccaccgccacaucguggggaaguccugccccaagccccaccggcucaaccacaugggcaucugcagcugcgggcuguacaagcagcccggcgugccgguccgcuggaagcggugaggacuaguuauaagacugacuagcccgaugggccucccaacgggcccuccuccccuccuugcaccgagauuaaucaaaggcucuuuucagagccaccaaaaaaaaaaaaaaaaaaaaaaaaaaaaaaaaaaaaaaaaaaaaaaaaaaaaaaaaaaaaaaaaaaaaaaaaaaaaaaaaaaaaaaaaaaaaaaaaaaaaa

SEQ ID NO: 29507 - RNA, 1689 nt, Artificial Sequence
  mRNA product Design i-3 (hSL-A100) comprising derived and/or modified sequence from LASV(Mad39;Clade IV)__ANH09722__GPCmut5 (opt1)
aggagaaagcuuaccaugggccagaucgugaccuucuuccaggaggucccccacgugaucgaggaggugaugaacaucguccugaucgcccucagcauccuggccgugcugaaggggcucuacaacguggcgaccugcggccugaucgggcuggucacguuccuccugcugugcggccgcuccugcaccaccacccucuacaaggggguguacgagcugcaggcccuggagcucaacauggagacgcugaacaugaccaugccgcugagcugcaccaagaacaacucccaccacuacauccgggugggcaacgagaccggccucgagcugacgcugaccaacaccagccucaucaaccacaaguucugcaaccuguccgacgcccacaagaagaaccuguacgaccacgcccucaugagcaucaucuccaccuuccaccugagcauccccaacuucaaccaguacgaggccauguccugcgacuucaacgacgggaagaucagcguccaguacaaccugucccacacguacgcgggcgacaccgccaaccacugcgggaccguggccaacggcgugcuccagaccuucaugcgcauggccuggggcgggagcuacaucgcgcuggacuccggcugcgggggcugggacugcaucaugacgagcuaccaguaccugaucauccagaacaccaccugggaggaccacugccaguucucccggcccagccccaucggguaccucggccugcugucccagcggacccgcgacaucuacaucagccggcgccuccugggcacguucaccuggacccuguccgacagcgaggggaaggacaccccgggcggguacugccucacgcgguggaugcugaucgaggccgagcugaagugcuucggcaacaccgccgucgccaagugcaacgagaagcacgacgaggaguucugcgacaugcuccgccuguucgacuucaacaagcaggccauccagcggcugaaggcgcccgcccagaugagcauccagcucaucaacaaggccgugaacgcccugaucaacgaccagcugaucaugaagaaccaccuccgcgacaucaugugcauccccuacugcaacuacuccaaguacugguaccugaaccacaccgugaccggcaagacgagccugcccaagugcuggcucgucuccaacggcagcuaccugaacgagacccacuucuccgacgacaucgagcagcaggccgacaacaugaucaccgagaugcugcagaaggaguacauggagcggcaggggaagacgccccucggccugguggaccuguucguguucagcaccuccuucuaccugaucagcaucuuccuccaccuggucaagaucccgacccaccgccacgugguggggaagcccugccccaagccccaccggcugaaccacaugggcaucugcuccugcggguucuacaagcagccgggcguccccgugcgcuggaagcggugaggacuaguuauaagacugacuagcccgaugggccucccaacgggcccuccuccccuccuugcaccgagauuaaucaaaggcucuuuucagagccaccaaaaaaaaaaaaaaaaaaaaaaaaaaaaaaaaaaaaaaaaaaaaaaaaaaaaaaaaaaaaaaaaaaaaaaaaaaaaaaaaaaaaaaaaaaaaaaaaaaaaa

SEQ ID NO: 29508 - RNA, 1689 nt, Artificial Sequence
  mRNA product Design i-3 (hSL-A100) comprising derived and/or modified sequence from LASV(Z0947-SLE-2011;Clade IV)__AIT17840__GPCmut5 (opt1)
aggagaaagcuuaccaugggccagaucgugaccuucuuccaggaggucccccacgugaucgaggaggugaugaacaucguccugaucgcccucagcauccuggccgugcugaaggggcucuacaacuucgcgaccugcggccugguggggcuggucacguuccuccugcugugcggccgcuccugcaccaucagccucuacaaggggguguacgagcugcagacccuggagcucaacauggagacccugaacaugacgaugccgcuguccugcaccaagaacaacagccaccacuacaucauggugggcaacgagaccggccucgagcugacccugacgaacaccuccaucaucaaccacaaguucugcaaccucagcgacgcccacaagaagaaccuguacgaccacgcccugauguccaucaucagcaccuuccaccucuccauccccaacuucaaccaguacgaggccaugagcugcgacuucaacgggggcaagaucuccguccaguacaaccugagccacuccuacgccggggacgcggccaaccacugcggcaccguggccaacggggugcugcagacguucaugcggauggccuggggcggcagcuacaucgcgcucgacuccgggugcgaccggugggacugcaucaugaccagcuaccaguaccugaucauccagaacaccaccugggaggaccacugccaguucucccgccccagccccaucggcuaccuggggcuccugucccagcggacgcgcgacaucuacaucagccggcgccugcucggcaccuucaccuggacccugagcgacuccgagggcaaggacacgcccgggggcuacugccugacccgguggaugcucaucgaggccgagcugaagugcuucgggaacaccgccgucgccaagugcaacgagaagcacgacgaggaguucugcgacaugcugcgccucuucgacuucaacaagcaggccauccagcggcugaaggcgcccgcccagaugagcauccagcugaucaacaaggccgugaacgcccucaucaacgaccagcugaucaugaagaaccaccuccgcgacaucaugugcauccccuacugcaacuacuccaaguacugguaccugaaccacaccacgaccgggaagaccagccugcccaagugcuggcugguguccaacggcagcuaccucaacgagacccacuucuccgacgacaucgagcagcaggccgacaacaugaucacggagaugcugcagaaggaguacauggagcggcagggcaagaccccgcuggggcucgucgaccuguucguguucagcaccuccuucuaccugaucagcaucuuccugcaccucgugaagaucccgacccaccgccacaucgucggcaagcccugccccaagccccaccggcugaaccacauggggaucugcuccugcggccuguacaagcagccgggggugcccgugaaguggaagcgcugaggacuaguuauaagacugacuagcccgaugggccucccaacgggcccuccuccccuccuugcaccgagauuaaucaaaggcucuuuucagagccaccaaaaaaaaaaaaaaaaaaaaaaaaaaaaaaaaaaaaaaaaaaaaaaaaaaaaaaaaaaaaaaaaaaaaaaaaaaaaaaaaaaaaaaaaaaaaaaaaaaaaa

SEQ ID NO: 29509 - RNA, 1689 nt, Artificial Sequence
  mRNA product Design i-3 (hSL-A100) comprising derived and/or modified sequence from LASV(Josiah;Clade IV)__NP_694870__GPCmut5 (opt1)
aggagaaagcuuaccaugggccagaucgugaccuucuuccaggaggucccccacgugaucgaggaggugaugaacaucguccugaucgcccucagcgugcuggccgugcugaaggggcucuacaacuucgcgaccugcggccuggucgggcuggugacguuccuccugcugugcggccgcuccugcaccaccagccucuacaaggggguguacgagcugcagacccuggagcucaacauggagacgcugaacaugaccaugccgcuguccugcaccaagaacaacagccaccacuacaucauggucggcaacgagaccggccucgagcugacgcugaccaacaccuccaucaucaaccacaaguucugcaaccucagcgacgcccacaagaagaaccuguacgaccacgcccugauguccaucaucagcaccuuccaccucuccauccccaacuucaaccaguacgaggccaugagcugcgacuucaacgggggcaagaucuccgugcaguacaaccugagccacuccuacgccggggacgcggccaaccacugcggcacgguggccaacgggguccugcagaccuucaugcggauggccuggggcggcagcuacaucgcgcucgacuccgggugcggcaacugggacugcaucaugaccagcuaccaguaccugaucauccagaacaccacgugggaggaccacugccaguucucccgccccagccccaucggguaccugggccuccugucccagcggacccgcgacaucuacaucagccggcgccugcucggcaccuucaccuggacgcugagcgacuccgaggggaaggacaccccgggcggguacugccugacccgguggaugcucaucgaggccgagcugaagugcuucggcaacaccgccguggccaagugcaacgagaagcacgacgaggaguucugcgacaugcugcgccucuucgacuucaacaagcaggccauccagcggcugaaggcgcccgcccagaugagcauccagcugaucaacaaggccgugaacgcccucaucaacgaccagcugaucaugaagaaccaccuccgcgacaucaugugcauccccuacugcaacuacuccaaguacugguaccugaaccacacgaccaccgggcggaccagccugcccaagugcuggcuggucuccaacggcagcuaccucaacgagacgcacuucuccgacgacaucgagcagcaggccgacaacaugaucaccgagaugcugcagaaggaguacauggagcgccagggcaagaccccgcuggggcugguggaccucuucguguucagcaccuccuucuaccugaucagcaucuuccugcaccucgucaagauccccacgcaccggcacaucgugggcaaguccugccccaagccccaccgccugaaccacauggggaucugcagcugcggccuguacaagcagccgggggugcccgucaaguggaagcggugaggacuaguuauaagacugacuagcccgaugggccucccaacgggcccuccuccccuccuugcaccgagauuaaucaaaggcucuuuucagagccaccaaaaaaaaaaaaaaaaaaaaaaaaaaaaaaaaaaaaaaaaaaaaaaaaaaaaaaaaaaaaaaaaaaaaaaaaaaaaaaaaaaaaaaaaaaaaaaaaaaaaa

SEQ ID NO: 29510 - RNA, 1686 nt, Artificial Sequence
  mRNA product Design i-3 (hSL-A100) comprising derived and/or modified sequence from LASV(LP;Clade I)__AAF86701__GPCmut5 (opt1)
aggagaaagcuuaccaugggccagaucaucaccuucuuccaggaggugccccacgucaucgaggaggugaugaacaucgugcugaucgcccucagccugcuggccauccucaaggggcuguacaacaucgcgaccugcggcaucaucgggcuggucgccuuccucuuccugugcggcaaguccugcagccugacgcucaagggcggguacgagcugcagacccuggagcucaacauggagacccugaacaugaccaugccgcuguccugcacgaagaacagcucccaccacuacauccgcgugggcaacgagaccgggcucgagcugacccugaccaacacgagcaucaucaaccacaaguucugcaaccucuccgacgcccacaagaagaaccuguacgaccacgcccugaugagcaucaucuccaccuuccaccucagcauccccaacuucaaccaguacgaggccauguccugcgacuucaacggcgggaagaucagcgugcaguacaaccugucccacagcuacgcgggcgacgccgccgagcacugcgggaccgucgccaacggcgugcugcagaccuucaugcggauggcguggggcgggcgcuacaucgcccucgacuccggcugcgggaacugggacugcaucaugacgagcuaccaguaccugaucauccagaacaccaccugggaggaccacugccaguucucccggcccagccccaucggcuaccugggccuccugucccagcgcacccgggacaucuacaucagccgccggcugcucgggacguucaccuggacccugagcgacuccgagggcaacgagacccccgggggcuacugccugacgcgcuggaugcucaucgaggccgagcugaagugcuucgggaacaccgccguggccaagugcaacgagaagcacgacgaggaguucugcgacaugcugcggcuguucgacuucaacaagcaggcgauccgccggcugaaggccccggcccagaugagcauccagcugaucaacaaggccgucaacgcccucaucaacgaccagcugaucaugaagaaccaccuccgcgacaucaugugcauccccuacugcaacuacuccaaguacugguaccucaaccacaccagcuccggccggaccagccugcccaagugcuggcugaucuccaacggcagcuaccucaacgagacgcaguucuccgacgacaucgagcagcaggcggacaacaugaucaccgagaugcugcagaaggaguacaucgagcgccaggggaagaccccgcugggccugguggacaucuucaucuucagcaccuccuucuaccucaucagcaucuuccugcaccugaucaagauccccacgcaccggcacaucguggggaagcccugccccaagccgcaccgccucaaccacaugggcgucugcuccugcgggcuguacaagcaccccggcgugcccaccaaguggaagcggugaggacuaguuauaagacugacuagcccgaugggccucccaacgggcccuccuccccuccuugcaccgagauuaaucaaaggcucuuuucagagccaccaaaaaaaaaaaaaaaaaaaaaaaaaaaaaaaaaaaaaaaaaaaaaaaaaaaaaaaaaaaaaaaaaaaaaaaaaaaaaaaaaaaaaaaaaaaaaaaaaaaaa

SEQ ID NO: 29511 - RNA, 1686 nt, Artificial Sequence
  mRNA product Design i-3 (hSL-A100) comprising derived and/or modified sequence from LASV(803213;Clade II)__AAF86703__GPCmut5 (opt1)
aggagaaagcuuaccaugggccagaucaucaccuucuuccaggaggugccccacgucaucgaggaggugaugaacaucgugcugaucgcccucagccugcuggccauccucaaggggaucuacaacgucgcgaccugcggccuguucgggcugaucuccuuccuccugcugugcggccgcagcugcuccgugacguacaaggggguguacgagcuccagacccuggagcugaacauggccaaccucaacaugaccaugccgcugagcugcaccaagaacaacucccaccacuacaucauggucggcaacgagacgggccuggagcucacccugaccaacaccagcaucaucaaccacaaguucugcaaccuguccgacgcccacaagaagaaccucuacgaccacgcccugaugagcaucaucuccacguuccaccugagcauccccaacuucaaccaguacgaggccauguccugcgacuucaacgggggcaagaucagcgugcaguacaaccucucccacagcuucgcgguggacgccgccaaccacugcgggaccaucgccaacggcguccugcagaccuucaugcggauggcguggggcggguccuacaucgcccuggacagcggcugcgggaacugggacugcaucaugaccuccuaccaguaccucaucauccagaacacgaccugggaggaccacugccaguucagccgccccucccccaucggcuaccuggggcugcucagccagcggacccgcgacaucuacaucagccggcgccugcugggcaccuucacguggacccucuccgacagcgagggcaacgaggcccccgggggcuacugccugacccgguggaugcugaucgaggccgagcucaagugcuucgggaacaccgccguggcgaagugcaacgagaagcacgacgaggaguucugcgacaugcugcgccuguucgacuucaacaagcaggccaucaagcggcucaagacgccggcccagauguccauccagcugaucaacaaggccgugaacgcccugaucaacgaccagcucaucaugaagaaccaccuccgcgacaucaugugcauccccuacugcaacuacagccgguacugguaccugaaccacaccgucaccggcaagaccucccugccccgcugcuggcuggugagcaacggguccuaccugaacgagacgcacuucagcgacgacaucgagcagcaggcggacaacaugaucaccgagaugcuccagaaggaguacauggaccggcagggcaagaccccgcugggccugguggaccuguucgucuucuccaccagcuucuaccucaucuccaucuuccugcaccuggugaagauccccacgcaccgccacaucguggggaagcccugccccaagccgcaccggcucaaccacaugggcaucugcagcugcgggcuguacaagcaccccggcguccccgugaaguggaagcgcugaggacuaguuauaagacugacuagcccgaugggccucccaacgggcccuccuccccuccuugcaccgagauuaaucaaaggcucuuuucagagccaccaaaaaaaaaaaaaaaaaaaaaaaaaaaaaaaaaaaaaaaaaaaaaaaaaaaaaaaaaaaaaaaaaaaaaaaaaaaaaaaaaaaaaaaaaaaaaaaaaaaaa

SEQ ID NO: 29512 - RNA, 1686 nt, Artificial Sequence
  mRNA product Design i-3 (hSL-A100) comprising derived and/or modified sequence from LASV(GA391;Clade III)__CAA36645__GPCmut5 (opt1)
aggagaaagcuuaccaugggccagaucgugaccuucuuccaggaggucccccacgugaucgaggaggugaugaacaucguccugaucgcccucagcauccuggccauccugaaggggcucuacaacguggcgaccugcggccugaucgggcuggugacguuccuccugcuguccggccgcagcugcucccucaucuacaaggggaccuacgagcugcagacccuggagcucaacauggagacccugaacaugacgaugccgcugagcugcaccaagaacaacucccaccacuacauccgggucggcaacgagaccggccucgagcugacccugacgaacaccagcauccucaaccacaaguucugcaaccuguccgacgcccacaagcgcaaccuguacgaccacagccucauguccaucaucagcaccuuccaccuguccauccccaacuucaaccaguacgaggccaugagcugcgacuucaacgggggcaagaucaccgugcaguacaaccugucccacagcuucgccguggacgccgcggggcacugcggcacgcucgccaacgggguccugcagaccuucaugcggauggccuggggcggcuccuacaucgcccuggacagcgggugcggcaacugggacugcaucaugaccuccuaccaguaccucaucauccagaacaccacgugggacgaccacugccaguucagccgccccucccccaucggguaccugggccugcucagccagcggacccgcgacaucuacaucagccggcgccugcugggcaccuucaccuggacgcucuccgacagcgaggggaacgagaccccgggcggguacugccugacccgguggaugcugaucgaggcggagcucaagugcuucggcaacaccgccguggccaagugcaacgagaagcacgacgaggaguucugcgacaugcugcgccuguucgacuucaacaagcaggccauccggcgccucaagacgcccgcccagauguccauccagcugaucaacaaggcggugaacgcccugaucaacgaccagcucaucaugaagaaccaccuccgggacaucaugugcauccccuacugcaacuacagccgcuacugguaccugaaccacaccuccaccgggaagaccagccugccccggugcuggcugaucuccaacggcagcuaccugaacgagacgaaguucuccgacgacaucgagcagcaggccgacaacaugaucaccgagaugcugcagaaggaguacaucgaccgccagggcaagaccccgcucgggcuggucgaccuguucguguucagcaccuccuucuaccucaucagcaucuuccugcaccuggugaagauccccacgcaccggcacaucgucggcaagcccugccccaagccgcaccgccucaaccacauggggaucugcuccugcggccuguacaagcagcccggggugcccgugcgguggaagcgcugaggacuaguuauaagacugacuagcccgaugggccucccaacgggcccuccuccccuccuugcaccgagauuaaucaaaggcucuuuucagagccaccaaaaaaaaaaaaaaaaaaaaaaaaaaaaaaaaaaaaaaaaaaaaaaaaaaaaaaaaaaaaaaaaaaaaaaaaaaaaaaaaaaaaaaaaaaaaaaaaaaaaa

SEQ ID NO: 29513 - RNA, 1689 nt, Artificial Sequence
  mRNA product Design i-3 (hSL-A100) comprising derived and/or modified sequence from LASV(AV;Clade V)__CCA30314__GPCmut5 (opt1)
aggagaaagcuuaccaugggccagaucgugaccuucuuccaggaggucccccacgugaucgaggaggugaugaacaucguccugaucgcccucagcauccuggccgugcugaaggggcucuacaacaucgcgaccugcggccugaucgggcugaucacguuccuccugcugugcggccgcuccugcagcuccaaccucuacaaggggguguacgagcugcagagccuggaccucaacauggagacccugaacaugaccaugccgcuguccugcaccaagaacaacagccaccacuacauccgggucggcaacgacacgggccucgagcugacccugaccaacaccuccauccucaaccacaaguucugcaaccugagcgacgcccacaagaaggaccuguacgaccacgcccucauguccaucaucagcacguuccaccuguccauccccaacuucaaccaguacgaggccaugagcugcgacuucaacgggggcaagaucuccgugcaguacaaccugagccacuccuacgccaucgacgcggccaaccacugcgggaccguggccaacggcauccuccagaccuucaugcgcauggccuggggcgggagcuacaucgcgcuggacuccggcugcgggaacugggacugcaucaugaccagcuaccaguaccugaucauccagaacacgaccugggagaaccacugccaguucucccggcccagccccaucggcuaccucgggcugcugagccagcgcacccgggacaucuacaucucccgccggcuccugggcaccuucacguggacccugagcgacuccgagggcaacgccacccccgggggcuacugccucacccgcuggaugcugaucgaggccgagcugaagugcuucgggaacacggccgucgccaagugcaacgagaagcacgacgaggaguucugcgacaugcuccggcuguucgacuucaacaagcaggcgaucagccgccugaaguccccggcccagaugagcauccagcucaucaacaaggccgugaacgcccugaucaacgaccagcugaucaugaagaaccaccuccgggacaucaugugcauccccuacugcaacuacuccaaguacugguaccugaaccacaccaucaccggcaagaccagccugcccaagugcuggcucguguccaacgggagcuaccugaacgagacgcacuucuccgacgacaucgagcagcaggccgacaacaugaucaccgagaugcugcagaaggaguacauggagcgccagggcaagaccccgcugggccucgucgaccuguucguguucagcaccuccuucuaccugaucagcaucuuccuccggcuggugaagauccccacgcaccgccacaucgucgggaagcccugccccaagccgcaccggcugaaccacaugggcaucugcuccugcgggcucuacaagcagcccggcgugcccgugcgcuggaagcggugaggacuaguuauaagacugacuagcccgaugggccucccaacgggcccuccuccccuccuugcaccgagauuaaucaaaggcucuuuucagagccaccaaaaaaaaaaaaaaaaaaaaaaaaaaaaaaaaaaaaaaaaaaaaaaaaaaaaaaaaaaaaaaaaaaaaaaaaaaaaaaaaaaaaaaaaaaaaaaaaaaaaa

SEQ ID NO: 29514 - RNA, 1686 nt, Artificial Sequence
  mRNA product Design i-3 (hSL-A100) comprising derived and/or modified sequence from LASV(Togo/2016/7082;Clade VI)__AMR44577__GPCmut5 (opt1)
aggagaaagcuuaccaugggccagaucaucaccuucuuccaggaggugccccacgucaucgaggaggugaugaacaucgugcugaucgcccucagccugcuggccauccucaagggggucuacaacguggcgaccugcggcaucaucgggcuggugacguuccuguuccucugcggccgcuccugcagccugaucuacaagggguccuacgagcugcagacccucgagcugaacauggagacccugaacaugaccaugccgcucagcugcacgaagaacuccagccaccacuacauccgggucggcaacgagaccggccuggagcugacccucaccaacacguccaucaucaaccacaaguucugcaaccugagcgacgcccacaagcgcaaccuguacgaccacgcccucauguccauccugagcaccuuccaccuguccauccccaacuucaaccaguacgaggccaugagcugcgacuucaacgggggcaagaucuccgugcaguacaaccucagccacgccuacgcgguggacgccgccgagcacugcgggaccgucgccaacggcgugcugcagaccuucaugcggauggcguggggcggguccuacaucgcccuggacagcggcugcgggaacugggacugcaucaugacguccuaccaguaccucaucauccagaacaccaccugggaggaccacugccaguucagccgccccucccccaucggcuaccuggggcugcucagccagcggacccgcgacaucuacaucagccggcgccugcugggcacguucaccuggacccucuccgacagcgagggcaacgagacccccgggggcuacugccugacgcgguggaugcugaucgaggccgagcucaagugcuucgggaacaccgccguggccaagugcaacgagaagcacgacgaggaguucugcgacaugcugcgccuguucgacuucaacaagcaggcgauccagcggcucaaguccccggcccagaugagcauccagcugaucaacaaggccgucaacgcccugaucaacgaccagcucaucaugaagaaccaccuccgcgacaugaugugcauccccuacugcaacuacuccaaguacugguaccugaaccacaccagcuccggccggaccagccugcccaagugcuggcugguguccaacgggagcuaccugaacgagacgcacuucuccgacgacaucgagcagcaggccgacaacaugaucaccgagaugcuccagaaggaguacaucgaccgccagggcaagaccccgcugggccugguggaccuguucgucuucagcaccuccuucuaccucaucagcaucuuccugcaccugaucaagauccccacgcaccggcacaucguggggaagcccugccccaagccgcaccgccucaaccacaugggcaucugcuccugcgggcuguacaagcagcccggcgugcccacccgguggaagcgcugaggacuaguuauaagacugacuagcccgaugggccucccaacgggcccuccuccccuccuugcaccgagauuaaucaaaggcucuuuucagagccaccaaaaaaaaaaaaaaaaaaaaaaaaaaaaaaaaaaaaaaaaaaaaaaaaaaaaaaaaaaaaaaaaaaaaaaaaaaaaaaaaaaaaaaaaaaaaaaaaaaaaa

SEQ ID NO: 29515 - RNA, 1686 nt, Artificial Sequence
  mRNA product Design i-3 (hSL-A100) comprising derived and/or modified sequence from LASV(KAK-428;Clade n.d. (VII))__ANH09740__GPCmut5 (opt1)
aggagaaagcuuaccaugggccagaucgugaccuucuuccaggaggucccccacgugaucgaggaggugaugaacaucguccugaucgcccucagccugcuggccauccucaaggggcuguacaacuucgcgaccugcggcgugaucgggcugaucacguuccuccugcugugcggccgcuccugcagcgccaccuacaaggggcaguacgagcuccagacccuggagcugaacauggagucccucaacaugaccaugccgcugagcugcacgaagaacaacucccaccacuacauccgggccggcaacaacaccggccuggagcucacccugaccaacacgagcaucaucucccacaaguucugcaaccugagcgacgcccacaagaagaaccucuacgaccacacccugauguccaucaucaccaccuuccaccugagcauccccaacuucaaccaguacgaggccauguccugcgacuucaacgggggcaagaucagcauccaguacaaccucucccacagcuacgcgggggacgccgcccagcacugcggcacgguggccaacgggguccugcagaccuucaugcgcauggcguggggcggcuccuaccuggcccucgacagcgggugccggggcugggacugcaucaucuccagcuaccaguaccugaucauccagaacaccaccugggacgaccacugccaguucucccgccccagccccaucggguaccugggcuucgugagccagaagacgcgggacaucuacaucucccgccggcuccugggcaccuucaccuggacccugagcgacuccgaggggcacgacaugccgggcggguacugccucacgcgcuggaugcugaucgaggccgaccugaagugcuucggcaacaccgccguggccaagugcaacgagaagcacgacgaggaguucugcgacauguggcggcuguucgacuucaacaagcaggcgauccagcgccugaaggcccccgcccagaugaacauccagcugaucaacaaggccgucaacgcccucaucaacgaccagcugaugaugaagaaccaccuccgggacaucaugugcauccccuacugcaacuacagcaaguucugguaccucaacaacaccaccacggggcgcaccucccugccccggugcuggcugaucagcaacggcuccuaccucaacgagacccacuucagcgacgacaucgagcagcaggcggacaacaugaucaccgagaugcugcagaaggaguacauggaccgccagggcaagacgccgcuggggcucguggaccuguucguguucuccaccagcuucuaccugaucaccaucuuccugcaccucgucaagauccccacccaccggcacaucgugggcaagcccugccccaagccgcaccgccugaaccacauggggaucugcuccugcggccuguacaagcagcccggggugcccguccgguggaagcgcugaggacuaguuauaagacugacuagcccgaugggccucccaacgggcccuccuccccuccuugcaccgagauuaaucaaaggcucuuuucagagccaccaaaaaaaaaaaaaaaaaaaaaaaaaaaaaaaaaaaaaaaaaaaaaaaaaaaaaaaaaaaaaaaaaaaaaaaaaaaaaaaaaaaaaaaaaaaaaaaaaaaaa

SEQ ID NO: 29516 - RNA, 1686 nt, Artificial Sequence; identical to SEQ ID NO: 29510
  mRNA product Design i-3 (hSL-A100) comprising derived and/or modified sequence from LASV(Pinneo-NIG-1969;Clade I)__AIT17836__GPCmut5 (opt1)

SEQ ID NO: 29517 - RNA, 1686 nt, Artificial Sequence
  mRNA product Design i-3 (hSL-A100) comprising derived and/or modified sequence from LASV(ISTH0009-NIG-2011;Clade II)__AIT17404__GPCmut5 (opt1)
aggagaaagcuuaccaugggccagaucaucaccuucuuccaggaggugccccacgucaucgaggaggugaugaacaucgugcugaucgcccucagccugcuggccauccucaaggggaucuacaacgucgcgaccugcggccuguucgggcugguguccuuccuccugcugugcggccgcagcugcuccacgaccuacaaggggguguacgagcuccagacccuggagcuggacauggccagccucaacaugaccaugccgcuguccugcacgaagaacaacagccaccacuacaucauggucggcaacgagaccggccuggagcucacccugaccaacacguccaucaucaaccacaaguucugcaaccugagcgacgcccacaagaagaaccucuacgaccacgcccugauguccaucaucagcaccuuccaccuguccauccccaacuucaaccaguacgaggccaugagcugcgacuucaacgggggcaagaucuccgugcaguacaaccucagccacgcguacgccguggacgccgccaaccacugcgggaccaucgcgaacggcguccugcagaccuucaugcggauggccuggggcggguccuacaucgcccuggacagcggcugcggguccugggacugcaucaugacgagcuaccaguaccucaucauccagaacaccaccugggaggaccacugccaguucucccgccccagccccaucggcuaccuggggcugcucagccagcggacccgcgacaucuacaucucccggcgccugcugggcacguucaccuggacccucagcgacuccgagggcaacgagacccccgggggcuacugccugacgcgguggaugcugaucgaggccgagcucaagugcuucgggaacaccgccguggcgaagugcaacgagaagcacgacgaggaguucugcgacaugcugcgccuguucgacuucaacaagcaggccauccggcgccucaagaccccggcccagaugagcauccagcugaucaacaaggccgugaacgcccugaucaacgaccagcucaucaugaagaaccaccuccgggacaucaugugcauccccuacugcaacuacuccaaguacugguaccugaaccacaccgucacgggcaagaccagccugccccgcugcuggcugguguccaacgggagcuaccugaacgagacccacuucuccgacgacaucgagcagcaggcggacaacaugaucaccgagcuccugcagaaggaguacauggaccggcagggcaagacgccgcugggccugguggaccucuucgucuucagcaccuccuucuaccugaucagcaucuuccugcaccucaucaagauccccacccaccgccacaucaccgggaagcccugccccaagccgcaccggcugaaccacaugggcaucugcuccugcgggcuguacaagcaccccggcgugcccgugaaguggaagcgcugaggacuaguuauaagacugacuagcccgaugggccucccaacgggcccuccuccccuccuugcaccgagauuaaucaaaggcucuuuucagagccaccaaaaaaaaaaaaaaaaaaaaaaaaaaaaaaaaaaaaaaaaaaaaaaaaaaaaaaaaaaaaaaaaaaaaaaaaaaaaaaaaaaaaaaaaaaaaaaaaaaaaa

SEQ ID NO: 29518 - RNA, 1686 nt, Artificial Sequence
  mRNA product Design i-3 (hSL-A100) comprising derived and/or modified sequence from LASV(ISTH2010-NIG-2012;Clade II)__AIT17482__GPCmut5 (opt1)
aggagaaagcuuaccaugggccagaucaucaccuucuuccaggaggugccccacgucaucgaggaggugaugaacaucgugcugaucgcccucagccugcuggccauccucaaggggaucuacaacgucgcgaccugcggccuguucgggcugguguccuuccuccugcugugcggccgcagcugcuccacgaccuacaaggggguguacgagcuccagacccuggagcuggacauggccagccucaacaugaccaugccgcuguccugcacgaagaacaacagccaccacuacaucauggucggcaacgagaccggccuggagcucacccugaccaacacguccaucaucaaccacaaguucugcaaccugagcgacgcccacaagaagaaccucuacgaccacgcccugauguccaucaucagcaccuuccaccuguccauccccaacuucaaccaguacgaggccaugagcugcgacuucaacgggggcaagaucuccgugcaguacaaccucagccacgcguacgccguggacgccgccaaccacugcgggaccaucgcgaacggcguccugcagaccuucaugcggauggccuggggcggguccuacaucgcccuggacagcggcugcggguccugggacugcaucaugacgagcuaccaguaccucaucauccagaacaucaccugggaggaccacugccaguucucccgccccagccccaucggcuaccuggggcugcucagccagcggacccgcgacaucuacaucucccggcgccugcugggcaccuucacguggacccucagcgacuccgagggcaacgagacccccgggggcuacugccugacccgguggaugcugaucgaggccgagcucaagugcuucgggaacacggccguggcgaagugcaacgagaagcacgacgaggaguucugcgacaugcugcgccuguucgacuucaacaagcaggccauccggcgccucaagaccccggcccagaugagcauccagcugaucaacaaggccgugaacgcccugaucaacgaccagcucaucaugaagaaccaccuccgggacaucaugugcauccccuacugcaacuacuccaaguacugguaccugaaccacaccgucaccggcaagacgagccugccccgcugcuggcugguguccaacgggagcuaccugaacgagacccacuucuccgacgacaucgagcagcaggcggacaacaugaucaccgagcuccugcagaaggaguacaucgaccggcagggcaagaccccgcugggccugguggaccucuucgucuucagcacguccuucuaccugaucagcaucuuccugcaccucgugaagauccccacccaccgccacguggucgggaagcccugccccaagccgcaccggcugaaccacaugggcaucugcuccugcgggcuguacaagcaccccggcgugcccgugaaguggaagcgcugaggacuaguuauaagacugacuagcccgaugggccucccaacgggcccuccuccccuccuugcaccgagauuaaucaaaggcucuuuucagagccaccaaaaaaaaaaaaaaaaaaaaaaaaaaaaaaaaaaaaaaaaaaaaaaaaaaaaaaaaaaaaaaaaaaaaaaaaaaaaaaaaaaaaaaaaaaaaaaaaaaaaa

SEQ ID NO: 29519 - RNA, 1686 nt, Artificial Sequence
  mRNA product Design i-3 (hSL-A100) comprising derived and/or modified sequence from LASV(Lassa virus/H.sapiens-wt/NGA/2015/ISTH_0543;Clade II)__AVO03639__GPCmut5 (opt1)
aggagaaagcuuaccaugggccagaucaucaccuucuuccaggaggugccccacgucaucgaggaggugaugaacaucgugcugaucgcccucagccugcuggccauccucaaggggaucuacaacgucgcgaccugcggccuguucgggcugguguccuuccuccugcugugcggccgcagcugcuccacgaccuacaaggggguguacgagcuccagacccuggagcuggacauggccaaccucaacaugaccaugccgcugagcugcacgaagaacaacucccaccacuacaucauggucggcaacgagaccggccuggagcucacccugaccaacacgagcaucaucaaccacaaguucugcaaccuguccgacgcccacaagaagaaccucuacgaccacgcccugaugagcaucaucuccaccuuccaccugagcauccccaacuucaaccaguacgaggccauguccugcgacuucaacgggggcaagaucagcgugcaguacaaccucucccacaccuacgcgguggacgccgccaaccacugcgggaccaucgccaacggcguccugcagacguucaugcggauggcguggggcgggagcuacaucgcccuggacuccggcugcgggagcugggacugcaucaugaccuccuaccaguaccucgugauccagaacaccaccugggaggaccacugccaguucagccgccccucccccaucggcuaccuggggcugcucagccagcggacgcgcgacaucuacaucagccggcgccugcugggcaccuucaccuggacccucuccgacagcgagggcaacgagacgcccgggggcuacugccugacccgguggaugcugaucgaggccgagcucaagugcuucgggaacaccgccguggccaagugcaacgagaagcacgacgaggaguucugcgacaugcugcgccuguucgacuucaacaagcaggcgauccggcgccucaagaccccggcccagauguccauccagcugaucaacaaggccgucaacgcccugaucaacgaccagcucaucaugaagaaccaccuccgggacaucaugugcauccccuacugcaacuacagcaaguacugguaccugaaccacacggugaccggcaagaccucccugccccgcugcuggcuggugagcaacggguccuaccugaacgagacccacuucagcgacgacaucgagcagcaggccgacaacaugaucacggagcuccugcagaaggaguacaucgaccggcagggcaagaccccgcugggccuggucgaccucuucguguucuccaccagcuucuaccugaucuccaucuuccugcaccucgugaagauccccacccaccgccacaucacggggaagcccugccccaagccgcaccggcugaaccacaugggcaucugcagcugcgggcuguacaagcaccccggcguccccgugaaguggaagcgcugaggacuaguuauaagacugacuagcccgaugggccucccaacgggcccuccuccccuccuugcaccgagauuaaucaaaggcucuuuucagagccaccaaaaaaaaaaaaaaaaaaaaaaaaaaaaaaaaaaaaaaaaaaaaaaaaaaaaaaaaaaaaaaaaaaaaaaaaaaaaaaaaaaaaaaaaaaaaaaaaaaaaa

SEQ ID NO: 29520 - RNA, 1686 nt, Artificial Sequence
  mRNA product Design i-3 (hSL-A100) comprising derived and/or modified sequence from LASV(Lassa virus/H.sapiens-wt/NGA/2016/ISTH_0009;Clade II)__AVO03571__GPCmut5 (opt1)
aggagaaagcuuaccaugggccagaucaucaccuucuuccaggaggugccccacgucaucgaggaggugaugaacaucgugcugaucgcccucagccugcuggccauccucaaggggaucuacaacgucgcgaccugcggccugcuggggcucguguccuuccugcugcucugcggccgcagcugcuccacgaccuacaaggggguguacgagcugcagacccuggagcucgacauggccagccugaacaugaccaugccgcuguccugcacgaagaacaacagccaccacuacaucauggucggcaacgagaccggccucgagcugacccugaccaacacguccaucaucaaccacaaguucugcaaccucagcgacgcccacaagaagaaccuguacgaccacgcccugauguccaucaucagcaccuuccaccucuccauccccaacuucaaccaguacgaggccaugagcugcgacuucaacgggggccggaucuccgugcaguacaaccugagccacuccuacgcgguggacgccgccaaccacugcgggaccaucgccaacggcguccugcagaccuucaugcgcauggcguggggcgggagcuacaucgcccucgacuccggcugcgggagcugggacugcaucaugacguccuaccaguaccugaucauccagaacaccaccugggaggaccacugccaguucagccggcccagccccaucggcuaccuggggcuccugucccagcgcacccgggacaucuacaucagccgccggcugcucggcacguucaccuggacccuguccgacagcgagggcaacgagacccccgggggcuacugccugacgcgcuggaugcucaucgaggccgagcugaagugcuucgggaacaccgccguggccaagugcaacgagaagcacgacgaggaguucugcgacaugcugcggcuguucgacuucaacaagcaggcgauccgccggcugaagaccccggcccagauguccauccagcugaucaacaaggccgugaacgcccucaucaacgaccagcugaucaugaagaaccaccuccgcgacaucaugugcauccccuacugcaacuacagcaaguacugguaccucaaccacaccgucacgggcaagaccucccugccccggugcuggcuggugagcaacggguccuaccucaacgagacccacuucagcgacgacaucgagcagcaggccgacaacaugaucaccgagcugcugcagaaggaguacaucgaccgccagggcaagacgccgcugggccucguggaccuguucgucuucuccaccagcuucuaccugaucuccaucuuccuccaccuggugaagauccccacccaccggcacaucaccgggaagcccugccccaagccgcaccgccugaaccacaugggcaucugcagcugcgggcucuacaaccaccccggcgugcccgucaaguggaagcggugaggacuaguuauaagacugacuagcccgaugggccucccaacgggcccuccuccccuccuugcaccgagauuaaucaaaggcucuuuucagagccaccaaaaaaaaaaaaaaaaaaaaaaaaaaaaaaaaaaaaaaaaaaaaaaaaaaaaaaaaaaaaaaaaaaaaaaaaaaaaaaaaaaaaaaaaaaaaaaaaaaaaa

SEQ ID NO: 29521 - RNA, 1686 nt, Artificial Sequence
  mRNA product Design i-3 (hSL-A100) comprising derived and/or modified sequence from LASV(Lassa virus/H.sapiens-wt/NGA/2016/ISTH_0017;Clade II)__AVO03567__GPCmut5 (opt1)
aggagaaagcuuaccaugggccagaucaucaccuucuuccaggaggugccccacgucaucgaggaggugaugaacaucgugcugaucgcccucagccugcuggccauccucaaggggaucuacaacgucgcgaccugcggccuguucgggcugguguccuuccuccugcugugcggccgcagcugcuccacgaccuacaaggggguguacgagcuccagacccuggagcuggacauggccagccucaacaugaccaugccgcuguccugcacgaagaacaacagccaccacuacaucauggucggcaacgagaccggccuggagcucacccugaccaacacguccaucaucaaccacaaguucugcaaccugagcgacgcccacaagaagaaccucuacgaccacgcccugauguccaucaucagcaccuuccaccuguccauccccaacuucaaccaguacgaggccaugagcugcgacuucaacgggggcaagaucuccgugcaguacaaccucagccacaccuacgcgaucgacgccgccaaccacugcgggaccaucgccaacggcgugcugcagacguucaugcggauggcguggggcggguccuacaucgcccuggacagcggcugcggguccugggacugcaucaugaccagcuaccaguaccucaucauccagaacaccaccugggaggaccacugccaguucucccgccccagccccaucggcuaccuggggcugcucagccagcggacgcgcgacaucuacaucucccggcgccugcugggcaccuucaccuggacccucagcgacuccgagggcaacgagacgcccgggggcuacugccugacccgguggaugcugaucgaggccgagcucaagugcuucgggaacaccgccgucgccaagugcaacgagaagcacgacgaggaguucugcgacaugcugcgccuguucgacuucaacaagcaggcgauccggcgccucaagaccccggcccagaugagcauccagcugaucaacaaggccgugaacgcccugaucaacgaccagcucaucaugaagaaccaccuccgggacaucaugugcauccccuacugcaacuacuccaaguacugguaccugaaccacacggugaccggcaagaccagccugccccgcugcuggcuggucuccaacgggagcuaccugaacgagacccacuucuccgacgacaucgagcagcaggccgacaacaugaucacggagcuccugcagaaggaguacauggaccggcagggcaagaccccgcugggccugguggaccucuucguguucagcaccuccuucuaccugaucagcaucuuccugcaccucguccgcauccccacccaccggcacgugaucgggaagcccugccccaagccgcaccgccugaaccacaugggcaucugcuccugcgggcuguacaagcaccccggcgugcccgucaaguggaagcggugaggacuaguuauaagacugacuagcccgaugggccucccaacgggcccuccuccccuccuugcaccgagauuaaucaaaggcucuuuucagagccaccaaaaaaaaaaaaaaaaaaaaaaaaaaaaaaaaaaaaaaaaaaaaaaaaaaaaaaaaaaaaaaaaaaaaaaaaaaaaaaaaaaaaaaaaaaaaaaaaaaaaa

SEQ ID NO: 29522 - RNA, 1686 nt, Artificial Sequence
  mRNA product Design i-3 (hSL-A100) comprising derived and/or modified sequence from LASV(Lassa virus/H.sapiens-wt/NGA/2018/ISTH_0959;Clade II)__AVV65099__GPCmut5 (opt1)
aggagaaagcuuaccaugggccagaucaucaccuucuuccaggaggugccccacgucaucgaggaggugaugaacaucgugcugaucgcccucagccugcuggccauccucaaggggaucuacaacgucgugaccugcggccuguucgggcugguguccuuccuccugcugugcggccgcagcugcuccacgaccuacaagggggucuacgagcuccagacccuggagcuggacauggcgagccucaacaugaccaugccgcuguccugcacgaagaacaacagccaccacuacaucauggugggcaacgagaccggccuggagcucacccugaccaacacguccaucaucaaccacaaguucugcaaccugagcgacgcccacaagaagaaccucuacgaccacgcccugauguccaucaucagcaccuuccaccuguccauccccaacuucaaccaguacgaggccaugagcugcgacuucaacgggggcaagaucuccgugcaguacaaccucagccacgccuacgcgaucgacgccgccaaccacugcgggaccaucgccaacggcguccugcagaccuucaugcggauggcguggggcggguccuacaucgcccuggacagcggcugcggguccugggacugcaucaugacgagcuaccaguaccucaucauccagaacaccaccugggaggaccacugccaguucucccgccccagccccaucggcuaccuggggcugcucagccagcggacccgcgacaucuacaucucccggcgccugcugggcacguucaccuggacccucagcgacuccgagggcaacgagacccccgggggcuacugccugacgcgguggaugcugaucgaggccgagcucaagugcuucgggaacaccgccguggccaagugcaacgagaagcacgacgaggaguucugcgacaugcugcgccuguucgacuucaacaagcaggcgauccggcgccucaagaccccggcccagaugagcauccagcugaucaacaaggccgugaacgcccugaucaacgaccagcucaucaugaagaaccaccuccgggacaucaugugcauccccuacugcaacuacuccaaguacugguaccugaaccacaccgucacgggcaagaccagccugccccgcugcuggcugguguccaacgggagcuaccugaacgagacccacuucuccgacgacaucgagcagcaggccgacaacaugaucaccgagcuccugcagaaggaguacaucgaccggcagggcaagacgccgcugggccugguggaccucuucgucuucagcaccuccuucuaccugaucagcaucuuccugcaccucgugaagauccccacccaccgccacgugaucgggaagcccugccccaagccgcaccggcugaaccacaugggcaucugcuccugcgggcuguacaagcaccccggcguccccgugaaguggaagcgcugaggacuaguuauaagacugacuagcccgaugggccucccaacgggcccuccuccccuccuugcaccgagauuaaucaaaggcucuuuucagagccaccaaaaaaaaaaaaaaaaaaaaaaaaaaaaaaaaaaaaaaaaaaaaaaaaaaaaaaaaaaaaaaaaaaaaaaaaaaaaaaaaaaaaaaaaaaaaaaaaaaaaa

SEQ ID NO: 29523 - RNA, 1686 nt, Artificial Sequence
  mRNA product Design i-3 (hSL-A100) comprising derived and/or modified sequence from LASV(LASV003-NIG-2008;Clade II)__AIT17580__GPCmut5 (opt1)
aggagaaagcuuaccaugggccagaucaucaccuucuuccaggaggugccccacgucaucgaggaggugaugaacaucgugcugaucgcccucagccugcuggccauccucaaggggaucuacaacgucgcgaccugcggccuguucgggcugguguccuuccuccugcugugcggccgcagcugcuccacgaccuacaaggggguguacgagcuccagacccuggagcuggacauggccagccucaacaugaccaugccgcuguccugcacgaagaacaacagccaccacuacaucauggucggcaacgagaccggccuggagcucacccugaccaacacguccaucaucaaccacaaguucugcaaccugagcgacgcccacaagaagaaccucuacgaccacgcccugauguccaucaucagcaccuuccaccuguccauccccaacuucaaccaguacgaggccaugagcugcgacuucaacgggggcaagaucuccgugcaguacaaccucagccacaccuacgcgguggacgccgccaaccacugcgggaccaucgccaacggcguccugcagacguucaugcggauggcguggggcggguccuacaucgcccuggacagcggcugcggguccugggacugcaucaugaccagcuaccaguaccucaucauccagaacaccaccugggaggaccacugccaguucucccgccccagccccaucggcuaccuggggcugcucagccagcggacgcgcgacaucuacaucucccggcgccugcugggcaccuucaccuggacccucagcgacuccgagagcaacgagacgccgggcggguacugccugacccgguggaugcugaucgaggccgagcucaagugcuucggcaacaccgccguggccaagugcaacgagaagcacgacgaggaguucugcgacaugcugcgccuguucgacuucaacaagcaggcgauccggcgccucaaggcccccgcccagauguccauccagcugaucaacaaggccgugaacgcccugaucaacgaccagcucaucaugaagaaccaccuccgggacaucaugugcauccccuacugcaacuacagcaaguacugguaccugaaccacaccgucacggggcgcaccucccugccccggugcuggcuggugagcaacggcuccuaccugaacgagacccacuucagcgacgacaucgagcagcaggcggacaacaugaucaccgagcuccugcagaaggaguacauggaccgccaggggaagacgccgcugggccugguggaccucuucgucuucuccaccagcuucuaccugaucuccaucuuccugcaccucgugaagauccccacccaccggcacgugaucggcaagcccugccccaagccgcaccgccugaaccacauggggaucugcagcugcggccuguacaagcaccccgggguccccgugaaguggaagcggugaggacuaguuauaagacugacuagcccgaugggccucccaacgggcccuccuccccuccuugcaccgagauuaaucaaaggcucuuuucagagccaccaaaaaaaaaaaaaaaaaaaaaaaaaaaaaaaaaaaaaaaaaaaaaaaaaaaaaaaaaaaaaaaaaaaaaaaaaaaaaaaaaaaaaaaaaaaaaaaaaaaaa

SEQ ID NO: 29524 - RNA, 1686 nt, Artificial Sequence
  mRNA product Design i-3 (hSL-A100) comprising derived and/or modified sequence from LASV(LASV035-NIG-2009;Clade II)__AIT17588__GPCmut5 (opt1)
aggagaaagcuuaccaugggccagaucaucaccuucuuccaggaggugccccacgucaucgaggaggugaugaacaucgugcugaucgcccucagccugcuggccauccucaaggggaucuacaacgucgcgaccugcggccuguucgggcugguguccuuccuccugcugugcggccgcagcugcuccacgaccuacaaggggguguacgagcuccagacccuggagcuggacauggccagccucaacaugaccaugccgcuguccugcacgaagaacaacagccaccacuacaucauggucggcaacgagaccggccuggagcucacccugaccaacacguccaucaucaaccacaaguucugcaaccugagcgacgcccacaagaagaaccucuacgaccacgcccugauguccaucaucagcaccuuccaccuguccauccccaacuucaaccaguacgaggccaugagcugcgacuucaacgggggcaagaucuccgugcaguacaaccucagccacgcguacgccguggacgccgccaaccacugcgggaccaucgcgaacggcguccugcagaccuucaugcggauggccuggggcggguccuacaucgcccuggacagcggcugcggguccugggacugcaucaugacgagcuaccaguaccucaucauccagaacaccaccugggaggaccacugccaguucucccgccccagccccaucggcuaccuggggcugcucagccagcggacccgcgacaucuacaucucccggcgccugcugggcacguucaccuggacccucagcgacuccgagggcaacgagacccccgggggcuacugccugacgcgguggaugcugaucgaggccgagcucaagugcuucgggaacaccgccguggcgaagugcaacgagaagcacgacgaggaguucugcgacaugcugcgccuguucgacuucaacaagcaggccauccggcgccucaaggccccggcccagaugagcauccagcugaucaacaaggccgugaacgcgcugaucaacgaccagcucaucaugaagaaccaccuccgggacaucaugugcauccccuacugcaacuacuccaaguacugguaccugaaccacaccgucaccggcaagacgagccugccccgcugcuggcugguguccaacgggagcuaccugaacgagacccacuucuccgacgacaucgagcagcaggccgacaacaugaucaccgagcuccugcagaaggaguacaucgaccggcagggcaagaccccgcugggccugguggaccucuucgucuucagcacguccuucuaccugaucagcaucuuccugcaccucgugaagauccccacccaccgccacgugaucgggaagcccugccccaagccgcaccggcugaaccacaugggcaucugcuccugcgggcuguacaagcaccccggcguccccgugaaguggaagcgcugaggacuaguuauaagacugacuagcccgaugggccucccaacgggcccuccuccccuccuugcaccgagauuaaucaaaggcucuuuucagagccaccaaaaaaaaaaaaaaaaaaaaaaaaaaaaaaaaaaaaaaaaaaaaaaaaaaaaaaaaaaaaaaaaaaaaaaaaaaaaaaaaaaaaaaaaaaaaaaaaaaaaa

SEQ ID NO: 29525 - RNA, 1686 nt, Artificial Sequence
  mRNA product Design i-3 (hSL-A100) comprising derived and/or modified sequence from LASV(LASV1000-NIG-2009;Clade II)__AIT17782__GPCmut5 (opt1)
aggagaaagcuuaccaugggccagaucaucaccuucuuccaggaggugccccacgucaucgaggaggugaugaacaucgugcugaucgcccucagccugcuggccauccucaaggggaucuacaacgucgcgaccugcggccuguucgggcugguguccuuccuccugcugugcggccgcagcugcuccacgaccuacaaggggguguacgagcuccagacccuggagcuggacauggccagccucaacaugaccaugccgcuguccugcacgaagaacaacagccaccacuacaucauggucggcaacgagaccggccuggagcucacccugaccaacacguccaucaucaaccacaaguucugcaaccugagcgacgcccacaagaagaaccucuacgaccacgcccugauguccaucaucagcaccuuccaccuguccauccccaacuucaaccaguacgaggccaugagcugcgacuucaacgggggcaagaucuccgugcaguacaaccucagccacaccuacgcgguggacgccgccaaccacugcgggaccaucgccaacggcguccugcagacguucaugcggauggcguggggcggguccuacaucgcccuggacagcggcugcggguccugggacugcaucaugaccagcuaccaguaccucaucauccagaacaccaccugggaggaccacugccaguucucccgccccagccccaucggcuaccuggggcugcucagccagcggacgcgcgacaucuacaucucccggcgccugcugggcaccuucaccuggacccucagcgacuccgagggcaacgagacgcccgggggcuacugccugacccgguggaugcugaucgaggccgagcucaagugcuucgggaacaccgccguggccaagugcaacgagaagcacgacgaggaguucugcgacaugcugcgccuguucgacuucaacaagcaggcgaucaagcggcucaagaccccggcccagaugagcauccagcugaucaacaaggccgugaacgcccugaucaacgaccagcucaucaugaagaaccaccuccgcgacaucaugugcauccccuacugcaacuacuccaaguacugguaccugaaccacacggucaccggcaagaccagccugccccggugcuggcugguguccaacgggagcuaccugaacgagacccacuucuccgacgacaucgagcagcaggccgacaacaugaucacggagcuccugcagaaggaguacaucgaccgccagggcaagaccccgcugggccugguggaccucuucgucuucagcaccuccuucuaccugaucagcaucuuccugcaccucgugaagauccccacccaccggcacguggucgggaagcccugccccaagccgcaccgccugaaccacaugggcaucugcuccugcgggcuguacaagcaccccggcgugcccgugaaguggaagcggugaggacuaguuauaagacugacuagcccgaugggccucccaacgggcccuccuccccuccuugcaccgagauuaaucaaaggcucuuuucagagccaccaaaaaaaaaaaaaaaaaaaaaaaaaaaaaaaaaaaaaaaaaaaaaaaaaaaaaaaaaaaaaaaaaaaaaaaaaaaaaaaaaaaaaaaaaaaaaaaaaaaaa

SEQ ID NO: 29526 - RNA, 1686 nt, Artificial Sequence
  mRNA product Design i-3 (hSL-A100) comprising derived and/or modified sequence from LASV(LASV221-NIG-2010;Clade II)__AIT17624__GPCmut5 (opt1)
aggagaaagcuuaccaugggccagaucaucaccuucuuccaggaggugccccacgucaucgaggaggugaugaacaucgugcugaucgcccucagccugcuggccauccucaaggggaucuacaacgucgcgaccugcggccuguucgggcugguguccuuccuccugcugugcggccgcagcugcuccacgaccuacaaggggguguacgagcuccagacccuggagcuggacauggccagccucaacaugaccaugccgcuguccugcacgaagaacaacagccaccacuacaucauggucggcaacgagaccggccuggagcucacccugaccaacacguccaucaucaaccacaaguucugcaaccugagcgacgcccacaagaagaaccucuacgaccacgcccugauguccaucaucagcaccuuccaccuguccauccccaacuucaaccaguacgaggccaugagcugcgacuucaacgggggcaagaucuccgugcaguacaaccucagccacaccuacgcgaucgacgccgccaaccacugcgggaccaucgccaacggcgugcugcagacguucaugcggauggcguggggcggguccuacaucgcccuggacagcggcugcggguccugggacugcaucaugaccagcuaccaguaccucaucauccagaacaccaccugggaggaccacugccaguucucccgccccagccccaucggcuaccuggggcugcucagccagcggacgcgcgacaucuacaucucccggcgccugcugggcaccuucaccuggacccucagcgacuccgagggcaacgagacgcccgggggcuacugccugacccgguggaugcugaucgaggccgagcucaagugcuucgggaacaccgccgucgccaagugcaacgagaagcacgacgaggaguucugcgacaugcugcgccuguucgacuucaacaagcaggcgauccggcgccucaagaccccggcccagaugagcauccagcugaucaacaaggccgugaacgcccugaucaacgaccagcucaucaugaagaaccaccuccgggacaucaugugcauccccuacugcaacuacuccaaguacugguaccugaaccacacggugaccggcaagaccagccugccccgcugcuggcuggucuccaacgggagcuaccugaacgagacccacuucuccgacgacaucgagcagcaggccgacaacaugaucacggagaugcuccagaaggaguacauggaccggcagggcaagaccccgcugggccugguggaccuguucguguucagcaccuccuucuaccucaucagcaucuuccugcaccuggucaagauccccacccaccgccacgugaucgggaagcccugccccaagccgcaccggcucaaccacaugggcaucugcuccugcgggcuguacaagcaccccggcgugcccgucaaguggaagcgcugaggacuaguuauaagacugacuagcccgaugggccucccaacgggcccuccuccccuccuugcaccgagauuaaucaaaggcucuuuucagagccaccaaaaaaaaaaaaaaaaaaaaaaaaaaaaaaaaaaaaaaaaaaaaaaaaaaaaaaaaaaaaaaaaaaaaaaaaaaaaaaaaaaaaaaaaaaaaaaaaaaaaa

SEQ ID NO: 29527 - RNA, 1686 nt, Artificial Sequence
  mRNA product Design i-3 (hSL-A100) comprising derived and/or modified sequence from LASV(LASV237-NIG-2010;Clade II)__AIT17638__GPCmut5 (opt1)
aggagaaagcuuaccaugggccagaucaucaccuucuuccaggaggugccccacgucaucgaggaggugaugaacaucgugcugaucgcccucagccugcuggccauccucaaggggaucuacaacgucgcgaccugcggccuguucgggcugguguccuuccuccugcugugcggccgcagcugcuccacgaccuacaaggggguguacgagcuccagacccuggagcuggacauggccagccucaacaugaccaugccgcuguccugcacgaagaacaacagccaccacuacaucauggucggcaacgagaccggccuggagcucacccugaccaacacguccaucaucaaccacaaguucugcaaccugagcgacgcccacaagaaggaccucuacgaccacgcccugauguccaucaucagcaccuuccaccuguccauccccaacuucaaccaguacgaggccaugagcugcgacuucaacgggggcaagaucuccgugcaguacaaccucagccacaccuacgcgguggacgccgccaaccacugcgggaccaucgccaacggcguccugcagacguucaugcggauggcguggggcggguccuacaucgcccuggacagcggcugcggguccugggacugcaucaugaccagcuaccaguaccucaucauccagaacaccaccugggaggaccacugccaguucucccgccccagccccaucggcuaccuggggcugcucagccagcggacgcgcgacaucuacaucucccggcgccugcugggcaccuucaccuggacccucagcgacuccgagggcaacgagacgcccgggggcuacugccugacccgguggaugcugaucgaggccgagcucaagugcuucgggaacaccgccguggccaagugcaacgagaagcacgacgaggaguucugcgacaugcugcgccuguucgacuucaacaagcaggcgauccggcgccucaagaccccggcccagaugagcauccagcugaucaacaaggccgugaacgcccugaucaacgaccagcucaucaugaagaaccaccuccgggacaucaugugcauccccuacugcaacuacuccaaguacugguaccugaaccacacggucaccggcaagaccagccugccccgcugcuggcugguguccaacgggagcuaccugaacgagacccacuucuccgacgacaucgagcagcaggccgacaacaugaucacggagcuccugcagaaggaguacauggaccggcagggcaagaccccgcugggccugguggaccucuucgucuucagcaccuccuucuaccugaucagcaucuuccugcaccucaucaagauccccacccaccgccacaucacggggaagcccugccccaagccgcaccggcugaaccacaugggcaucugcuccugcgggcuguacaagcaccccggcgugcccgugaaguggaagcgcugaggacuaguuauaagacugacuagcccgaugggccucccaacgggcccuccuccccuccuugcaccgagauuaaucaaaggcucuuuucagagccaccaaaaaaaaaaaaaaaaaaaaaaaaaaaaaaaaaaaaaaaaaaaaaaaaaaaaaaaaaaaaaaaaaaaaaaaaaaaaaaaaaaaaaaaaaaaaaaaaaaaaa

SEQ ID NO: 29528 - RNA, 1686 nt, Artificial Sequence
  mRNA product Design i-3 (hSL-A100) comprising derived and/or modified sequence from LASV(LASV253-NIG-2011;Clade II)__AIT17670__GPCmut5 (opt1)
aggagaaagcuuaccaugggccagaucaucaccuucuuccaggaggugccccacgucaucgaggaggugaugaacaucgugcugaucgcccucagccugcuggccauccucaaggggaucuacaacgucgcgaccugcggccuguucgggcugguguccuuccuccugcugugcggccgcagcugcuccacgaccuacaaggggguguacgagcuccagacccuggagcuggacauggccagccucaacaugaccaugccgcuguccugcacgaagaacaacagccaccacuacaucauggucggcaacgagaccggccuggagcucacccugaccaacacguccaucaucaaccacaaguucugcaaccugagcgacgcccacaagaagaaccucuacgaccacgcccugauguccaucaucagcaccuuccaccuguccauccccaacuucaaccaguacgaggccaugagcugcgacuucaacgggggcaagaucuccgugcaguacaaccucagccacaccuacgcgguggacgccgccaaccacugcgggaccaucgccaacggcguccugcagacguucaugcggauggcguggggcggguccuacaucgcccuggacagcggcugcggguccugggacugcaucaugaccagcuaccaguaccucaucauccagaacaccaccugggaggaccacugccaguucucccgccccagccccaucggcuaccuggggcugcucagccagcggacgcgcgacaucuacaucucccggcgccugcugggcaccuucaccuggacccucagcgacuccgagggcaacgagacgcccgggggcuacugccugacccgguggaugcugaucgaggccgagcucaagugcuucgggaacaccgccguggccaagugcaacgagaagcacgacgaggaguucugcgacaugcugcgccuguucgacuucaacaagcaggcgauccggcgccucaaggccccggcccagaugagcauccagcugaucaacaaggccgugaacgcccugaucaacgaccagcucaucaugaagaaccaccuccgggacaucaugugcauccccuacugcaacuacuccaaguacugguaccugaaccacaccgucacgggccgcaccagccugccccggugcuggcugguguccaacgggagcuaccugaacgagacccacuucuccgacgacaucgagcagcaggcggacaacaugaucaccgagcuccugcagaaggaguacaucgaccgccagggcaagacgccgcugggccugguggaccucuucgucuucagcaccuccuucuaccugaucagcaucuuccugcaccucgugaagauccccacccaccggcacaucaucgggaagcccugccccaagccgcaccgccugaaccacaugggcaucugcuccugcgggcuguacaagcaccccggcgugcccgucaaguggaagcggugaggacuaguuauaagacugacuagcccgaugggccucccaacgggcccuccuccccuccuugcaccgagauuaaucaaaggcucuuuucagagccaccaaaaaaaaaaaaaaaaaaaaaaaaaaaaaaaaaaaaaaaaaaaaaaaaaaaaaaaaaaaaaaaaaaaaaaaaaaaaaaaaaaaaaaaaaaaaaaaaaaaaa

SEQ ID NO: 29529 - RNA, 1686 nt, Artificial Sequence
  mRNA product Design i-3 (hSL-A100) comprising derived and/or modified sequence from LASV(LASV254-NIG-2011;Clade II)__AIT17674__GPCmut5 (opt1)
aggagaaagcuuaccaugggccagaucaucaccuucuuccaggaggugccccacgucaucgaggaggugaugaacaucgugcugaucgcccucagccugcuggccauccucaaggggaucuacaacgucgcgaccugcggccuguucgggcugguguccuuccuccugcugugcggccgcagcugcuccacgaccuacaaggggguguacgagcuccagacccuggagcuggacaugaccaaccucaacaugacgaugccgcugagcugcaccaagaacaacucccaccacuacaucauggucggcaacgagaccggccuggagcucacccugacgaacaccagcaucaucaaccacaaguucugcaaccuguccgacgcccacaagaagaaccucuacaaccacgcccugaugagcaucaucuccaccuuccaccugagcauccccaacuucaaccaguacgaggccauguccugcgacuucaacgggggcaagaucagcgugcaguacaaccucucccacagcuacgccguggacgcggccaaccacugcgggaccaucgccaacggcguccugcagacguucaugcggauggccuggggcggguccuacaucgcgcuggacagcggcugcgggaacugggacugcaucaugaccuccuaccaguaccucaucauccagaacaccaccugggaggaccacugccaguucagccgccccucccccaucggcuaccuggggcugcucagccagcggacgcgcgacaucuacaucagccggcgccugcugggcaccuucaccuggacccucuccgacagcgagggcaacgagacgcccgggggcuacugccugacccgguggaugcugaucgaggccgagcucaagugcuucgggaacaccgccguggccaagugcaacgagaagcacgacgaggaguucugcgacaugcugcgccuguucgacuucaacaagcaggccauccggcgccucaagaccccggcgcaggccaacauccagcugaucaacaaggccgugaacgcccugaucaacgaccagcucaucaugaagaaccaccuccgggacaucaugugcauccccuacugcaacuacuccaaguacugguaccugaaccacacggucaccggcaagaccagccugccccgcugcuggcugguguccaacgggagcuaccugaacgagacccacuucuccgacgacaucgagcagcaggccgacaacaugaucacggagcuccugcagaaggaguacauggaccggcagggcaagaccccgcugggccugguggaccucuucgucuucagcaccuccuucuaccugaucagcaucuuccugcaccucgugaagauccccacccaccgccacgugaucgggaagcccugccccaagccgcaccggcugaaccacaugggcaucugcuccugcgggcuguacaagcaccccggcguccccgugaaguggaagcgcugaggacuaguuauaagacugacuagcccgaugggccucccaacgggcccuccuccccuccuugcaccgagauuaaucaaaggcucuuuucagagccaccaaaaaaaaaaaaaaaaaaaaaaaaaaaaaaaaaaaaaaaaaaaaaaaaaaaaaaaaaaaaaaaaaaaaaaaaaaaaaaaaaaaaaaaaaaaaaaaaaaaaa

SEQ ID NO: 29530 - RNA, 1686 nt, Artificial Sequence
  mRNA product Design i-3 (hSL-A100) comprising derived and/or modified sequence from LASV(Nig08-A19;Clade III)__ADU56618__GPCmut5 (opt1)
aggagaaagcuuaccaugggccagaucgugaccuucuuccaggaggucccccacgugaucgaggaggugaugaacaucguccugaucgcccucagcauccuggccauccugaaggggcucuacaacaucgcgaccugcggccugaucgggcuggugacguuccuccugcuguccggccgcagcugcuccaugaccuacaaggggguguacgagcuccagacccuggagcugaacaugaacacccucaacaugacgaugccgcugagcugcaccaagaacaacucccaccacuacaucauggucggcaacgagaccggccuggagcucacccugacgaacaccagccugcuccaccacaaguucugcaaccuguccgacgcccacaagaagaaccuguacgaccacacccucaugagcaucaucuccaccuuccaccugagcauccccaacuucaaccaguacgaggccauguccugcgacuucaacgggggcaagaucacggugcaguacaaccugagccacuccuacgccaucgacgccgcgaaccacugcgggaccguggccaacggcguccuccagaccuucaugcggauggccuggggcgggagcuacaucgcccuggacuccggcugcgggaagugggacugcaucaugaccagcuaccaguaccugaucauccagaacacgaccugggaggaccacugccaguucucccgccccagccccaucggcuaccucgggcugcugucccagcggacccgcgacaucuacaucagccggcgccuccugggcaccuucacguggacccugagcgacuccgagggcaacgagacccccgggggcuacugccucacccgguggaugcugaucgaggcggagcugaagugcuucgggaacacggccguggccaagugcaacgagaagcacgacgaggaguucugcgacaugcuccgccuguucgacuucaacaagcaggccauccggcgccugaaggccccggcgcagaugagcauccagcucaucaacaaggccgugaacgcccugaucaacgaccagcugaucaugaagaaccaccuccgggacaucaugugcauccccuacugcaacuacuccaaguacugguaccugaaccacaccagcaccggccgcaccucccugccccggugcuggcucgucagcaacggguccuaccugaacgagacgcacuucagcgacgacaucgagcagcaggccgacaacaugaucaccgagaugcugcagaaggaguaccuggaccgccagggcaagaccccgcucggccugguggaccuguucguguucuccaccagcuucuaccucaucuccaucuuccugcaccuggucaagauccccacgcaccggcacaucguggggaagcccugccccaagccgcaccgccucaaccacaugggcaucugcagcugcgggcuguacaagcagcccggcgugcccguccgguggaagcgcugaggacuaguuauaagacugacuagcccgaugggccucccaacgggcccuccuccccuccuugcaccgagauuaaucaaaggcucuuuucagagccaccaaaaaaaaaaaaaaaaaaaaaaaaaaaaaaaaaaaaaaaaaaaaaaaaaaaaaaaaaaaaaaaaaaaaaaaaaaaaaaaaaaaaaaaaaaaaaaaaaaaaa

SEQ ID NO: 29531 - RNA, 1689 nt, Artificial Sequence
  mRNA product Design i-3 (hSL-A100) comprising derived and/or modified sequence from LASV(G1180-SLE-2010;Clade IV)__AIT17168__GPCmut5 (opt1)
aggagaaagcuuaccaugggccagaucgugaccuucuuccaggaggucccccacgugaucgaggaggugaugaacaucguccugaucgcccucagcauccuggccgugcugaaggggcucuacaacuucgcgaccugcggccugguggggcugcucacguuccugcugcucugcggccgcuccugcaccgccagccgguacaagggggucuacgagcugcagacccuggagcucaacauggagacccugaacaugacgaugccgcuguccugcaccaagaacaacagccaccacuacaucauggugggcaacgagaccggccucgagcugacccugacgaacaccuccaucaucaaccacaaguucugcaaccucagcgacgcccacaagaagaaccuguacgaccacgcccugauguccaucaucagcaccuuccaccucuccauccccaacuucaaccaguacgaggccaugagcugcgacuucaacgggggcaagaucuccgugcaguacaaccugagccacuccuacgcgggggacgccgccaaccacugcggcaccgucgccaacggggugcugcagacguucaugcgcauggcguggggcggcagcuacaucgcccucgacuccgggugcggcagcugggacugcaucaugaccuccuaccaguaccugaucauccagaacaccaccugggaggaccacugccaguucagccggcccucccccaucggguaccugggccuccugagccagcgcacgcgggacaucuacaucagccgccggcugcucggcaccuucaccuggacccuguccgacagcgaggggaaggacacgccgggcggguacugccugacccgcuggaugcucaucgaggccgagcugaagugcuucggcaacaccgccguggccaagugcaacgagaagcacgacgaggaguucugcgacaugcugcggcuguucgacuucaacaagcaggcgauccagcgccugaaggcccccgcccagauguccauccagcugaucaacaaggccgucaacgcccucaucaacgaccagcugaucaugaagaaccaccuccgggacaucaugugcauccccuacugcaacuacagcaaguacugguaccucaaccacaccacgaccgggaagaccucccugcccaagugcuggcuggugagcaacggcuccuaccucaacgagacccacuucagcgacgacaucgagcagcaggcggacaacaugaucacggagaugcugcagaaggaguacauggagcgccagggcaagaccccgcuggggcugguggaccucuucgucuucuccaccagcuucuaccugaucuccaucuuccugcaccucgugaagauccccacccaccggcacaucgugggcaagagcugccccaagccccaccgccugaaccacauggggaucugcuccugcggccuguacaagcagccggggguccccgugaaguggaagcggugaggacuaguuauaagacugacuagcccgaugggccucccaacgggcccuccuccccuccuugcaccgagauuaaucaaaggcucuuuucagagccaccaaaaaaaaaaaaaaaaaaaaaaaaaaaaaaaaaaaaaaaaaaaaaaaaaaaaaaaaaaaaaaaaaaaaaaaaaaaaaaaaaaaaaaaaaaaaaaaaaaaaa

SEQ ID NO: 29532 - RNA, 1689 nt, Artificial Sequence
  mRNA product Design i-3 (hSL-A100) comprising derived and/or modified sequence from LASV(G1442-SLE-2011;Clade IV)__AIT17180__GPCmut5 (opt1)
aggagaaagcuuaccaugggccagaucgugaccuucuuccaggaggucccccacgugaucgaggaggugaugaacaucguccugaucgcccucagcauccuggccgugcugaaggggcucuacaacguggcgaccugcggccugaucgggcuggucacguuccuccugcugugcggccgcuccugcaccaccacccucuacaaggggguguacgagcugcagacgcuggagcucaacauggagacccugaacaugaccaugccgcugagcugcaccaagaacaacucccaccacuacauccgggugggcaacgagacgggccucgagcugacccugaccaacaccagcaucaucaaccacaaguucugcaaccucuccgacgcccacaagaagaaccuguacgaccacgcccugaugagcaucaucuccacguuccaccucagcauccccaacuucaaccaguacgaggccauguccugcgacuucaacgggggcaagaucagcguccaguacaaccugucccacagcuacgccggggacgcggccaaccacugcggcaccguggccaacggggugcugcagaccuucaugcgcauggccuggggcggcuccuacaucgcgcucgacagcgggugcggcaacugggacugcaucaugaccuccuaccaguaccugaucauccagaacacgaccugggacgaccacugccaguucagccggcccucccccaucggguaccugggccuccugagccagcgcacccgggacgucuacaucucccgccggcugcucggcaccuucacguggacccugagcgacagcgaggggaaggacaccccgggcggguacugccugacccgcuggaugcucaucgaggccgagcugaagugcuucggcaacacggccguggccaagugcaacgagaagcacgacgaggaguucugcgacaugcugcggcuguucgacuucaacaagcaggccauccagcgccugaaggcgcccgcccagauguccauccagcugaucaacaaggccgugaacgcccucaucaacgaccagcugaucaugaagaaccaccuccgggacaucaugugcauccccuacugcaacuacagcaaguacugguaccucaacaacaccgccaccgggaagaccucccugcccaagugcuggcugaucagcaacggcuccuaccucaacgagacgcacuucagcgacgacaucgagcaggaggcggacaacaugaucaccgagaugcugcagaaggaguacauggagcgccagggcaagaccccgcuggggcuggucgaccucuucguguucuccaccagcuucuaccugaucuccaucuuccugcaccucgugaagauccccacgcaccggcacaucgucggcaagagcugccccaagccccaccgccugaaccacauggggaucugcuccugcggccuguacaagcagccgggggugcccgugcgguggaagcgcugaggacuaguuauaagacugacuagcccgaugggccucccaacgggcccuccuccccuccuugcaccgagauuaaucaaaggcucuuuucagagccaccaaaaaaaaaaaaaaaaaaaaaaaaaaaaaaaaaaaaaaaaaaaaaaaaaaaaaaaaaaaaaaaaaaaaaaaaaaaaaaaaaaaaaaaaaaaaaaaaaaaaa

SEQ ID NO: 29533 - RNA, 1689 nt, Artificial Sequence
  mRNA product Design i-3 (hSL-A100) comprising derived and/or modified sequence from LASV(G3010-SLE-2013;Clade IV)__AIT17344__GPCmut5 (opt1)
aggagaaagcuuaccaugggccagaucgugaccuucuuccaggaggucccccacgugaucgaggaggugaugaacaucguccugaucgcccucagcauccuggccgugcugaaggggcucuacaacuucgcgaccugcggccugguggggcuggucacguuccuccugcugugcggccgcuccugcaccaccagccucuacaaggggguguacgagcugcagacccuggagcucaacauggagacgcugaacaugaccaugccgcuguccugcaccaagaacaacagccaccacuacaucauggugggcaacgagaccggccucgagcugacgcugaccaacaccuccaucaucaaccacaaguucugcaaccucagcgacgcccacaagaagaaccuguacaaccacgcccugauguccaucaucagcaccuuccaccucuccauccccaacuucaaccaguacgaggccaugagcugcgacuucaacgggggcaagaucuccguccaguacaaccugagccacuccuacgccggggacgcggccagccacugcggcacgguggccaacggggugcugcagaccuucaugcggauggccuggggcggcuccuacaucgcgcucgacagcgggugcggcaagugggacugcaucaugaccuccuaccaguaccugaucauccagaacaccacgugggaggaccacugccaguucagccgccccucccccaucggguaccugggccuccugagccagcggacccgcgacaucuacaucagccggcgccugcucggcaccuucaccuggacgcuguccgacagcgaggggaaggacaccccgggcggguacugccugacccgguggaugcucaucgaggccgagcugaagugcuucggcaacaccgccgucgccaagugcaacgagaagcacgacgaggaguucugcgacaugcugcgccucuucgacuucaacaagcaggccauccagcggcugaagacgcccgcgcagauguccauccagcugaucaacaaggccgugaacgcccucaucaacgaccagcugaucaugaagaaccaccuccgcgacaucaugugcauccccuacugcaacuacagcaaguacugguaccugaaccacaccaccaccgggaagacgucccugcccaagugcuggcuggugagcaacggcuccuaccucaacgagacccacuucagcgacgacaucgagcagcaggccgacaacaugaucaccgagaugcugcagaaggaguacauggagcggcagggcaagaccccgcuggggcuggucgaccucuucguguucuccacgagcuucuaccugaucuccaucuuccugcaccucgugaagauccccacccaccgccacaucgucggcaagagcugccccaagccccaccggcugaaccacauggggaucugcuccugcggccuguacaagcagccgggggugcccgugcgcuggaagcggugaggacuaguuauaagacugacuagcccgaugggccucccaacgggcccuccuccccuccuugcaccgagauuaaucaaaggcucuuuucagagccaccaaaaaaaaaaaaaaaaaaaaaaaaaaaaaaaaaaaaaaaaaaaaaaaaaaaaaaaaaaaaaaaaaaaaaaaaaaaaaaaaaaaaaaaaaaaaaaaaaaaaa

SEQ ID NO: 29534 - RNA, 1689 nt, Artificial Sequence
  mRNA product Design i-3 (hSL-A100) comprising derived and/or modified sequence from LASV(G502-SLE-2009;Clade IV)__AIT17126__GPCmut5 (opt1)
aggagaaagcuuaccaugggccagaucgugaccuucuuccaggaggucccccacgugaucgaggaggugaugaacaucguccugaucgcccucagcauccuggccgugcugaaggggcucuacaacuucgcgaccugcggccugguggggcugcucacguuccugcugcucugcggccgcuccugcaccaccgggcuguacaagggcgucuacgagcugcagacccucgagcugaacauggagacgcugaacaugaccaugccgcucagcugcaccaagaacaacucccaccacuacaucauggugggcaacgagaccgggcuggagcugacgcucaccaacaccagcaucaucaaccacaaguucugcaaccuguccgacgcccacaagaagaaccuguacgaccacgcccucaugagcaucaucuccaccuuccaccugagcauccccaacuucaaccaguacgaggccauguccugcgacuucaacggcgggaagaucagcgugcaguacaaccugucccacagcuacgccggcgacgcggccgaccacugcgggacggucgccaacggcgugcuccagaccuucaugcggauggccuggggcggguccuacaucgcgcuggacagcggcugcgggcgcugggacugcaucaugaccuccuaccaguaccugaucauccagaacaccacgugggaggaccacugccaguucagccggcccucccccaucggcuaccucggccugcugagccagcgcacccgggacaucuacaucucccgccggcuccuggggaccuucaccuggacgcugagcgacagcgagggcaaggacacccccgggggcuacugccucacccgcuggaugcugaucgaggccgagcugaagugcuucgggaacaccgccguggccaagugcaacgagaagcacgacgaggaguucugcgacaugcuccggcuguucgacuucaacaagcaggccauccagcgccugaaggcgccggcccagauguccauccagcucaucaacaaggccgucaacgcccugaucaacgaccagcuggugaugaagaaccaccuccgggacaucaugugcauccccuacugcaacuacagccgcuacugguaccugaaccacacgaccaccggccggaccucccugcccaagugcuggcucgugagcaacggcuccuaccugaacgagacgcacuucagcgacgacaucgagcagcaggccgacaacaugaucaccgagaugcugcagaaggaguacauggagcgccaggggaagaccccgcugggccucgucgaccuguucguguucuccaccagcuucuaccugaucuccaucuuccuccaccuggugaagauccccacgcaccggcacaucgucggcaagagcugccccaagccccaccgccugaaccacauggggaucugcuccugcgggcucuacaagcagccgggcgugcccgugaaguggaagcggugaggacuaguuauaagacugacuagcccgaugggccucccaacgggcccuccuccccuccuugcaccgagauuaaucaaaggcucuuuucagagccaccaaaaaaaaaaaaaaaaaaaaaaaaaaaaaaaaaaaaaaaaaaaaaaaaaaaaaaaaaaaaaaaaaaaaaaaaaaaaaaaaaaaaaaaaaaaaaaaaaaaaa

SEQ ID NO: 29535 - RNA, 1689 nt, Artificial Sequence
  mRNA product Design i-3 (hSL-A100) comprising derived and/or modified sequence from LASV(G733-SLE-2010;Clade IV)__AIT17154__GPCmut5 (opt1)
aggagaaagcuuaccaugggccagaucgugaccuucuuccaggaggucccccacgugaucgaggaggugaugaacaucguccugaucgcccucagcauccuggccgugcugaaggggcucuacaacuucgcgaccugcggcaucguggggcuggucuccuuccugcuccugugcggccgcagcugcacgaccucccuguacaaggggguguacgagcuccagacccuggagcugaacauggagacccucaacaugacgaugccgcugagcugcaccaagaacaacucccaccacuacaucauggugggcaacgagaccggccuggagcucacccugacgaacaccagcaucaucaaccacaaguucugcaaccuguccgacgcccacaagaagaaccucuacgaccacgcccugaugagcaucaucuccaccuuccaccugagcauccccaacuucaaccaguacgaggccauguccugcgacuucaacgggggcaagaucagcguccaguacaaccucucccacagcuacgccggggacgcggccaaccacugcggcaccaucgccaacggggugcugcagacguucaugcggauggccuggggcggcuccuacaucgcgcuggacagcgggugcgaccgcugggacugcaucaugaccuccuaccaguaccucaucauccagaacaccaccugggaggaccacugccaguucagccggcccucccccaucggcuaccuggggcugcucagccagcgcacgcgggacaucuacaucagccgccggcugcugggcaccuucaccuggacccucuccgacagcgagggcaaggacacgcccgggggcuacugccugacccgcuggaugcugaucgaggccgagcucaagugcuucgggaacaccgccguggccaagugcaacgagaagcacgacgaggaguucugcgacaugcugcggcuguucgacuucaacaagcaggccauccagcgccucaaggcgccggcccagauguccauccagcugaucaacaaggccgucaacgcccugaucaacgaccagcucaucaugaagaaccaccuccgggacaucaugugcauccccuacugcaacuacagcaaguacugguaccugaaccacaccacgaccggcaagaccucccugcccaagugcuggcuggugagcaacggguccuaccugaacgagacccacuucagcgacgacaucgagcagcaggccgacaacaugaucacggagaugcuccagaaggaguacauggagcgccagggcaagaccccgcugggccugguggaccuguucgucuucuccaccagcuucuaccucaucuccaucuuccugcaccuggugaagauccccacccaccggcacguggucggcaagagcugccccaagccccaccgccucaaccacauggggaucugcuccugcgggcuguacggccagccgggggugcccgugaaguggaagcggugaggacuaguuauaagacugacuagcccgaugggccucccaacgggcccuccuccccuccuugcaccgagauuaaucaaaggcucuuuucagagccaccaaaaaaaaaaaaaaaaaaaaaaaaaaaaaaaaaaaaaaaaaaaaaaaaaaaaaaaaaaaaaaaaaaaaaaaaaaaaaaaaaaaaaaaaaaaaaaaaaaaaa

SEQ ID NO: 29536 - RNA, 1689 nt, Artificial Sequence
  mRNA product Design i-3 (hSL-A100) comprising derived and/or modified sequence from MOPV/LASV reassortant(IGS-1;Clade IV)__AFY05576__GPCmut5 (opt1)
aggagaaagcuuaccaugggccagaucgugaccuucuuccaggaggucccccacgugaucgaggaggugaugaacaucguccugaucgcccucagcgugcuggccgugcugaaggggcucuacaacuucgcgaccugcggccuggucgggcuggugacguuccuccugcugugcggccgcuccugcaccaccagccucuacaaggggguguacgagcugcagacccuggagcucaacauggagacgcugaacaugaccaugccgcuguccugcaccaagaacaacagccaccacuacaucauggucggcaacgagaccggccucgagcugacgcugaccaacaccuccaucaucaaccacaaguucugcaaccucagcgacgcccacaagaagaaccuguacgaccacgcccugauguccaucaucagcaccuuccaccucuccauccccaacuucaaccaguacgaggccaugagcugcgacuucaacgggggcaagaucuccgugcaguacaaccugagccacuccuacgccggggacgcggccaaccacugcggcacgguggccaacgggguccugcagaccuucaugcggauggccuggggcggcagcuacaucgcgcucgacuccgggugcggcaacugggacugcaucaugaccagcuaccaguaccugaucauccagaacaccacgugggaggaccacugccaguucucccgccccagccccaucggguaccugggccuccugucccagcggacccgcgacaucuacaucagccggcgccugcucggcaccuucaccuggacgcugagcgacuccgagggggaggacaccccgggcggguacugccugacccgguggaugcucaucgaggccgagcugaagugcuucggcaacaccgccguggccaagugcaacgagaagcacgacgaggaguucugcgacaugcugcgccucuucgacuucaacaagcaggccauccagcggcugaaggcgcccgcccagaugagcauccagcugaucaacaaggccgugaacgcccucaucaacgaccagcugaucaugaagaaccaccuccgcgacaucaugugcauccccuacugcaacuacuccaaguacugguaccugaaccacacgaccaccgggcggaccagccugcccaagugcuggcuggucuccaacggcagcuaccucaacgagacgcacuucuccgacgacaucgagcagcaggccgacaacaugaucaccgagaugcugcagaaggaguacauggagcgccagggcaagaccccgcuggggcugguggaccucuucguguucagcaccuccuucuaccugaucagcaucuuccugcaccucgucaagauccccacgcaccggcacaucgugggcaaguccugccccaagccccaccgccugaaccacauggggaucugcagcugcggccuguacaagcagccgggggugcccgucaaguggaagcggugaggacuaguuauaagacugacuagcccgaugggccucccaacgggcccuccuccccuccuugcaccgagauuaaucaaaggcucuuuucagagccaccaaaaaaaaaaaaaaaaaaaaaaaaaaaaaaaaaaaaaaaaaaaaaaaaaaaaaaaaaaaaaaaaaaaaaaaaaaaaaaaaaaaaaaaaaaaaaaaaaaaaa

SEQ ID NO: 29537 - RNA, 1689 nt, Artificial Sequence
  mRNA product Design i-3 (hSL-A100) comprising derived and/or modified sequence from LASV(LM765-SLE-2012;Clade IV)__AIT17814__GPCmut5 (opt1)
aggagaaagcuuaccaugggccagaucgugaccuucuuccaggaggucccccacgugaucgaggaggugaugaacaucguccugaucgcccucagcauccuggccgugcugaaggggcucuacaacuucgcgaccugcggccugguggggcuggucacguuccuccugcugugcggccgcuccugcaccaccagccucuacaaggggguguacgagcugcagacccuggagcucaacauggagacgcugaacaugaccaugccgcuguccugcaccaagaacaacagccaccacuacaucauggugggcaacgagaccggccucgagcugacgcugaccaacaccuccaucaucgaccacaaguucugcaaccucagcgacgcccaccggaagaaccuguacgaccacgcccugauguccaucaucagcaccuuccaccucuccauccccaacuucaaccaguacgaggccaugagcugcgacuucaacgggggcaagaucuccguccaguacaaccugagccacuccuacgccaaggacgcggccgaccacugcgggacgguggccaacggcgugcugcagaccuucaugcgcauggccuggggcgggagcuacaucgcgcucgacuccggcugcgggcggugggacugcaucaugaccagcuaccaguaccugaucauccagaacaccacgugggaggaccacugccaguucucccgccccagccccaucggcuaccuggggcuccugucccagcggacccgcgacaucuacaucagccggcgccugcucggcaccuucaccuggacgcugagcgacuccgagggcaaggacacccccgggggcuacugccugacccgguggaugcucaucgaggccgagcugaagugcuucgggaacaccgccgucgccaagugcaacgagaagcacgacgaggaguucugcgacaugcugcgccucuucgacuucaacaagcaggccauccagcggcugaaggcgccggcccagaugagcauccagcugaucaacaaggccgugaacgcccucaucaacgaccagcugaucaugaagaaccaccuccgcgacaucaugugcauccccuacugcaacuacuccaaguacugguaccugaaccacacgaccaccggcaagaccagccugcccaagugcuggcugguguccaacgggagcuaccucaacgagacgcacuucuccgacgacaucgagcagcaggccgacaacaugaucaccgagaugcugcagaaggaguacauggagcggcagggcaagaccccgcugggccuggucgaccucuucguguucagcaccuccuucuaccugaucagcaucuuccugcaccucgugaagauccccacgcaccgccacaucgucgggaagcccugccccaagccgcaccggcugaaccacaugggcaucugcuccugcgggcuguacaagcagcccggcgugcccgugaaguggaagcgcugaggacuaguuauaagacugacuagcccgaugggccucccaacgggcccuccuccccuccuugcaccgagauuaaucaaaggcucuuuucagagccaccaaaaaaaaaaaaaaaaaaaaaaaaaaaaaaaaaaaaaaaaaaaaaaaaaaaaaaaaaaaaaaaaaaaaaaaaaaaaaaaaaaaaaaaaaaaaaaaaaaaaa

SEQ ID NO: 29538 - RNA, 1689 nt, Artificial Sequence
  mRNA product Design i-3 (hSL-A100) comprising derived and/or modified sequence from LASV(LM776-SLE-2012;Clade IV)__AIT17824__GPCmut5 (opt1)
aggagaaagcuuaccaugggccagaucgugaccuucuuccaggaggucccccacgugaucgaggaggugaugaacaucguccugaucgcccucagcauccuggccgugcugaaggggcucuacaacuucgcgaccugcggccugguggggcuggucacguuccuccugcugugcggccgcuccugcaccaccagcguguacaaggggguguacgagcuccagacccuggagcugaacauggagacgcucaacaugaccaugccgcuguccugcaccaagaacaacagccaccacuacaucauggucggcaacgagaccggccuggagcucacgcugaccaacaccuccaucaucaaccacaaguucugcaaccugagcgacgcccacaagaagaaccucuacgaccacgcccugauguccaucaucagcaccuuccaccuguccauccccaacuucaaccaguacgaggccaugagcugcgacuucaacgggggcaagaucuccgugcaguacaaccucagccacuccuacgccggggacgcggccaaccacugcggcacgguggccaacgggguccugcagaccuucaugcggauggccuggggcggcagcuacaucgcgcuggacuccgggugcggcaagugggacugcaucaugaccagcuaccaguaccucaucauccagaacaccacgugggaggaccacugccaguucucccgccccagccccaucggguaccugggccugcucucccagcggacccgcgacaucuacaucagccggcgccugcugggcaccuucaccuggacgcucagcgacuccgaggggaaggacaccccgggcggguacugccugacccgguggaugcugaucgaggccgagcucaagugcuucggcaacaccgccguggccaagugcaacgagaagcacgacgaggaguucugcgacaugcugcgccuguucgacuucaacaagcaggccauccagcggcucaaggcgcccgcccagaugagcauccagcugaucaacaaggccgugaacgcccugaucaacgaccagcucaucaugaagaaccaccuccgcgacaucaugugcauccccuacugcaacuacuccaaguacugguaccugaaccacacgaccaccgggaagaccagccugcccaagugcuggcuggucuccaacggcagcuaccugaacgagacgcacuucuccgacgacaucgagcagcaggccgacaacaugaucaccgagaugcuccagaaggaguacauggagcggcagggcaagaccccgcuggggcugguggaccuguucguguucagcaccuccuucuaccucaucagcaucuuccugcaccuggucaagauccccacgcaccgccacaucgugggcaaguccugccccaagccccaccggcucaaccacauggggaucugcagcugcggccuguacaagcagccgggggugcccguccgcuggaagcggugaggacuaguuauaagacugacuagcccgaugggccucccaacgggcccuccuccccuccuugcaccgagauuaaucaaaggcucuuuucagagccaccaaaaaaaaaaaaaaaaaaaaaaaaaaaaaaaaaaaaaaaaaaaaaaaaaaaaaaaaaaaaaaaaaaaaaaaaaaaaaaaaaaaaaaaaaaaaaaaaaaaaa

SEQ ID NO: 29539 - RNA, 1689 nt, Artificial Sequence
  mRNA product Design i-3 (hSL-A100) comprising derived and/or modified sequence from LASV(Mad39;Clade IV)__ANH09722__GPCmut5 (opt1)
aggagaaagcuuaccaugggccagaucgugaccuucuuccaggaggucccccacgugaucgaggaggugaugaacaucguccugaucgcccucagcauccuggccgugcugaaggggcucuacaacguggcgaccugcggccugaucgggcuggucacguuccuccugcugugcggccgcuccugcaccaccacccucuacaaggggguguacgagcugcaggcccuggagcucaacauggagacgcugaacaugaccaugccgcugagcugcaccaagaacaacucccaccacuacauccgggugggcaacgagaccggccucgagcugacgcugaccaacaccagccucaucaaccacaaguucugcaaccuguccgacgcccacaagaagaaccuguacgaccacgcccucaugagcaucaucuccaccuuccaccugagcauccccaacuucaaccaguacgaggccauguccugcgacuucaacgacgggaagaucagcguccaguacaaccugucccacacguacgcgggcgacaccgccaaccacugcgggaccguggccaacggcgugcuccagaccuucaugcgcauggccuggggcgggagcuacaucgcgcuggacuccggcugcgggggcugggacugcaucaugacgagcuaccaguaccugaucauccagaacaccaccugggaggaccacugccaguucucccggcccagccccaucggguaccucggccugcugucccagcgcacccgggacaucuacaucagccgccggcuccugggcacguucaccuggacccuguccgacagcgaggggaaggacaccccgggcggguacugccucacgcgcuggaugcugaucgaggccgagcugaagugcuucggcaacaccgccgucgccaagugcaacgagaagcacgacgaggaguucugcgacaugcuccggcuguucgacuucaacaagcaggccauccagcgccugaaggcgcccgcccagaugagcauccagcucaucaacaaggccgugaacgcccugaucaacgaccagcugaucaugaagaaccaccuccgggacaucaugugcauccccuacugcaacuacuccaaguacugguaccugaaccacaccgugaccgggaagacgagccugcccaagugcuggcucgucuccaacggcagcuaccugaacgagacccacuucuccgacgacaucgagcagcaggccgacaacaugaucaccgagaugcugcagaaggaguacauggagcgccagggcaagaccccgcuggggcucguggaccuguucguguucagcacguccuucuaccugaucagcaucuuccuccaccuggucaagauccccacccaccggcacguggugggcaagcccugccccaagccgcaccgccugaaccacauggggaucugcuccugcggcuucuacaagcagcccgggguccccgugcgguggaagcgcugaggacuaguuauaagacugacuagcccgaugggccucccaacgggcccuccuccccuccuugcaccgagauuaaucaaaggcucuuuucagagccaccaaaaaaaaaaaaaaaaaaaaaaaaaaaaaaaaaaaaaaaaaaaaaaaaaaaaaaaaaaaaaaaaaaaaaaaaaaaaaaaaaaaaaaaaaaaaaaaaaaaaa

SEQ ID NO: 29540 - RNA, 1689 nt, Artificial Sequence
  mRNA product Design i-3 (hSL-A100) comprising derived and/or modified sequence from LASV(Z0947-SLE-2011;Clade IV)__AIT17840__GPCmut5 (opt1)
aggagaaagcuuaccaugggccagaucgugaccuucuuccaggaggucccccacgugaucgaggaggugaugaacaucguccugaucgcccucagcauccuggccgugcugaaggggcucuacaacuucgcgaccugcggccugguggggcuggucacguuccuccugcugugcggccgcuccugcaccaucagccucuacaaggggguguacgagcugcagacccuggagcucaacauggagacccugaacaugacgaugccgcuguccugcaccaagaacaacagccaccacuacaucauggugggcaacgagaccggccucgagcugacccugacgaacaccuccaucaucaaccacaaguucugcaaccucagcgacgcccacaagaagaaccuguacgaccacgcccugauguccaucaucagcaccuuccaccucuccauccccaacuucaaccaguacgaggccaugagcugcgacuucaacgggggcaagaucuccguccaguacaaccugagccacuccuacgccggggacgcggccaaccacugcggcaccguggccaacggggugcugcagacguucaugcggauggccuggggcggcagcuacaucgcgcucgacuccgggugcgaccgcugggacugcaucaugaccagcuaccaguaccugaucauccagaacaccaccugggaggaccacugccaguucucccggcccagccccaucggcuaccuggggcuccugucccagcgcacgcgggacaucuacaucagccgccggcugcucggcaccuucaccuggacccugagcgacuccgagggcaaggacacgcccgggggcuacugccugacccgcuggaugcucaucgaggccgagcugaagugcuucgggaacaccgccgucgccaagugcaacgagaagcacgacgaggaguucugcgacaugcugcggcuguucgacuucaacaagcaggccauccagcgccugaaggcgccggcccagaugagcauccagcugaucaacaaggccgugaacgcccucaucaacgaccagcugaucaugaagaaccaccuccgggacaucaugugcauccccuacugcaacuacuccaaguacugguaccucaaccacaccacgaccggcaagaccagccugcccaagugcuggcugguguccaacgggagcuaccucaacgagacccacuucuccgacgacaucgagcagcaggccgacaacaugaucacggagaugcugcagaaggaguacauggagcgccagggcaagaccccgcugggccuggucgaccucuucguguucagcaccuccuucuaccugaucagcaucuuccugcaccucgugaagauccccacccaccggcacaucgucgggaagcccugccccaagccgcaccgccugaaccacaugggcaucugcuccugcgggcuguacaagcagcccggcgugcccgugaaguggaagcggugaggacuaguuauaagacugacuagcccgaugggccucccaacgggcccuccuccccuccuugcaccgagauuaaucaaaggcucuuuucagagccaccaaaaaaaaaaaaaaaaaaaaaaaaaaaaaaaaaaaaaaaaaaaaaaaaaaaaaaaaaaaaaaaaaaaaaaaaaaaaaaaaaaaaaaaaaaaaaaaaaaaaa

SEQ ID NO: 29541 - RNA, 1689 nt, Artificial Sequence
  mRNA product Design i-3 (hSL-A100) comprising derived and/or modified sequence from LASV(Josiah;Clade IV)__NP_694870__GPCmut5 (opt4)
aggagaaagcuuaccaugggccagaucgugaccuucuuccaggaggugccccacgugaucgaggaggugaugaacaucgugcugaucgcccugagcgugcuggccgugcugaagggccuguacaacuucgccaccugcggccuggugggccuggugaccuuccugcugcugugcggcagaagcugcaccaccagccuguacaagggcguguacgagcugcagacccuggagcugaacauggagacccugaacaugaccaugccccugagcugcaccaagaacaacagccaccacuacaucauggugggcaacgagaccggccuggagcugacccugaccaacaccagcaucaucaaccacaaguucugcaaccugagcgacgcccacaagaagaaccuguacgaccacgcccugaugagcaucaucagcaccuuccaccugagcauccccaacuucaaccaguacgaggccaugagcugcgacuucaacggcggcaagaucagcgugcaguacaaccugagccacagcuacgccggcgacgccgccaaccacugcggcaccguggccaacggcgugcugcagaccuucaugagaauggccuggggcggcagcuacaucgcccuggacagcggcugcggcaacugggacugcaucaugaccagcuaccaguaccugaucauccagaacaccaccugggaggaccacugccaguucagcagacccagccccaucggcuaccugggccugcugagccagagaaccagagacaucuacaucagcagaagacugcugggcaccuucaccuggacccugagcgacagcgagggcaaggacacccccggcggcuacugccugaccagauggaugcugaucgaggccgagcugaagugcuucggcaacaccgccguggccaagugcaacgagaagcacgacgaggaguucugcgacaugcugagacuguucgacuucaacaagcaggccauccagagacugaaggcccccgcccagaugagcauccagcugaucaacaaggccgugaacgcccugaucaacgaccagcugaucaugaagaaccaccugagagacaucaugugcauccccuacugcaacuacagcaaguacugguaccugaaccacaccaccaccggcagaaccagccugcccaagugcuggcuggugagcaacggcagcuaccugaacgagacccacuucagcgacgacaucgagcagcaggccgacaacaugaucaccgagaugcugcagaaggaguacauggagagacagggcaagaccccccugggccugguggaccuguucguguucagcaccagcuucuaccugaucagcaucuuccugcaccuggugaagauccccacccacagacacaucgugggcaagagcugccccaagccccacagacugaaccacaugggcaucugcagcugcggccuguacaagcagcccggcgugcccgugaaguggaagagaugaggacuaguuauaagacugacuagcccgaugggccucccaacgggcccuccuccccuccuugcaccgagauuaaucaaaggcucuuuucagagccaccaaaaaaaaaaaaaaaaaaaaaaaaaaaaaaaaaaaaaaaaaaaaaaaaaaaaaaaaaaaaaaaaaaaaaaaaaaaaaaaaaaaaaaaaaaaaaaaaaaaaa

SEQ ID NO: 29542 - RNA, 1686 nt, Artificial Sequence
  mRNA product Design i-3 (hSL-A100) comprising derived and/or modified sequence from LASV(LP;Clade I)__AAF86701__GPCmut5 (opt4)
aggagaaagcuuaccaugggccagaucaucaccuucuuccaggaggugccccacgugaucgaggaggugaugaacaucgugcugaucgcccugagccugcuggccauccugaagggccuguacaacaucgccaccugcggcaucaucggccugguggccuuccuguuccugugcggcaagagcugcagccugacccugaagggcggcuacgagcugcagacccuggagcugaacauggagacccugaacaugaccaugccccugagcugcaccaagaacagcagccaccacuacaucagagugggcaacgagaccggccuggagcugacccugaccaacaccagcaucaucaaccacaaguucugcaaccugagcgacgcccacaagaagaaccuguacgaccacgcccugaugagcaucaucagcaccuuccaccugagcauccccaacuucaaccaguacgaggccaugagcugcgacuucaacggcggcaagaucagcgugcaguacaaccugagccacagcuacgccggcgacgccgccgagcacugcggcaccguggccaacggcgugcugcagaccuucaugagaauggccuggggcggcagauacaucgcccuggacagcggcugcggcaacugggacugcaucaugaccagcuaccaguaccugaucauccagaacaccaccugggaggaccacugccaguucagcagacccagccccaucggcuaccugggccugcugagccagagaaccagagacaucuacaucagcagaagacugcugggcaccuucaccuggacccugagcgacagcgagggcaacgagacccccggcggcuacugccugaccagauggaugcugaucgaggccgagcugaagugcuucggcaacaccgccguggccaagugcaacgagaagcacgacgaggaguucugcgacaugcugagacuguucgacuucaacaagcaggccaucagaagacugaaggcccccgcccagaugagcauccagcugaucaacaaggccgugaacgcccugaucaacgaccagcugaucaugaagaaccaccugagagacaucaugugcauccccuacugcaacuacagcaaguacugguaccugaaccacaccagcagcggcagaaccagccugcccaagugcuggcugaucagcaacggcagcuaccugaacgagacccaguucagcgacgacaucgagcagcaggccgacaacaugaucaccgagaugcugcagaaggaguacaucgagagacagggcaagaccccccugggccugguggacaucuucaucuucagcaccagcuucuaccugaucagcaucuuccugcaccugaucaagauccccacccacagacacaucgugggcaagcccugccccaagccccacagacugaaccacaugggcgugugcagcugcggccuguacaagcaccccggcgugcccaccaaguggaagagaugaggacuaguuauaagacugacuagcccgaugggccucccaacgggcccuccuccccuccuugcaccgagauuaaucaaaggcucuuuucagagccaccaaaaaaaaaaaaaaaaaaaaaaaaaaaaaaaaaaaaaaaaaaaaaaaaaaaaaaaaaaaaaaaaaaaaaaaaaaaaaaaaaaaaaaaaaaaaaaaaaaaaa

SEQ ID NO: 29543 - RNA, 1686 nt, Artificial Sequence
  mRNA product Design i-3 (hSL-A100) comprising derived and/or modified sequence from LASV(803213;Clade II)__AAF86703__GPCmut5 (opt4)
aggagaaagcuuaccaugggccagaucaucaccuucuuccaggaggugccccacgugaucgaggaggugaugaacaucgugcugaucgcccugagccugcuggccauccugaagggcaucuacaacguggccaccugcggccuguucggccugaucagcuuccugcugcugugcggcagaagcugcagcgugaccuacaagggcguguacgagcugcagacccuggagcugaacauggccaaccugaacaugaccaugccccugagcugcaccaagaacaacagccaccacuacaucauggugggcaacgagaccggccuggagcugacccugaccaacaccagcaucaucaaccacaaguucugcaaccugagcgacgcccacaagaagaaccuguacgaccacgcccugaugagcaucaucagcaccuuccaccugagcauccccaacuucaaccaguacgaggccaugagcugcgacuucaacggcggcaagaucagcgugcaguacaaccugagccacagcuucgccguggacgccgccaaccacugcggcaccaucgccaacggcgugcugcagaccuucaugagaauggccuggggcggcagcuacaucgcccuggacagcggcugcggcaacugggacugcaucaugaccagcuaccaguaccugaucauccagaacaccaccugggaggaccacugccaguucagcagacccagccccaucggcuaccugggccugcugagccagagaaccagagacaucuacaucagcagaagacugcugggcaccuucaccuggacccugagcgacagcgagggcaacgaggcccccggcggcuacugccugaccagauggaugcugaucgaggccgagcugaagugcuucggcaacaccgccguggccaagugcaacgagaagcacgacgaggaguucugcgacaugcugagacuguucgacuucaacaagcaggccaucaagagacugaagacccccgcccagaugagcauccagcugaucaacaaggccgugaacgcccugaucaacgaccagcugaucaugaagaaccaccugagagacaucaugugcauccccuacugcaacuacagcagauacugguaccugaaccacaccgugaccggcaagaccagccugcccagaugcuggcuggugagcaacggcagcuaccugaacgagacccacuucagcgacgacaucgagcagcaggccgacaacaugaucaccgagaugcugcagaaggaguacauggacagacagggcaagaccccccugggccugguggaccuguucguguucagcaccagcuucuaccugaucagcaucuuccugcaccuggugaagauccccacccacagacacaucgugggcaagcccugccccaagccccacagacugaaccacaugggcaucugcagcugcggccuguacaagcaccccggcgugcccgugaaguggaagagaugaggacuaguuauaagacugacuagcccgaugggccucccaacgggcccuccuccccuccuugcaccgagauuaaucaaaggcucuuuucagagccaccaaaaaaaaaaaaaaaaaaaaaaaaaaaaaaaaaaaaaaaaaaaaaaaaaaaaaaaaaaaaaaaaaaaaaaaaaaaaaaaaaaaaaaaaaaaaaaaaaaaaa

SEQ ID NO: 29544 - RNA, 1686 nt, Artificial Sequence
  mRNA product Design i-3 (hSL-A100) comprising derived and/or modified sequence from LASV(GA391;Clade III)__CAA36645__GPCmut5 (opt4)
aggagaaagcuuaccaugggccagaucgugaccuucuuccaggaggugccccacgugaucgaggaggugaugaacaucgugcugaucgcccugagcauccuggccauccugaagggccuguacaacguggccaccugcggccugaucggccuggugaccuuccugcugcugagcggcagaagcugcagccugaucuacaagggcaccuacgagcugcagacccuggagcugaacauggagacccugaacaugaccaugccccugagcugcaccaagaacaacagccaccacuacaucagagugggcaacgagaccggccuggagcugacccugaccaacaccagcauccugaaccacaaguucugcaaccugagcgacgcccacaagagaaaccuguacgaccacagccugaugagcaucaucagcaccuuccaccugagcauccccaacuucaaccaguacgaggccaugagcugcgacuucaacggcggcaagaucaccgugcaguacaaccugagccacagcuucgccguggacgccgccggccacugcggcacccuggccaacggcgugcugcagaccuucaugagaauggccuggggcggcagcuacaucgcccuggacagcggcugcggcaacugggacugcaucaugaccagcuaccaguaccugaucauccagaacaccaccugggacgaccacugccaguucagcagacccagccccaucggcuaccugggccugcugagccagagaaccagagacaucuacaucagcagaagacugcugggcaccuucaccuggacccugagcgacagcgagggcaacgagacccccggcggcuacugccugaccagauggaugcugaucgaggccgagcugaagugcuucggcaacaccgccguggccaagugcaacgagaagcacgacgaggaguucugcgacaugcugagacuguucgacuucaacaagcaggccaucagaagacugaagacccccgcccagaugagcauccagcugaucaacaaggccgugaacgcccugaucaacgaccagcugaucaugaagaaccaccugagagacaucaugugcauccccuacugcaacuacagcagauacugguaccugaaccacaccagcaccggcaagaccagccugcccagaugcuggcugaucagcaacggcagcuaccugaacgagaccaaguucagcgacgacaucgagcagcaggccgacaacaugaucaccgagaugcugcagaaggaguacaucgacagacagggcaagaccccccugggccugguggaccuguucguguucagcaccagcuucuaccugaucagcaucuuccugcaccuggugaagauccccacccacagacacaucgugggcaagcccugccccaagccccacagacugaaccacaugggcaucugcagcugcggccuguacaagcagcccggcgugcccgugagauggaagagaugaggacuaguuauaagacugacuagcccgaugggccucccaacgggcccuccuccccuccuugcaccgagauuaaucaaaggcucuuuucagagccaccaaaaaaaaaaaaaaaaaaaaaaaaaaaaaaaaaaaaaaaaaaaaaaaaaaaaaaaaaaaaaaaaaaaaaaaaaaaaaaaaaaaaaaaaaaaaaaaaaaaaa

SEQ ID NO: 29545 - RNA, 1689 nt, Artificial Sequence
  mRNA product Design i-3 (hSL-A100) comprising derived and/or modified sequence from LASV(AV;Clade V)__CCA30314__GPCmut5 (opt4)
aggagaaagcuuaccaugggccagaucgugaccuucuuccaggaggugccccacgugaucgaggaggugaugaacaucgugcugaucgcccugagcauccuggccgugcugaagggccuguacaacaucgccaccugcggccugaucggccugaucaccuuccugcugcugugcggcagaagcugcagcagcaaccuguacaagggcguguacgagcugcagagccuggaccugaacauggagacccugaacaugaccaugccccugagcugcaccaagaacaacagccaccacuacaucagagugggcaacgacaccggccuggagcugacccugaccaacaccagcauccugaaccacaaguucugcaaccugagcgacgcccacaagaaggaccuguacgaccacgcccugaugagcaucaucagcaccuuccaccugagcauccccaacuucaaccaguacgaggccaugagcugcgacuucaacggcggcaagaucagcgugcaguacaaccugagccacagcuacgccaucgacgccgccaaccacugcggcaccguggccaacggcauccugcagaccuucaugagaauggccuggggcggcagcuacaucgcccuggacagcggcugcggcaacugggacugcaucaugaccagcuaccaguaccugaucauccagaacaccaccugggagaaccacugccaguucagcagacccagccccaucggcuaccugggccugcugagccagagaaccagagacaucuacaucagcagaagacugcugggcaccuucaccuggacccugagcgacagcgagggcaacgccacccccggcggcuacugccugaccagauggaugcugaucgaggccgagcugaagugcuucggcaacaccgccguggccaagugcaacgagaagcacgacgaggaguucugcgacaugcugagacuguucgacuucaacaagcaggccaucagcagacugaagagccccgcccagaugagcauccagcugaucaacaaggccgugaacgcccugaucaacgaccagcugaucaugaagaaccaccugagagacaucaugugcauccccuacugcaacuacagcaaguacugguaccugaaccacaccaucaccggcaagaccagccugcccaagugcuggcuggugagcaacggcagcuaccugaacgagacccacuucagcgacgacaucgagcagcaggccgacaacaugaucaccgagaugcugcagaaggaguacauggagagacagggcaagaccccccugggccugguggaccuguucguguucagcaccagcuucuaccugaucagcaucuuccugagacuggugaagauccccacccacagacacaucgugggcaagcccugccccaagccccacagacugaaccacaugggcaucugcagcugcggccuguacaagcagcccggcgugcccgugagauggaagagaugaggacuaguuauaagacugacuagcccgaugggccucccaacgggcccuccuccccuccuugcaccgagauuaaucaaaggcucuuuucagagccaccaaaaaaaaaaaaaaaaaaaaaaaaaaaaaaaaaaaaaaaaaaaaaaaaaaaaaaaaaaaaaaaaaaaaaaaaaaaaaaaaaaaaaaaaaaaaaaaaaaaaa

SEQ ID NO: 29546 - RNA, 1686 nt, Artificial Sequence
  mRNA product Design i-3 (hSL-A100) comprising derived and/or modified sequence from LASV(Togo/2016/7082;Clade VI)__AMR44577__GPCmut5 (opt4)
aggagaaagcuuaccaugggccagaucaucaccuucuuccaggaggugccccacgugaucgaggaggugaugaacaucgugcugaucgcccugagccugcuggccauccugaagggcguguacaacguggccaccugcggcaucaucggccuggugaccuuccuguuccugugcggcagaagcugcagccugaucuacaagggcagcuacgagcugcagacccuggagcugaacauggagacccugaacaugaccaugccccugagcugcaccaagaacagcagccaccacuacaucagagugggcaacgagaccggccuggagcugacccugaccaacaccagcaucaucaaccacaaguucugcaaccugagcgacgcccacaagagaaaccuguacgaccacgcccugaugagcauccugagcaccuuccaccugagcauccccaacuucaaccaguacgaggccaugagcugcgacuucaacggcggcaagaucagcgugcaguacaaccugagccacgccuacgccguggacgccgccgagcacugcggcaccguggccaacggcgugcugcagaccuucaugagaauggccuggggcggcagcuacaucgcccuggacagcggcugcggcaacugggacugcaucaugaccagcuaccaguaccugaucauccagaacaccaccugggaggaccacugccaguucagcagacccagccccaucggcuaccugggccugcugagccagagaaccagagacaucuacaucagcagaagacugcugggcaccuucaccuggacccugagcgacagcgagggcaacgagacccccggcggcuacugccugaccagauggaugcugaucgaggccgagcugaagugcuucggcaacaccgccguggccaagugcaacgagaagcacgacgaggaguucugcgacaugcugagacuguucgacuucaacaagcaggccauccagagacugaagagccccgcccagaugagcauccagcugaucaacaaggccgugaacgcccugaucaacgaccagcugaucaugaagaaccaccugagagacaugaugugcauccccuacugcaacuacagcaaguacugguaccugaaccacaccagcagcggcagaaccagccugcccaagugcuggcuggugagcaacggcagcuaccugaacgagacccacuucagcgacgacaucgagcagcaggccgacaacaugaucaccgagaugcugcagaaggaguacaucgacagacagggcaagaccccccugggccugguggaccuguucguguucagcaccagcuucuaccugaucagcaucuuccugcaccugaucaagauccccacccacagacacaucgugggcaagcccugccccaagccccacagacugaaccacaugggcaucugcagcugcggccuguacaagcagcccggcgugcccaccagauggaagagaugaggacuaguuauaagacugacuagcccgaugggccucccaacgggcccuccuccccuccuugcaccgagauuaaucaaaggcucuuuucagagccaccaaaaaaaaaaaaaaaaaaaaaaaaaaaaaaaaaaaaaaaaaaaaaaaaaaaaaaaaaaaaaaaaaaaaaaaaaaaaaaaaaaaaaaaaaaaaaaaaaaaaa

SEQ ID NO: 29547 - RNA, 1686 nt, Artificial Sequence
  mRNA product Design i-3 (hSL-A100) comprising derived and/or modified sequence from LASV(KAK-428;Clade n.d. (VII))__ANH09740__GPCmut5 (opt4)
aggagaaagcuuaccaugggccagaucgugaccuucuuccaggaggugccccacgugaucgaggaggugaugaacaucgugcugaucgcccugagccugcuggccauccugaagggccuguacaacuucgccaccugcggcgugaucggccugaucaccuuccugcugcugugcggcagaagcugcagcgccaccuacaagggccaguacgagcugcagacccuggagcugaacauggagagccugaacaugaccaugccccugagcugcaccaagaacaacagccaccacuacaucagagccggcaacaacaccggccuggagcugacccugaccaacaccagcaucaucagccacaaguucugcaaccugagcgacgcccacaagaagaaccuguacgaccacacccugaugagcaucaucaccaccuuccaccugagcauccccaacuucaaccaguacgaggccaugagcugcgacuucaacggcggcaagaucagcauccaguacaaccugagccacagcuacgccggcgacgccgcccagcacugcggcaccguggccaacggcgugcugcagaccuucaugagaauggccuggggcggcagcuaccuggcccuggacagcggcugcagaggcugggacugcaucaucagcagcuaccaguaccugaucauccagaacaccaccugggacgaccacugccaguucagcagacccagccccaucggcuaccugggcuucgugagccagaagaccagagacaucuacaucagcagaagacugcugggcaccuucaccuggacccugagcgacagcgagggccacgacaugcccggcggcuacugccugaccagauggaugcugaucgaggccgaccugaagugcuucggcaacaccgccguggccaagugcaacgagaagcacgacgaggaguucugcgacauguggagacuguucgacuucaacaagcaggccauccagagacugaaggcccccgcccagaugaacauccagcugaucaacaaggccgugaacgcccugaucaacgaccagcugaugaugaagaaccaccugagagacaucaugugcauccccuacugcaacuacagcaaguucugguaccugaacaacaccaccaccggcagaaccagccugcccagaugcuggcugaucagcaacggcagcuaccugaacgagacccacuucagcgacgacaucgagcagcaggccgacaacaugaucaccgagaugcugcagaaggaguacauggacagacagggcaagaccccccugggccugguggaccuguucguguucagcaccagcuucuaccugaucaccaucuuccugcaccuggugaagauccccacccacagacacaucgugggcaagcccugccccaagccccacagacugaaccacaugggcaucugcagcugcggccuguacaagcagcccggcgugcccgugagauggaagagaugaggacuaguuauaagacugacuagcccgaugggccucccaacgggcccuccuccccuccuugcaccgagauuaaucaaaggcucuuuucagagccaccaaaaaaaaaaaaaaaaaaaaaaaaaaaaaaaaaaaaaaaaaaaaaaaaaaaaaaaaaaaaaaaaaaaaaaaaaaaaaaaaaaaaaaaaaaaaaaaaaaaaa

SEQ ID NO: 29548 - RNA, 1686 nt, Artificial Sequence; identical to SEQ ID NO: 29542
  mRNA product Design i-3 (hSL-A100) comprising derived and/or modified sequence from LASV(Pinneo-NIG-1969;Clade I)__AIT17836__GPCmut5 (opt4)

SEQ ID NO: 29549 - RNA, 1686 nt, Artificial Sequence
  mRNA product Design i-3 (hSL-A100) comprising derived and/or modified sequence from LASV(ISTH0009-NIG-2011;Clade II)__AIT17404__GPCmut5 (opt4)
aggagaaagcuuaccaugggccagaucaucaccuucuuccaggaggugccccacgugaucgaggaggugaugaacaucgugcugaucgcccugagccugcuggccauccugaagggcaucuacaacguggccaccugcggccuguucggccuggugagcuuccugcugcugugcggcagaagcugcagcaccaccuacaagggcguguacgagcugcagacccuggagcuggacauggccagccugaacaugaccaugccccugagcugcaccaagaacaacagccaccacuacaucauggugggcaacgagaccggccuggagcugacccugaccaacaccagcaucaucaaccacaaguucugcaaccugagcgacgcccacaagaagaaccuguacgaccacgcccugaugagcaucaucagcaccuuccaccugagcauccccaacuucaaccaguacgaggccaugagcugcgacuucaacggcggcaagaucagcgugcaguacaaccugagccacgccuacgccguggacgccgccaaccacugcggcaccaucgccaacggcgugcugcagaccuucaugagaauggccuggggcggcagcuacaucgcccuggacagcggcugcggcagcugggacugcaucaugaccagcuaccaguaccugaucauccagaacaccaccugggaggaccacugccaguucagcagacccagccccaucggcuaccugggccugcugagccagagaaccagagacaucuacaucagcagaagacugcugggcaccuucaccuggacccugagcgacagcgagggcaacgagacccccggcggcuacugccugaccagauggaugcugaucgaggccgagcugaagugcuucggcaacaccgccguggccaagugcaacgagaagcacgacgaggaguucugcgacaugcugagacuguucgacuucaacaagcaggccaucagaagacugaagacccccgcccagaugagcauccagcugaucaacaaggccgugaacgcccugaucaacgaccagcugaucaugaagaaccaccugagagacaucaugugcauccccuacugcaacuacagcaaguacugguaccugaaccacaccgugaccggcaagaccagccugcccagaugcuggcuggugagcaacggcagcuaccugaacgagacccacuucagcgacgacaucgagcagcaggccgacaacaugaucaccgagcugcugcagaaggaguacauggacagacagggcaagaccccccugggccugguggaccuguucguguucagcaccagcuucuaccugaucagcaucuuccugcaccugaucaagauccccacccacagacacaucaccggcaagcccugccccaagccccacagacugaaccacaugggcaucugcagcugcggccuguacaagcaccccggcgugcccgugaaguggaagagaugaggacuaguuauaagacugacuagcccgaugggccucccaacgggcccuccuccccuccuugcaccgagauuaaucaaaggcucuuuucagagccaccaaaaaaaaaaaaaaaaaaaaaaaaaaaaaaaaaaaaaaaaaaaaaaaaaaaaaaaaaaaaaaaaaaaaaaaaaaaaaaaaaaaaaaaaaaaaaaaaaaaaa

SEQ ID NO: 29550 - RNA, 1686 nt, Artificial Sequence
  mRNA product Design i-3 (hSL-A100) comprising derived and/or modified sequence from LASV(ISTH2010-NIG-2012;Clade II)__AIT17482__GPCmut5 (opt4)
aggagaaagcuuaccaugggccagaucaucaccuucuuccaggaggugccccacgugaucgaggaggugaugaacaucgugcugaucgcccugagccugcuggccauccugaagggcaucuacaacguggccaccugcggccuguucggccuggugagcuuccugcugcugugcggcagaagcugcagcaccaccuacaagggcguguacgagcugcagacccuggagcuggacauggccagccugaacaugaccaugccccugagcugcaccaagaacaacagccaccacuacaucauggugggcaacgagaccggccuggagcugacccugaccaacaccagcaucaucaaccacaaguucugcaaccugagcgacgcccacaagaagaaccuguacgaccacgcccugaugagcaucaucagcaccuuccaccugagcauccccaacuucaaccaguacgaggccaugagcugcgacuucaacggcggcaagaucagcgugcaguacaaccugagccacgccuacgccguggacgccgccaaccacugcggcaccaucgccaacggcgugcugcagaccuucaugagaauggccuggggcggcagcuacaucgcccuggacagcggcugcggcagcugggacugcaucaugaccagcuaccaguaccugaucauccagaacaucaccugggaggaccacugccaguucagcagacccagccccaucggcuaccugggccugcugagccagagaaccagagacaucuacaucagcagaagacugcugggcaccuucaccuggacccugagcgacagcgagggcaacgagacccccggcggcuacugccugaccagauggaugcugaucgaggccgagcugaagugcuucggcaacaccgccguggccaagugcaacgagaagcacgacgaggaguucugcgacaugcugagacuguucgacuucaacaagcaggccaucagaagacugaagacccccgcccagaugagcauccagcugaucaacaaggccgugaacgcccugaucaacgaccagcugaucaugaagaaccaccugagagacaucaugugcauccccuacugcaacuacagcaaguacugguaccugaaccacaccgugaccggcaagaccagccugcccagaugcuggcuggugagcaacggcagcuaccugaacgagacccacuucagcgacgacaucgagcagcaggccgacaacaugaucaccgagcugcugcagaaggaguacaucgacagacagggcaagaccccccugggccugguggaccuguucguguucagcaccagcuucuaccugaucagcaucuuccugcaccuggugaagauccccacccacagacacguggugggcaagcccugccccaagccccacagacugaaccacaugggcaucugcagcugcggccuguacaagcaccccggcgugcccgugaaguggaagagaugaggacuaguuauaagacugacuagcccgaugggccucccaacgggcccuccuccccuccuugcaccgagauuaaucaaaggcucuuuucagagccaccaaaaaaaaaaaaaaaaaaaaaaaaaaaaaaaaaaaaaaaaaaaaaaaaaaaaaaaaaaaaaaaaaaaaaaaaaaaaaaaaaaaaaaaaaaaaaaaaaaaaa

SEQ ID NO: 29551 - RNA, 1686 nt, Artificial Sequence
  mRNA product Design i-3 (hSL-A100) comprising derived and/or modified sequence from LASV(Lassa virus/H.sapiens-wt/NGA/2015/ISTH_0543;Clade II)__AVO03639__GPCmut5 (opt4)
aggagaaagcuuaccaugggccagaucaucaccuucuuccaggaggugccccacgugaucgaggaggugaugaacaucgugcugaucgcccugagccugcuggccauccugaagggcaucuacaacguggccaccugcggccuguucggccuggugagcuuccugcugcugugcggcagaagcugcagcaccaccuacaagggcguguacgagcugcagacccuggagcuggacauggccaaccugaacaugaccaugccccugagcugcaccaagaacaacagccaccacuacaucauggugggcaacgagaccggccuggagcugacccugaccaacaccagcaucaucaaccacaaguucugcaaccugagcgacgcccacaagaagaaccuguacgaccacgcccugaugagcaucaucagcaccuuccaccugagcauccccaacuucaaccaguacgaggccaugagcugcgacuucaacggcggcaagaucagcgugcaguacaaccugagccacaccuacgccguggacgccgccaaccacugcggcaccaucgccaacggcgugcugcagaccuucaugagaauggccuggggcggcagcuacaucgcccuggacagcggcugcggcagcugggacugcaucaugaccagcuaccaguaccuggugauccagaacaccaccugggaggaccacugccaguucagcagacccagccccaucggcuaccugggccugcugagccagagaaccagagacaucuacaucagcagaagacugcugggcaccuucaccuggacccugagcgacagcgagggcaacgagacccccggcggcuacugccugaccagauggaugcugaucgaggccgagcugaagugcuucggcaacaccgccguggccaagugcaacgagaagcacgacgaggaguucugcgacaugcugagacuguucgacuucaacaagcaggccaucagaagacugaagacccccgcccagaugagcauccagcugaucaacaaggccgugaacgcccugaucaacgaccagcugaucaugaagaaccaccugagagacaucaugugcauccccuacugcaacuacagcaaguacugguaccugaaccacaccgugaccggcaagaccagccugcccagaugcuggcuggugagcaacggcagcuaccugaacgagacccacuucagcgacgacaucgagcagcaggccgacaacaugaucaccgagcugcugcagaaggaguacaucgacagacagggcaagaccccccugggccugguggaccuguucguguucagcaccagcuucuaccugaucagcaucuuccugcaccuggugaagauccccacccacagacacaucaccggcaagcccugccccaagccccacagacugaaccacaugggcaucugcagcugcggccuguacaagcaccccggcgugcccgugaaguggaagagaugaggacuaguuauaagacugacuagcccgaugggccucccaacgggcccuccuccccuccuugcaccgagauuaaucaaaggcucuuuucagagccaccaaaaaaaaaaaaaaaaaaaaaaaaaaaaaaaaaaaaaaaaaaaaaaaaaaaaaaaaaaaaaaaaaaaaaaaaaaaaaaaaaaaaaaaaaaaaaaaaaaaaa

SEQ ID NO: 29552 - RNA, 1686 nt, Artificial Sequence
  mRNA product Design i-3 (hSL-A100) comprising derived and/or modified sequence from LASV(Lassa virus/H.sapiens-wt/NGA/2016/ISTH_0009;Clade II)__AVO03571__GPCmut5 (opt4)
aggagaaagcuuaccaugggccagaucaucaccuucuuccaggaggugccccacgugaucgaggaggugaugaacaucgugcugaucgcccugagccugcuggccauccugaagggcaucuacaacguggccaccugcggccugcugggccuggugagcuuccugcugcugugcggcagaagcugcagcaccaccuacaagggcguguacgagcugcagacccuggagcuggacauggccagccugaacaugaccaugccccugagcugcaccaagaacaacagccaccacuacaucauggugggcaacgagaccggccuggagcugacccugaccaacaccagcaucaucaaccacaaguucugcaaccugagcgacgcccacaagaagaaccuguacgaccacgcccugaugagcaucaucagcaccuuccaccugagcauccccaacuucaaccaguacgaggccaugagcugcgacuucaacggcggcagaaucagcgugcaguacaaccugagccacagcuacgccguggacgccgccaaccacugcggcaccaucgccaacggcgugcugcagaccuucaugagaauggccuggggcggcagcuacaucgcccuggacagcggcugcggcagcugggacugcaucaugaccagcuaccaguaccugaucauccagaacaccaccugggaggaccacugccaguucagcagacccagccccaucggcuaccugggccugcugagccagagaaccagagacaucuacaucagcagaagacugcugggcaccuucaccuggacccugagcgacagcgagggcaacgagacccccggcggcuacugccugaccagauggaugcugaucgaggccgagcugaagugcuucggcaacaccgccguggccaagugcaacgagaagcacgacgaggaguucugcgacaugcugagacuguucgacuucaacaagcaggccaucagaagacugaagacccccgcccagaugagcauccagcugaucaacaaggccgugaacgcccugaucaacgaccagcugaucaugaagaaccaccugagagacaucaugugcauccccuacugcaacuacagcaaguacugguaccugaaccacaccgugaccggcaagaccagccugcccagaugcuggcuggugagcaacggcagcuaccugaacgagacccacuucagcgacgacaucgagcagcaggccgacaacaugaucaccgagcugcugcagaaggaguacaucgacagacagggcaagaccccccugggccugguggaccuguucguguucagcaccagcuucuaccugaucagcaucuuccugcaccuggugaagauccccacccacagacacaucaccggcaagcccugccccaagccccacagacugaaccacaugggcaucugcagcugcggccuguacaaccaccccggcgugcccgugaaguggaagagaugaggacuaguuauaagacugacuagcccgaugggccucccaacgggcccuccuccccuccuugcaccgagauuaaucaaaggcucuuuucagagccaccaaaaaaaaaaaaaaaaaaaaaaaaaaaaaaaaaaaaaaaaaaaaaaaaaaaaaaaaaaaaaaaaaaaaaaaaaaaaaaaaaaaaaaaaaaaaaaaaaaaaa

SEQ ID NO: 29553 - RNA, 1686 nt, Artificial Sequence
  mRNA product Design i-3 (hSL-A100) comprising derived and/or modified sequence from LASV(Lassa virus/H.sapiens-wt/NGA/2016/ISTH_0017;Clade II)__AVO03567__GPCmut5 (opt4)
aggagaaagcuuaccaugggccagaucaucaccuucuuccaggaggugccccacgugaucgaggaggugaugaacaucgugcugaucgcccugagccugcuggccauccugaagggcaucuacaacguggccaccugcggccuguucggccuggugagcuuccugcugcugugcggcagaagcugcagcaccaccuacaagggcguguacgagcugcagacccuggagcuggacauggccagccugaacaugaccaugccccugagcugcaccaagaacaacagccaccacuacaucauggugggcaacgagaccggccuggagcugacccugaccaacaccagcaucaucaaccacaaguucugcaaccugagcgacgcccacaagaagaaccuguacgaccacgcccugaugagcaucaucagcaccuuccaccugagcauccccaacuucaaccaguacgaggccaugagcugcgacuucaacggcggcaagaucagcgugcaguacaaccugagccacaccuacgccaucgacgccgccaaccacugcggcaccaucgccaacggcgugcugcagaccuucaugagaauggccuggggcggcagcuacaucgcccuggacagcggcugcggcagcugggacugcaucaugaccagcuaccaguaccugaucauccagaacaccaccugggaggaccacugccaguucagcagacccagccccaucggcuaccugggccugcugagccagagaaccagagacaucuacaucagcagaagacugcugggcaccuucaccuggacccugagcgacagcgagggcaacgagacccccggcggcuacugccugaccagauggaugcugaucgaggccgagcugaagugcuucggcaacaccgccguggccaagugcaacgagaagcacgacgaggaguucugcgacaugcugagacuguucgacuucaacaagcaggccaucagaagacugaagacccccgcccagaugagcauccagcugaucaacaaggccgugaacgcccugaucaacgaccagcugaucaugaagaaccaccugagagacaucaugugcauccccuacugcaacuacagcaaguacugguaccugaaccacaccgugaccggcaagaccagccugcccagaugcuggcuggugagcaacggcagcuaccugaacgagacccacuucagcgacgacaucgagcagcaggccgacaacaugaucaccgagcugcugcagaaggaguacauggacagacagggcaagaccccccugggccugguggaccuguucguguucagcaccagcuucuaccugaucagcaucuuccugcaccuggugagaauccccacccacagacacgugaucggcaagcccugccccaagccccacagacugaaccacaugggcaucugcagcugcggccuguacaagcaccccggcgugcccgugaaguggaagagaugaggacuaguuauaagacugacuagcccgaugggccucccaacgggcccuccuccccuccuugcaccgagauuaaucaaaggcucuuuucagagccaccaaaaaaaaaaaaaaaaaaaaaaaaaaaaaaaaaaaaaaaaaaaaaaaaaaaaaaaaaaaaaaaaaaaaaaaaaaaaaaaaaaaaaaaaaaaaaaaaaaaaa

SEQ ID NO: 29554 - RNA, 1686 nt, Artificial Sequence
  mRNA product Design i-3 (hSL-A100) comprising derived and/or modified sequence from LASV(Lassa virus/H.sapiens-wt/NGA/2018/ISTH_0959;Clade II)__AVV65099__GPCmut5 (opt4)
aggagaaagcuuaccaugggccagaucaucaccuucuuccaggaggugccccacgugaucgaggaggugaugaacaucgugcugaucgcccugagccugcuggccauccugaagggcaucuacaacguggugaccugcggccuguucggccuggugagcuuccugcugcugugcggcagaagcugcagcaccaccuacaagggcguguacgagcugcagacccuggagcuggacauggccagccugaacaugaccaugccccugagcugcaccaagaacaacagccaccacuacaucauggugggcaacgagaccggccuggagcugacccugaccaacaccagcaucaucaaccacaaguucugcaaccugagcgacgcccacaagaagaaccuguacgaccacgcccugaugagcaucaucagcaccuuccaccugagcauccccaacuucaaccaguacgaggccaugagcugcgacuucaacggcggcaagaucagcgugcaguacaaccugagccacgccuacgccaucgacgccgccaaccacugcggcaccaucgccaacggcgugcugcagaccuucaugagaauggccuggggcggcagcuacaucgcccuggacagcggcugcggcagcugggacugcaucaugaccagcuaccaguaccugaucauccagaacaccaccugggaggaccacugccaguucagcagacccagccccaucggcuaccugggccugcugagccagagaaccagagacaucuacaucagcagaagacugcugggcaccuucaccuggacccugagcgacagcgagggcaacgagacccccggcggcuacugccugaccagauggaugcugaucgaggccgagcugaagugcuucggcaacaccgccguggccaagugcaacgagaagcacgacgaggaguucugcgacaugcugagacuguucgacuucaacaagcaggccaucagaagacugaagacccccgcccagaugagcauccagcugaucaacaaggccgugaacgcccugaucaacgaccagcugaucaugaagaaccaccugagagacaucaugugcauccccuacugcaacuacagcaaguacugguaccugaaccacaccgugaccggcaagaccagccugcccagaugcuggcuggugagcaacggcagcuaccugaacgagacccacuucagcgacgacaucgagcagcaggccgacaacaugaucaccgagcugcugcagaaggaguacaucgacagacagggcaagaccccccugggccugguggaccuguucguguucagcaccagcuucuaccugaucagcaucuuccugcaccuggugaagauccccacccacagacacgugaucggcaagcccugccccaagccccacagacugaaccacaugggcaucugcagcugcggccuguacaagcaccccggcgugcccgugaaguggaagagaugaggacuaguuauaagacugacuagcccgaugggccucccaacgggcccuccuccccuccuugcaccgagauuaaucaaaggcucuuuucagagccaccaaaaaaaaaaaaaaaaaaaaaaaaaaaaaaaaaaaaaaaaaaaaaaaaaaaaaaaaaaaaaaaaaaaaaaaaaaaaaaaaaaaaaaaaaaaaaaaaaaaaa

SEQ ID NO: 29555 - RNA, 1686 nt, Artificial Sequence
  mRNA product Design i-3 (hSL-A100) comprising derived and/or modified sequence from LASV(LASV003-NIG-2008;Clade II)__AIT17580__GPCmut5 (opt4)
aggagaaagcuuaccaugggccagaucaucaccuucuuccaggaggugccccacgugaucgaggaggugaugaacaucgugcugaucgcccugagccugcuggccauccugaagggcaucuacaacguggccaccugcggccuguucggccuggugagcuuccugcugcugugcggcagaagcugcagcaccaccuacaagggcguguacgagcugcagacccuggagcuggacauggccagccugaacaugaccaugccccugagcugcaccaagaacaacagccaccacuacaucauggugggcaacgagaccggccuggagcugacccugaccaacaccagcaucaucaaccacaaguucugcaaccugagcgacgcccacaagaagaaccuguacgaccacgcccugaugagcaucaucagcaccuuccaccugagcauccccaacuucaaccaguacgaggccaugagcugcgacuucaacggcggcaagaucagcgugcaguacaaccugagccacaccuacgccguggacgccgccaaccacugcggcaccaucgccaacggcgugcugcagaccuucaugagaauggccuggggcggcagcuacaucgcccuggacagcggcugcggcagcugggacugcaucaugaccagcuaccaguaccugaucauccagaacaccaccugggaggaccacugccaguucagcagacccagccccaucggcuaccugggccugcugagccagagaaccagagacaucuacaucagcagaagacugcugggcaccuucaccuggacccugagcgacagcgagagcaacgagacccccggcggcuacugccugaccagauggaugcugaucgaggccgagcugaagugcuucggcaacaccgccguggccaagugcaacgagaagcacgacgaggaguucugcgacaugcugagacuguucgacuucaacaagcaggccaucagaagacugaaggcccccgcccagaugagcauccagcugaucaacaaggccgugaacgcccugaucaacgaccagcugaucaugaagaaccaccugagagacaucaugugcauccccuacugcaacuacagcaaguacugguaccugaaccacaccgugaccggcagaaccagccugcccagaugcuggcuggugagcaacggcagcuaccugaacgagacccacuucagcgacgacaucgagcagcaggccgacaacaugaucaccgagcugcugcagaaggaguacauggacagacagggcaagaccccccugggccugguggaccuguucguguucagcaccagcuucuaccugaucagcaucuuccugcaccuggugaagauccccacccacagacacgugaucggcaagcccugccccaagccccacagacugaaccacaugggcaucugcagcugcggccuguacaagcaccccggcgugcccgugaaguggaagagaugaggacuaguuauaagacugacuagcccgaugggccucccaacgggcccuccuccccuccuugcaccgagauuaaucaaaggcucuuuucagagccaccaaaaaaaaaaaaaaaaaaaaaaaaaaaaaaaaaaaaaaaaaaaaaaaaaaaaaaaaaaaaaaaaaaaaaaaaaaaaaaaaaaaaaaaaaaaaaaaaaaaaa

SEQ ID NO: 29556 - RNA, 1686 nt, Artificial Sequence
  mRNA product Design i-3 (hSL-A100) comprising derived and/or modified sequence from LASV(LASV035-NIG-2009;Clade II)__AIT17588__GPCmut5 (opt4)
aggagaaagcuuaccaugggccagaucaucaccuucuuccaggaggugccccacgugaucgaggaggugaugaacaucgugcugaucgcccugagccugcuggccauccugaagggcaucuacaacguggccaccugcggccuguucggccuggugagcuuccugcugcugugcggcagaagcugcagcaccaccuacaagggcguguacgagcugcagacccuggagcuggacauggccagccugaacaugaccaugccccugagcugcaccaagaacaacagccaccacuacaucauggugggcaacgagaccggccuggagcugacccugaccaacaccagcaucaucaaccacaaguucugcaaccugagcgacgcccacaagaagaaccuguacgaccacgcccugaugagcaucaucagcaccuuccaccugagcauccccaacuucaaccaguacgaggccaugagcugcgacuucaacggcggcaagaucagcgugcaguacaaccugagccacgccuacgccguggacgccgccaaccacugcggcaccaucgccaacggcgugcugcagaccuucaugagaauggccuggggcggcagcuacaucgcccuggacagcggcugcggcagcugggacugcaucaugaccagcuaccaguaccugaucauccagaacaccaccugggaggaccacugccaguucagcagacccagccccaucggcuaccugggccugcugagccagagaaccagagacaucuacaucagcagaagacugcugggcaccuucaccuggacccugagcgacagcgagggcaacgagacccccggcggcuacugccugaccagauggaugcugaucgaggccgagcugaagugcuucggcaacaccgccguggccaagugcaacgagaagcacgacgaggaguucugcgacaugcugagacuguucgacuucaacaagcaggccaucagaagacugaaggcccccgcccagaugagcauccagcugaucaacaaggccgugaacgcccugaucaacgaccagcugaucaugaagaaccaccugagagacaucaugugcauccccuacugcaacuacagcaaguacugguaccugaaccacaccgugaccggcaagaccagccugcccagaugcuggcuggugagcaacggcagcuaccugaacgagacccacuucagcgacgacaucgagcagcaggccgacaacaugaucaccgagcugcugcagaaggaguacaucgacagacagggcaagaccccccugggccugguggaccuguucguguucagcaccagcuucuaccugaucagcaucuuccugcaccuggugaagauccccacccacagacacgugaucggcaagcccugccccaagccccacagacugaaccacaugggcaucugcagcugcggccuguacaagcaccccggcgugcccgugaaguggaagagaugaggacuaguuauaagacugacuagcccgaugggccucccaacgggcccuccuccccuccuugcaccgagauuaaucaaaggcucuuuucagagccaccaaaaaaaaaaaaaaaaaaaaaaaaaaaaaaaaaaaaaaaaaaaaaaaaaaaaaaaaaaaaaaaaaaaaaaaaaaaaaaaaaaaaaaaaaaaaaaaaaaaaa

SEQ ID NO: 29557 - RNA, 1686 nt, Artificial Sequence
  mRNA product Design i-3 (hSL-A100) comprising derived and/or modified sequence from LASV(LASV1000-NIG-2009;Clade II)__AIT17782__GPCmut5 (opt4)
aggagaaagcuuaccaugggccagaucaucaccuucuuccaggaggugccccacgugaucgaggaggugaugaacaucgugcugaucgcccugagccugcuggccauccugaagggcaucuacaacguggccaccugcggccuguucggccuggugagcuuccugcugcugugcggcagaagcugcagcaccaccuacaagggcguguacgagcugcagacccuggagcuggacauggccagccugaacaugaccaugccccugagcugcaccaagaacaacagccaccacuacaucauggugggcaacgagaccggccuggagcugacccugaccaacaccagcaucaucaaccacaaguucugcaaccugagcgacgcccacaagaagaaccuguacgaccacgcccugaugagcaucaucagcaccuuccaccugagcauccccaacuucaaccaguacgaggccaugagcugcgacuucaacggcggcaagaucagcgugcaguacaaccugagccacaccuacgccguggacgccgccaaccacugcggcaccaucgccaacggcgugcugcagaccuucaugagaauggccuggggcggcagcuacaucgcccuggacagcggcugcggcagcugggacugcaucaugaccagcuaccaguaccugaucauccagaacaccaccugggaggaccacugccaguucagcagacccagccccaucggcuaccugggccugcugagccagagaaccagagacaucuacaucagcagaagacugcugggcaccuucaccuggacccugagcgacagcgagggcaacgagacccccggcggcuacugccugaccagauggaugcugaucgaggccgagcugaagugcuucggcaacaccgccguggccaagugcaacgagaagcacgacgaggaguucugcgacaugcugagacuguucgacuucaacaagcaggccaucaagagacugaagacccccgcccagaugagcauccagcugaucaacaaggccgugaacgcccugaucaacgaccagcugaucaugaagaaccaccugagagacaucaugugcauccccuacugcaacuacagcaaguacugguaccugaaccacaccgugaccggcaagaccagccugcccagaugcuggcuggugagcaacggcagcuaccugaacgagacccacuucagcgacgacaucgagcagcaggccgacaacaugaucaccgagcugcugcagaaggaguacaucgacagacagggcaagaccccccugggccugguggaccuguucguguucagcaccagcuucuaccugaucagcaucuuccugcaccuggugaagauccccacccacagacacguggugggcaagcccugccccaagccccacagacugaaccacaugggcaucugcagcugcggccuguacaagcaccccggcgugcccgugaaguggaagagaugaggacuaguuauaagacugacuagcccgaugggccucccaacgggcccuccuccccuccuugcaccgagauuaaucaaaggcucuuuucagagccaccaaaaaaaaaaaaaaaaaaaaaaaaaaaaaaaaaaaaaaaaaaaaaaaaaaaaaaaaaaaaaaaaaaaaaaaaaaaaaaaaaaaaaaaaaaaaaaaaaaaaa

SEQ ID NO: 29558 - RNA, 1686 nt, Artificial Sequence
  mRNA product Design i-3 (hSL-A100) comprising derived and/or modified sequence from LASV(LASV221-NIG-2010;Clade II)__AIT17624__GPCmut5 (opt4)
aggagaaagcuuaccaugggccagaucaucaccuucuuccaggaggugccccacgugaucgaggaggugaugaacaucgugcugaucgcccugagccugcuggccauccugaagggcaucuacaacguggccaccugcggccuguucggccuggugagcuuccugcugcugugcggcagaagcugcagcaccaccuacaagggcguguacgagcugcagacccuggagcuggacauggccagccugaacaugaccaugccccugagcugcaccaagaacaacagccaccacuacaucauggugggcaacgagaccggccuggagcugacccugaccaacaccagcaucaucaaccacaaguucugcaaccugagcgacgcccacaagaagaaccuguacgaccacgcccugaugagcaucaucagcaccuuccaccugagcauccccaacuucaaccaguacgaggccaugagcugcgacuucaacggcggcaagaucagcgugcaguacaaccugagccacaccuacgccaucgacgccgccaaccacugcggcaccaucgccaacggcgugcugcagaccuucaugagaauggccuggggcggcagcuacaucgcccuggacagcggcugcggcagcugggacugcaucaugaccagcuaccaguaccugaucauccagaacaccaccugggaggaccacugccaguucagcagacccagccccaucggcuaccugggccugcugagccagagaaccagagacaucuacaucagcagaagacugcugggcaccuucaccuggacccugagcgacagcgagggcaacgagacccccggcggcuacugccugaccagauggaugcugaucgaggccgagcugaagugcuucggcaacaccgccguggccaagugcaacgagaagcacgacgaggaguucugcgacaugcugagacuguucgacuucaacaagcaggccaucagaagacugaagacccccgcccagaugagcauccagcugaucaacaaggccgugaacgcccugaucaacgaccagcugaucaugaagaaccaccugagagacaucaugugcauccccuacugcaacuacagcaaguacugguaccugaaccacaccgugaccggcaagaccagccugcccagaugcuggcuggugagcaacggcagcuaccugaacgagacccacuucagcgacgacaucgagcagcaggccgacaacaugaucaccgagaugcugcagaaggaguacauggacagacagggcaagaccccccugggccugguggaccuguucguguucagcaccagcuucuaccugaucagcaucuuccugcaccuggugaagauccccacccacagacacgugaucggcaagcccugccccaagccccacagacugaaccacaugggcaucugcagcugcggccuguacaagcaccccggcgugcccgugaaguggaagagaugaggacuaguuauaagacugacuagcccgaugggccucccaacgggcccuccuccccuccuugcaccgagauuaaucaaaggcucuuuucagagccaccaaaaaaaaaaaaaaaaaaaaaaaaaaaaaaaaaaaaaaaaaaaaaaaaaaaaaaaaaaaaaaaaaaaaaaaaaaaaaaaaaaaaaaaaaaaaaaaaaaaaa

SEQ ID NO: 29559 - RNA, 1686 nt, Artificial Sequence
  mRNA product Design i-3 (hSL-A100) comprising derived and/or modified sequence from LASV(LASV237-NIG-2010;Clade II)__AIT17638__GPCmut5 (opt4)
aggagaaagcuuaccaugggccagaucaucaccuucuuccaggaggugccccacgugaucgaggaggugaugaacaucgugcugaucgcccugagccugcuggccauccugaagggcaucuacaacguggccaccugcggccuguucggccuggugagcuuccugcugcugugcggcagaagcugcagcaccaccuacaagggcguguacgagcugcagacccuggagcuggacauggccagccugaacaugaccaugccccugagcugcaccaagaacaacagccaccacuacaucauggugggcaacgagaccggccuggagcugacccugaccaacaccagcaucaucaaccacaaguucugcaaccugagcgacgcccacaagaaggaccuguacgaccacgcccugaugagcaucaucagcaccuuccaccugagcauccccaacuucaaccaguacgaggccaugagcugcgacuucaacggcggcaagaucagcgugcaguacaaccugagccacaccuacgccguggacgccgccaaccacugcggcaccaucgccaacggcgugcugcagaccuucaugagaauggccuggggcggcagcuacaucgcccuggacagcggcugcggcagcugggacugcaucaugaccagcuaccaguaccugaucauccagaacaccaccugggaggaccacugccaguucagcagacccagccccaucggcuaccugggccugcugagccagagaaccagagacaucuacaucagcagaagacugcugggcaccuucaccuggacccugagcgacagcgagggcaacgagacccccggcggcuacugccugaccagauggaugcugaucgaggccgagcugaagugcuucggcaacaccgccguggccaagugcaacgagaagcacgacgaggaguucugcgacaugcugagacuguucgacuucaacaagcaggccaucagaagacugaagacccccgcccagaugagcauccagcugaucaacaaggccgugaacgcccugaucaacgaccagcugaucaugaagaaccaccugagagacaucaugugcauccccuacugcaacuacagcaaguacugguaccugaaccacaccgugaccggcaagaccagccugcccagaugcuggcuggugagcaacggcagcuaccugaacgagacccacuucagcgacgacaucgagcagcaggccgacaacaugaucaccgagcugcugcagaaggaguacauggacagacagggcaagaccccccugggccugguggaccuguucguguucagcaccagcuucuaccugaucagcaucuuccugcaccugaucaagauccccacccacagacacaucaccggcaagcccugccccaagccccacagacugaaccacaugggcaucugcagcugcggccuguacaagcaccccggcgugcccgugaaguggaagagaugaggacuaguuauaagacugacuagcccgaugggccucccaacgggcccuccuccccuccuugcaccgagauuaaucaaaggcucuuuucagagccaccaaaaaaaaaaaaaaaaaaaaaaaaaaaaaaaaaaaaaaaaaaaaaaaaaaaaaaaaaaaaaaaaaaaaaaaaaaaaaaaaaaaaaaaaaaaaaaaaaaaaa

SEQ ID NO: 29560 - RNA, 1686 nt, Artificial Sequence
  mRNA product Design i-3 (hSL-A100) comprising derived and/or modified sequence from LASV(LASV253-NIG-2011;Clade II)__AIT17670__GPCmut5 (opt4)
aggagaaagcuuaccaugggccagaucaucaccuucuuccaggaggugccccacgugaucgaggaggugaugaacaucgugcugaucgcccugagccugcuggccauccugaagggcaucuacaacguggccaccugcggccuguucggccuggugagcuuccugcugcugugcggcagaagcugcagcaccaccuacaagggcguguacgagcugcagacccuggagcuggacauggccagccugaacaugaccaugccccugagcugcaccaagaacaacagccaccacuacaucauggugggcaacgagaccggccuggagcugacccugaccaacaccagcaucaucaaccacaaguucugcaaccugagcgacgcccacaagaagaaccuguacgaccacgcccugaugagcaucaucagcaccuuccaccugagcauccccaacuucaaccaguacgaggccaugagcugcgacuucaacggcggcaagaucagcgugcaguacaaccugagccacaccuacgccguggacgccgccaaccacugcggcaccaucgccaacggcgugcugcagaccuucaugagaauggccuggggcggcagcuacaucgcccuggacagcggcugcggcagcugggacugcaucaugaccagcuaccaguaccugaucauccagaacaccaccugggaggaccacugccaguucagcagacccagccccaucggcuaccugggccugcugagccagagaaccagagacaucuacaucagcagaagacugcugggcaccuucaccuggacccugagcgacagcgagggcaacgagacccccggcggcuacugccugaccagauggaugcugaucgaggccgagcugaagugcuucggcaacaccgccguggccaagugcaacgagaagcacgacgaggaguucugcgacaugcugagacuguucgacuucaacaagcaggccaucagaagacugaaggcccccgcccagaugagcauccagcugaucaacaaggccgugaacgcccugaucaacgaccagcugaucaugaagaaccaccugagagacaucaugugcauccccuacugcaacuacagcaaguacugguaccugaaccacaccgugaccggcagaaccagccugcccagaugcuggcuggugagcaacggcagcuaccugaacgagacccacuucagcgacgacaucgagcagcaggccgacaacaugaucaccgagcugcugcagaaggaguacaucgacagacagggcaagaccccccugggccugguggaccuguucguguucagcaccagcuucuaccugaucagcaucuuccugcaccuggugaagauccccacccacagacacaucaucggcaagcccugccccaagccccacagacugaaccacaugggcaucugcagcugcggccuguacaagcaccccggcgugcccgugaaguggaagagaugaggacuaguuauaagacugacuagcccgaugggccucccaacgggcccuccuccccuccuugcaccgagauuaaucaaaggcucuuuucagagccaccaaaaaaaaaaaaaaaaaaaaaaaaaaaaaaaaaaaaaaaaaaaaaaaaaaaaaaaaaaaaaaaaaaaaaaaaaaaaaaaaaaaaaaaaaaaaaaaaaaaaa

SEQ ID NO: 29561 - RNA, 1686 nt, Artificial Sequence
  mRNA product Design i-3 (hSL-A100) comprising derived and/or modified sequence from LASV(LASV254-NIG-2011;Clade II)__AIT17674__GPCmut5 (opt4)
aggagaaagcuuaccaugggccagaucaucaccuucuuccaggaggugccccacgugaucgaggaggugaugaacaucgugcugaucgcccugagccugcuggccauccugaagggcaucuacaacguggccaccugcggccuguucggccuggugagcuuccugcugcugugcggcagaagcugcagcaccaccuacaagggcguguacgagcugcagacccuggagcuggacaugaccaaccugaacaugaccaugccccugagcugcaccaagaacaacagccaccacuacaucauggugggcaacgagaccggccuggagcugacccugaccaacaccagcaucaucaaccacaaguucugcaaccugagcgacgcccacaagaagaaccuguacaaccacgcccugaugagcaucaucagcaccuuccaccugagcauccccaacuucaaccaguacgaggccaugagcugcgacuucaacggcggcaagaucagcgugcaguacaaccugagccacagcuacgccguggacgccgccaaccacugcggcaccaucgccaacggcgugcugcagaccuucaugagaauggccuggggcggcagcuacaucgcccuggacagcggcugcggcaacugggacugcaucaugaccagcuaccaguaccugaucauccagaacaccaccugggaggaccacugccaguucagcagacccagccccaucggcuaccugggccugcugagccagagaaccagagacaucuacaucagcagaagacugcugggcaccuucaccuggacccugagcgacagcgagggcaacgagacccccggcggcuacugccugaccagauggaugcugaucgaggccgagcugaagugcuucggcaacaccgccguggccaagugcaacgagaagcacgacgaggaguucugcgacaugcugagacuguucgacuucaacaagcaggccaucagaagacugaagacccccgcccaggccaacauccagcugaucaacaaggccgugaacgcccugaucaacgaccagcugaucaugaagaaccaccugagagacaucaugugcauccccuacugcaacuacagcaaguacugguaccugaaccacaccgugaccggcaagaccagccugcccagaugcuggcuggugagcaacggcagcuaccugaacgagacccacuucagcgacgacaucgagcagcaggccgacaacaugaucaccgagcugcugcagaaggaguacauggacagacagggcaagaccccccugggccugguggaccuguucguguucagcaccagcuucuaccugaucagcaucuuccugcaccuggugaagauccccacccacagacacgugaucggcaagcccugccccaagccccacagacugaaccacaugggcaucugcagcugcggccuguacaagcaccccggcgugcccgugaaguggaagagaugaggacuaguuauaagacugacuagcccgaugggccucccaacgggcccuccuccccuccuugcaccgagauuaaucaaaggcucuuuucagagccaccaaaaaaaaaaaaaaaaaaaaaaaaaaaaaaaaaaaaaaaaaaaaaaaaaaaaaaaaaaaaaaaaaaaaaaaaaaaaaaaaaaaaaaaaaaaaaaaaaaaaa

SEQ ID NO: 29562 - RNA, 1686 nt, Artificial Sequence
  mRNA product Design i-3 (hSL-A100) comprising derived and/or modified sequence from LASV(Nig08-A19;Clade III)__ADU56618__GPCmut5 (opt4)
aggagaaagcuuaccaugggccagaucgugaccuucuuccaggaggugccccacgugaucgaggaggugaugaacaucgugcugaucgcccugagcauccuggccauccugaagggccuguacaacaucgccaccugcggccugaucggccuggugaccuuccugcugcugagcggcagaagcugcagcaugaccuacaagggcguguacgagcugcagacccuggagcugaacaugaacacccugaacaugaccaugccccugagcugcaccaagaacaacagccaccacuacaucauggugggcaacgagaccggccuggagcugacccugaccaacaccagccugcugcaccacaaguucugcaaccugagcgacgcccacaagaagaaccuguacgaccacacccugaugagcaucaucagcaccuuccaccugagcauccccaacuucaaccaguacgaggccaugagcugcgacuucaacggcggcaagaucaccgugcaguacaaccugagccacagcuacgccaucgacgccgccaaccacugcggcaccguggccaacggcgugcugcagaccuucaugagaauggccuggggcggcagcuacaucgcccuggacagcggcugcggcaagugggacugcaucaugaccagcuaccaguaccugaucauccagaacaccaccugggaggaccacugccaguucagcagacccagccccaucggcuaccugggccugcugagccagagaaccagagacaucuacaucagcagaagacugcugggcaccuucaccuggacccugagcgacagcgagggcaacgagacccccggcggcuacugccugaccagauggaugcugaucgaggccgagcugaagugcuucggcaacaccgccguggccaagugcaacgagaagcacgacgaggaguucugcgacaugcugagacuguucgacuucaacaagcaggccaucagaagacugaaggcccccgcccagaugagcauccagcugaucaacaaggccgugaacgcccugaucaacgaccagcugaucaugaagaaccaccugagagacaucaugugcauccccuacugcaacuacagcaaguacugguaccugaaccacaccagcaccggcagaaccagccugcccagaugcuggcuggugagcaacggcagcuaccugaacgagacccacuucagcgacgacaucgagcagcaggccgacaacaugaucaccgagaugcugcagaaggaguaccuggacagacagggcaagaccccccugggccugguggaccuguucguguucagcaccagcuucuaccugaucagcaucuuccugcaccuggugaagauccccacccacagacacaucgugggcaagcccugccccaagccccacagacugaaccacaugggcaucugcagcugcggccuguacaagcagcccggcgugcccgugagauggaagagaugaggacuaguuauaagacugacuagcccgaugggccucccaacgggcccuccuccccuccuugcaccgagauuaaucaaaggcucuuuucagagccaccaaaaaaaaaaaaaaaaaaaaaaaaaaaaaaaaaaaaaaaaaaaaaaaaaaaaaaaaaaaaaaaaaaaaaaaaaaaaaaaaaaaaaaaaaaaaaaaaaaaaa

SEQ ID NO: 29563 - RNA, 1689 nt, Artificial Sequence
  mRNA product Design i-3 (hSL-A100) comprising derived and/or modified sequence from LASV(G1180-SLE-2010;Clade IV)__AIT17168__GPCmut5 (opt4)
aggagaaagcuuaccaugggccagaucgugaccuucuuccaggaggugccccacgugaucgaggaggugaugaacaucgugcugaucgcccugagcauccuggccgugcugaagggccuguacaacuucgccaccugcggccuggugggccugcugaccuuccugcugcugugcggcagaagcugcaccgccagcagauacaagggcguguacgagcugcagacccuggagcugaacauggagacccugaacaugaccaugccccugagcugcaccaagaacaacagccaccacuacaucauggugggcaacgagaccggccuggagcugacccugaccaacaccagcaucaucaaccacaaguucugcaaccugagcgacgcccacaagaagaaccuguacgaccacgcccugaugagcaucaucagcaccuuccaccugagcauccccaacuucaaccaguacgaggccaugagcugcgacuucaacggcggcaagaucagcgugcaguacaaccugagccacagcuacgccggcgacgccgccaaccacugcggcaccguggccaacggcgugcugcagaccuucaugagaauggccuggggcggcagcuacaucgcccuggacagcggcugcggcagcugggacugcaucaugaccagcuaccaguaccugaucauccagaacaccaccugggaggaccacugccaguucagcagacccagccccaucggcuaccugggccugcugagccagagaaccagagacaucuacaucagcagaagacugcugggcaccuucaccuggacccugagcgacagcgagggcaaggacacccccggcggcuacugccugaccagauggaugcugaucgaggccgagcugaagugcuucggcaacaccgccguggccaagugcaacgagaagcacgacgaggaguucugcgacaugcugagacuguucgacuucaacaagcaggccauccagagacugaaggcccccgcccagaugagcauccagcugaucaacaaggccgugaacgcccugaucaacgaccagcugaucaugaagaaccaccugagagacaucaugugcauccccuacugcaacuacagcaaguacugguaccugaaccacaccaccaccggcaagaccagccugcccaagugcuggcuggugagcaacggcagcuaccugaacgagacccacuucagcgacgacaucgagcagcaggccgacaacaugaucaccgagaugcugcagaaggaguacauggagagacagggcaagaccccccugggccugguggaccuguucguguucagcaccagcuucuaccugaucagcaucuuccugcaccuggugaagauccccacccacagacacaucgugggcaagagcugccccaagccccacagacugaaccacaugggcaucugcagcugcggccuguacaagcagcccggcgugcccgugaaguggaagagaugaggacuaguuauaagacugacuagcccgaugggccucccaacgggcccuccuccccuccuugcaccgagauuaaucaaaggcucuuuucagagccaccaaaaaaaaaaaaaaaaaaaaaaaaaaaaaaaaaaaaaaaaaaaaaaaaaaaaaaaaaaaaaaaaaaaaaaaaaaaaaaaaaaaaaaaaaaaaaaaaaaaaa

SEQ ID NO: 29564 - RNA, 1689 nt, Artificial Sequence
  mRNA product Design i-3 (hSL-A100) comprising derived and/or modified sequence from LASV(G1442-SLE-2011;Clade IV)__AIT17180__GPCmut5 (opt4)
aggagaaagcuuaccaugggccagaucgugaccuucuuccaggaggugccccacgugaucgaggaggugaugaacaucgugcugaucgcccugagcauccuggccgugcugaagggccuguacaacguggccaccugcggccugaucggccuggugaccuuccugcugcugugcggcagaagcugcaccaccacccuguacaagggcguguacgagcugcagacccuggagcugaacauggagacccugaacaugaccaugccccugagcugcaccaagaacaacagccaccacuacaucagagugggcaacgagaccggccuggagcugacccugaccaacaccagcaucaucaaccacaaguucugcaaccugagcgacgcccacaagaagaaccuguacgaccacgcccugaugagcaucaucagcaccuuccaccugagcauccccaacuucaaccaguacgaggccaugagcugcgacuucaacggcggcaagaucagcgugcaguacaaccugagccacagcuacgccggcgacgccgccaaccacugcggcaccguggccaacggcgugcugcagaccuucaugagaauggccuggggcggcagcuacaucgcccuggacagcggcugcggcaacugggacugcaucaugaccagcuaccaguaccugaucauccagaacaccaccugggacgaccacugccaguucagcagacccagccccaucggcuaccugggccugcugagccagagaaccagagacguguacaucagcagaagacugcugggcaccuucaccuggacccugagcgacagcgagggcaaggacacccccggcggcuacugccugaccagauggaugcugaucgaggccgagcugaagugcuucggcaacaccgccguggccaagugcaacgagaagcacgacgaggaguucugcgacaugcugagacuguucgacuucaacaagcaggccauccagagacugaaggcccccgcccagaugagcauccagcugaucaacaaggccgugaacgcccugaucaacgaccagcugaucaugaagaaccaccugagagacaucaugugcauccccuacugcaacuacagcaaguacugguaccugaacaacaccgccaccggcaagaccagccugcccaagugcuggcugaucagcaacggcagcuaccugaacgagacccacuucagcgacgacaucgagcaggaggccgacaacaugaucaccgagaugcugcagaaggaguacauggagagacagggcaagaccccccugggccugguggaccuguucguguucagcaccagcuucuaccugaucagcaucuuccugcaccuggugaagauccccacccacagacacaucgugggcaagagcugccccaagccccacagacugaaccacaugggcaucugcagcugcggccuguacaagcagcccggcgugcccgugagauggaagagaugaggacuaguuauaagacugacuagcccgaugggccucccaacgggcccuccuccccuccuugcaccgagauuaaucaaaggcucuuuucagagccaccaaaaaaaaaaaaaaaaaaaaaaaaaaaaaaaaaaaaaaaaaaaaaaaaaaaaaaaaaaaaaaaaaaaaaaaaaaaaaaaaaaaaaaaaaaaaaaaaaaaaa

SEQ ID NO: 29565 - RNA, 1689 nt, Artificial Sequence
  mRNA product Design i-3 (hSL-A100) comprising derived and/or modified sequence from LASV(G3010-SLE-2013;Clade IV)__AIT17344__GPCmut5 (opt4)
aggagaaagcuuaccaugggccagaucgugaccuucuuccaggaggugccccacgugaucgaggaggugaugaacaucgugcugaucgcccugagcauccuggccgugcugaagggccuguacaacuucgccaccugcggccuggugggccuggugaccuuccugcugcugugcggcagaagcugcaccaccagccuguacaagggcguguacgagcugcagacccuggagcugaacauggagacccugaacaugaccaugccccugagcugcaccaagaacaacagccaccacuacaucauggugggcaacgagaccggccuggagcugacccugaccaacaccagcaucaucaaccacaaguucugcaaccugagcgacgcccacaagaagaaccuguacaaccacgcccugaugagcaucaucagcaccuuccaccugagcauccccaacuucaaccaguacgaggccaugagcugcgacuucaacggcggcaagaucagcgugcaguacaaccugagccacagcuacgccggcgacgccgccagccacugcggcaccguggccaacggcgugcugcagaccuucaugagaauggccuggggcggcagcuacaucgcccuggacagcggcugcggcaagugggacugcaucaugaccagcuaccaguaccugaucauccagaacaccaccugggaggaccacugccaguucagcagacccagccccaucggcuaccugggccugcugagccagagaaccagagacaucuacaucagcagaagacugcugggcaccuucaccuggacccugagcgacagcgagggcaaggacacccccggcggcuacugccugaccagauggaugcugaucgaggccgagcugaagugcuucggcaacaccgccguggccaagugcaacgagaagcacgacgaggaguucugcgacaugcugagacuguucgacuucaacaagcaggccauccagagacugaagacccccgcccagaugagcauccagcugaucaacaaggccgugaacgcccugaucaacgaccagcugaucaugaagaaccaccugagagacaucaugugcauccccuacugcaacuacagcaaguacugguaccugaaccacaccaccaccggcaagaccagccugcccaagugcuggcuggugagcaacggcagcuaccugaacgagacccacuucagcgacgacaucgagcagcaggccgacaacaugaucaccgagaugcugcagaaggaguacauggagagacagggcaagaccccccugggccugguggaccuguucguguucagcaccagcuucuaccugaucagcaucuuccugcaccuggugaagauccccacccacagacacaucgugggcaagagcugccccaagccccacagacugaaccacaugggcaucugcagcugcggccuguacaagcagcccggcgugcccgugagauggaagagaugaggacuaguuauaagacugacuagcccgaugggccucccaacgggcccuccuccccuccuugcaccgagauuaaucaaaggcucuuuucagagccaccaaaaaaaaaaaaaaaaaaaaaaaaaaaaaaaaaaaaaaaaaaaaaaaaaaaaaaaaaaaaaaaaaaaaaaaaaaaaaaaaaaaaaaaaaaaaaaaaaaaaa

SEQ ID NO: 29566 - RNA, 1689 nt, Artificial Sequence
  mRNA product Design i-3 (hSL-A100) comprising derived and/or modified sequence from LASV(G502-SLE-2009;Clade IV)__AIT17126__GPCmut5 (opt4)
aggagaaagcuuaccaugggccagaucgugaccuucuuccaggaggugccccacgugaucgaggaggugaugaacaucgugcugaucgcccugagcauccuggccgugcugaagggccuguacaacuucgccaccugcggccuggugggccugcugaccuuccugcugcugugcggcagaagcugcaccaccggccuguacaagggcguguacgagcugcagacccuggagcugaacauggagacccugaacaugaccaugccccugagcugcaccaagaacaacagccaccacuacaucauggugggcaacgagaccggccuggagcugacccugaccaacaccagcaucaucaaccacaaguucugcaaccugagcgacgcccacaagaagaaccuguacgaccacgcccugaugagcaucaucagcaccuuccaccugagcauccccaacuucaaccaguacgaggccaugagcugcgacuucaacggcggcaagaucagcgugcaguacaaccugagccacagcuacgccggcgacgccgccgaccacugcggcaccguggccaacggcgugcugcagaccuucaugagaauggccuggggcggcagcuacaucgcccuggacagcggcugcggcagaugggacugcaucaugaccagcuaccaguaccugaucauccagaacaccaccugggaggaccacugccaguucagcagacccagccccaucggcuaccugggccugcugagccagagaaccagagacaucuacaucagcagaagacugcugggcaccuucaccuggacccugagcgacagcgagggcaaggacacccccggcggcuacugccugaccagauggaugcugaucgaggccgagcugaagugcuucggcaacaccgccguggccaagugcaacgagaagcacgacgaggaguucugcgacaugcugagacuguucgacuucaacaagcaggccauccagagacugaaggcccccgcccagaugagcauccagcugaucaacaaggccgugaacgcccugaucaacgaccagcuggugaugaagaaccaccugagagacaucaugugcauccccuacugcaacuacagcagauacugguaccugaaccacaccaccaccggcagaaccagccugcccaagugcuggcuggugagcaacggcagcuaccugaacgagacccacuucagcgacgacaucgagcagcaggccgacaacaugaucaccgagaugcugcagaaggaguacauggagagacagggcaagaccccccugggccugguggaccuguucguguucagcaccagcuucuaccugaucagcaucuuccugcaccuggugaagauccccacccacagacacaucgugggcaagagcugccccaagccccacagacugaaccacaugggcaucugcagcugcggccuguacaagcagcccggcgugcccgugaaguggaagagaugaggacuaguuauaagacugacuagcccgaugggccucccaacgggcccuccuccccuccuugcaccgagauuaaucaaaggcucuuuucagagccaccaaaaaaaaaaaaaaaaaaaaaaaaaaaaaaaaaaaaaaaaaaaaaaaaaaaaaaaaaaaaaaaaaaaaaaaaaaaaaaaaaaaaaaaaaaaaaaaaaaaaa

SEQ ID NO: 29567 - RNA, 1689 nt, Artificial Sequence
  mRNA product Design i-3 (hSL-A100) comprising derived and/or modified sequence from LASV(G733-SLE-2010;Clade IV)__AIT17154__GPCmut5 (opt4)
aggagaaagcuuaccaugggccagaucgugaccuucuuccaggaggugccccacgugaucgaggaggugaugaacaucgugcugaucgcccugagcauccuggccgugcugaagggccuguacaacuucgccaccugcggcaucgugggccuggugagcuuccugcugcugugcggcagaagcugcaccaccagccuguacaagggcguguacgagcugcagacccuggagcugaacauggagacccugaacaugaccaugccccugagcugcaccaagaacaacagccaccacuacaucauggugggcaacgagaccggccuggagcugacccugaccaacaccagcaucaucaaccacaaguucugcaaccugagcgacgcccacaagaagaaccuguacgaccacgcccugaugagcaucaucagcaccuuccaccugagcauccccaacuucaaccaguacgaggccaugagcugcgacuucaacggcggcaagaucagcgugcaguacaaccugagccacagcuacgccggcgacgccgccaaccacugcggcaccaucgccaacggcgugcugcagaccuucaugagaauggccuggggcggcagcuacaucgcccuggacagcggcugcgacagaugggacugcaucaugaccagcuaccaguaccugaucauccagaacaccaccugggaggaccacugccaguucagcagacccagccccaucggcuaccugggccugcugagccagagaaccagagacaucuacaucagcagaagacugcugggcaccuucaccuggacccugagcgacagcgagggcaaggacacccccggcggcuacugccugaccagauggaugcugaucgaggccgagcugaagugcuucggcaacaccgccguggccaagugcaacgagaagcacgacgaggaguucugcgacaugcugagacuguucgacuucaacaagcaggccauccagagacugaaggcccccgcccagaugagcauccagcugaucaacaaggccgugaacgcccugaucaacgaccagcugaucaugaagaaccaccugagagacaucaugugcauccccuacugcaacuacagcaaguacugguaccugaaccacaccaccaccggcaagaccagccugcccaagugcuggcuggugagcaacggcagcuaccugaacgagacccacuucagcgacgacaucgagcagcaggccgacaacaugaucaccgagaugcugcagaaggaguacauggagagacagggcaagaccccccugggccugguggaccuguucguguucagcaccagcuucuaccugaucagcaucuuccugcaccuggugaagauccccacccacagacacguggugggcaagagcugccccaagccccacagacugaaccacaugggcaucugcagcugcggccuguacggccagcccggcgugcccgugaaguggaagagaugaggacuaguuauaagacugacuagcccgaugggccucccaacgggcccuccuccccuccuugcaccgagauuaaucaaaggcucuuuucagagccaccaaaaaaaaaaaaaaaaaaaaaaaaaaaaaaaaaaaaaaaaaaaaaaaaaaaaaaaaaaaaaaaaaaaaaaaaaaaaaaaaaaaaaaaaaaaaaaaaaaaaa

SEQ ID NO: 29568 - RNA, 1689 nt, Artificial Sequence
  mRNA product Design i-3 (hSL-A100) comprising derived and/or modified sequence from MOPV/LASV reassortant(IGS-1;Clade IV)__AFY05576__GPCmut5 (opt4)
aggagaaagcuuaccaugggccagaucgugaccuucuuccaggaggugccccacgugaucgaggaggugaugaacaucgugcugaucgcccugagcgugcuggccgugcugaagggccuguacaacuucgccaccugcggccuggugggccuggugaccuuccugcugcugugcggcagaagcugcaccaccagccuguacaagggcguguacgagcugcagacccuggagcugaacauggagacccugaacaugaccaugccccugagcugcaccaagaacaacagccaccacuacaucauggugggcaacgagaccggccuggagcugacccugaccaacaccagcaucaucaaccacaaguucugcaaccugagcgacgcccacaagaagaaccuguacgaccacgcccugaugagcaucaucagcaccuuccaccugagcauccccaacuucaaccaguacgaggccaugagcugcgacuucaacggcggcaagaucagcgugcaguacaaccugagccacagcuacgccggcgacgccgccaaccacugcggcaccguggccaacggcgugcugcagaccuucaugagaauggccuggggcggcagcuacaucgcccuggacagcggcugcggcaacugggacugcaucaugaccagcuaccaguaccugaucauccagaacaccaccugggaggaccacugccaguucagcagacccagccccaucggcuaccugggccugcugagccagagaaccagagacaucuacaucagcagaagacugcugggcaccuucaccuggacccugagcgacagcgagggcgaggacacccccggcggcuacugccugaccagauggaugcugaucgaggccgagcugaagugcuucggcaacaccgccguggccaagugcaacgagaagcacgacgaggaguucugcgacaugcugagacuguucgacuucaacaagcaggccauccagagacugaaggcccccgcccagaugagcauccagcugaucaacaaggccgugaacgcccugaucaacgaccagcugaucaugaagaaccaccugagagacaucaugugcauccccuacugcaacuacagcaaguacugguaccugaaccacaccaccaccggcagaaccagccugcccaagugcuggcuggugagcaacggcagcuaccugaacgagacccacuucagcgacgacaucgagcagcaggccgacaacaugaucaccgagaugcugcagaaggaguacauggagagacagggcaagaccccccugggccugguggaccuguucguguucagcaccagcuucuaccugaucagcaucuuccugcaccuggugaagauccccacccacagacacaucgugggcaagagcugccccaagccccacagacugaaccacaugggcaucugcagcugcggccuguacaagcagcccggcgugcccgugaaguggaagagaugaggacuaguuauaagacugacuagcccgaugggccucccaacgggcccuccuccccuccuugcaccgagauuaaucaaaggcucuuuucagagccaccaaaaaaaaaaaaaaaaaaaaaaaaaaaaaaaaaaaaaaaaaaaaaaaaaaaaaaaaaaaaaaaaaaaaaaaaaaaaaaaaaaaaaaaaaaaaaaaaaaaaa

SEQ ID NO: 29569 - RNA, 1689 nt, Artificial Sequence
  mRNA product Design i-3 (hSL-A100) comprising derived and/or modified sequence from LASV(LM765-SLE-2012;Clade IV)__AIT17814__GPCmut5 (opt4)
aggagaaagcuuaccaugggccagaucgugaccuucuuccaggaggugccccacgugaucgaggaggugaugaacaucgugcugaucgcccugagcauccuggccgugcugaagggccuguacaacuucgccaccugcggccuggugggccuggugaccuuccugcugcugugcggcagaagcugcaccaccagccuguacaagggcguguacgagcugcagacccuggagcugaacauggagacccugaacaugaccaugccccugagcugcaccaagaacaacagccaccacuacaucauggugggcaacgagaccggccuggagcugacccugaccaacaccagcaucaucgaccacaaguucugcaaccugagcgacgcccacagaaagaaccuguacgaccacgcccugaugagcaucaucagcaccuuccaccugagcauccccaacuucaaccaguacgaggccaugagcugcgacuucaacggcggcaagaucagcgugcaguacaaccugagccacagcuacgccaaggacgccgccgaccacugcggcaccguggccaacggcgugcugcagaccuucaugagaauggccuggggcggcagcuacaucgcccuggacagcggcugcggcagaugggacugcaucaugaccagcuaccaguaccugaucauccagaacaccaccugggaggaccacugccaguucagcagacccagccccaucggcuaccugggccugcugagccagagaaccagagacaucuacaucagcagaagacugcugggcaccuucaccuggacccugagcgacagcgagggcaaggacacccccggcggcuacugccugaccagauggaugcugaucgaggccgagcugaagugcuucggcaacaccgccguggccaagugcaacgagaagcacgacgaggaguucugcgacaugcugagacuguucgacuucaacaagcaggccauccagagacugaaggcccccgcccagaugagcauccagcugaucaacaaggccgugaacgcccugaucaacgaccagcugaucaugaagaaccaccugagagacaucaugugcauccccuacugcaacuacagcaaguacugguaccugaaccacaccaccaccggcaagaccagccugcccaagugcuggcuggugagcaacggcagcuaccugaacgagacccacuucagcgacgacaucgagcagcaggccgacaacaugaucaccgagaugcugcagaaggaguacauggagagacagggcaagaccccccugggccugguggaccuguucguguucagcaccagcuucuaccugaucagcaucuuccugcaccuggugaagauccccacccacagacacaucgugggcaagcccugccccaagccccacagacugaaccacaugggcaucugcagcugcggccuguacaagcagcccggcgugcccgugaaguggaagagaugaggacuaguuauaagacugacuagcccgaugggccucccaacgggcccuccuccccuccuugcaccgagauuaaucaaaggcucuuuucagagccaccaaaaaaaaaaaaaaaaaaaaaaaaaaaaaaaaaaaaaaaaaaaaaaaaaaaaaaaaaaaaaaaaaaaaaaaaaaaaaaaaaaaaaaaaaaaaaaaaaaaaa

SEQ ID NO: 29570 - RNA, 1689 nt, Artificial Sequence
  mRNA product Design i-3 (hSL-A100) comprising derived and/or modified sequence from LASV(LM776-SLE-2012;Clade IV)__AIT17824__GPCmut5 (opt4)
aggagaaagcuuaccaugggccagaucgugaccuucuuccaggaggugccccacgugaucgaggaggugaugaacaucgugcugaucgcccugagcauccuggccgugcugaagggccuguacaacuucgccaccugcggccuggugggccuggugaccuuccugcugcugugcggcagaagcugcaccaccagcguguacaagggcguguacgagcugcagacccuggagcugaacauggagacccugaacaugaccaugccccugagcugcaccaagaacaacagccaccacuacaucauggugggcaacgagaccggccuggagcugacccugaccaacaccagcaucaucaaccacaaguucugcaaccugagcgacgcccacaagaagaaccuguacgaccacgcccugaugagcaucaucagcaccuuccaccugagcauccccaacuucaaccaguacgaggccaugagcugcgacuucaacggcggcaagaucagcgugcaguacaaccugagccacagcuacgccggcgacgccgccaaccacugcggcaccguggccaacggcgugcugcagaccuucaugagaauggccuggggcggcagcuacaucgcccuggacagcggcugcggcaagugggacugcaucaugaccagcuaccaguaccugaucauccagaacaccaccugggaggaccacugccaguucagcagacccagccccaucggcuaccugggccugcugagccagagaaccagagacaucuacaucagcagaagacugcugggcaccuucaccuggacccugagcgacagcgagggcaaggacacccccggcggcuacugccugaccagauggaugcugaucgaggccgagcugaagugcuucggcaacaccgccguggccaagugcaacgagaagcacgacgaggaguucugcgacaugcugagacuguucgacuucaacaagcaggccauccagagacugaaggcccccgcccagaugagcauccagcugaucaacaaggccgugaacgcccugaucaacgaccagcugaucaugaagaaccaccugagagacaucaugugcauccccuacugcaacuacagcaaguacugguaccugaaccacaccaccaccggcaagaccagccugcccaagugcuggcuggugagcaacggcagcuaccugaacgagacccacuucagcgacgacaucgagcagcaggccgacaacaugaucaccgagaugcugcagaaggaguacauggagagacagggcaagaccccccugggccugguggaccuguucguguucagcaccagcuucuaccugaucagcaucuuccugcaccuggugaagauccccacccacagacacaucgugggcaagagcugccccaagccccacagacugaaccacaugggcaucugcagcugcggccuguacaagcagcccggcgugcccgugagauggaagagaugaggacuaguuauaagacugacuagcccgaugggccucccaacgggcccuccuccccuccuugcaccgagauuaaucaaaggcucuuuucagagccaccaaaaaaaaaaaaaaaaaaaaaaaaaaaaaaaaaaaaaaaaaaaaaaaaaaaaaaaaaaaaaaaaaaaaaaaaaaaaaaaaaaaaaaaaaaaaaaaaaaaaa

SEQ ID NO: 29571 - RNA, 1689 nt, Artificial Sequence
  mRNA product Design i-3 (hSL-A100) comprising derived and/or modified sequence from LASV(Mad39;Clade IV)__ANH09722__GPCmut5 (opt4)
aggagaaagcuuaccaugggccagaucgugaccuucuuccaggaggugccccacgugaucgaggaggugaugaacaucgugcugaucgcccugagcauccuggccgugcugaagggccuguacaacguggccaccugcggccugaucggccuggugaccuuccugcugcugugcggcagaagcugcaccaccacccuguacaagggcguguacgagcugcaggcccuggagcugaacauggagacccugaacaugaccaugccccugagcugcaccaagaacaacagccaccacuacaucagagugggcaacgagaccggccuggagcugacccugaccaacaccagccugaucaaccacaaguucugcaaccugagcgacgcccacaagaagaaccuguacgaccacgcccugaugagcaucaucagcaccuuccaccugagcauccccaacuucaaccaguacgaggccaugagcugcgacuucaacgacggcaagaucagcgugcaguacaaccugagccacaccuacgccggcgacaccgccaaccacugcggcaccguggccaacggcgugcugcagaccuucaugagaauggccuggggcggcagcuacaucgcccuggacagcggcugcggcggcugggacugcaucaugaccagcuaccaguaccugaucauccagaacaccaccugggaggaccacugccaguucagcagacccagccccaucggcuaccugggccugcugagccagagaaccagagacaucuacaucagcagaagacugcugggcaccuucaccuggacccugagcgacagcgagggcaaggacacccccggcggcuacugccugaccagauggaugcugaucgaggccgagcugaagugcuucggcaacaccgccguggccaagugcaacgagaagcacgacgaggaguucugcgacaugcugagacuguucgacuucaacaagcaggccauccagagacugaaggcccccgcccagaugagcauccagcugaucaacaaggccgugaacgcccugaucaacgaccagcugaucaugaagaaccaccugagagacaucaugugcauccccuacugcaacuacagcaaguacugguaccugaaccacaccgugaccggcaagaccagccugcccaagugcuggcuggugagcaacggcagcuaccugaacgagacccacuucagcgacgacaucgagcagcaggccgacaacaugaucaccgagaugcugcagaaggaguacauggagagacagggcaagaccccccugggccugguggaccuguucguguucagcaccagcuucuaccugaucagcaucuuccugcaccuggugaagauccccacccacagacacguggugggcaagcccugccccaagccccacagacugaaccacaugggcaucugcagcugcggcuucuacaagcagcccggcgugcccgugagauggaagagaugaggacuaguuauaagacugacuagcccgaugggccucccaacgggcccuccuccccuccuugcaccgagauuaaucaaaggcucuuuucagagccaccaaaaaaaaaaaaaaaaaaaaaaaaaaaaaaaaaaaaaaaaaaaaaaaaaaaaaaaaaaaaaaaaaaaaaaaaaaaaaaaaaaaaaaaaaaaaaaaaaaaaa

SEQ ID NO: 29572 - RNA, 1689 nt, Artificial Sequence
  mRNA product Design i-3 (hSL-A100) comprising derived and/or modified sequence from LASV(Z0947-SLE-2011;Clade IV)__AIT17840__GPCmut5 (opt4)
aggagaaagcuuaccaugggccagaucgugaccuucuuccaggaggugccccacgugaucgaggaggugaugaacaucgugcugaucgcccugagcauccuggccgugcugaagggccuguacaacuucgccaccugcggccuggugggccuggugaccuuccugcugcugugcggcagaagcugcaccaucagccuguacaagggcguguacgagcugcagacccuggagcugaacauggagacccugaacaugaccaugccccugagcugcaccaagaacaacagccaccacuacaucauggugggcaacgagaccggccuggagcugacccugaccaacaccagcaucaucaaccacaaguucugcaaccugagcgacgcccacaagaagaaccuguacgaccacgcccugaugagcaucaucagcaccuuccaccugagcauccccaacuucaaccaguacgaggccaugagcugcgacuucaacggcggcaagaucagcgugcaguacaaccugagccacagcuacgccggcgacgccgccaaccacugcggcaccguggccaacggcgugcugcagaccuucaugagaauggccuggggcggcagcuacaucgcccuggacagcggcugcgacagaugggacugcaucaugaccagcuaccaguaccugaucauccagaacaccaccugggaggaccacugccaguucagcagacccagccccaucggcuaccugggccugcugagccagagaaccagagacaucuacaucagcagaagacugcugggcaccuucaccuggacccugagcgacagcgagggcaaggacacccccggcggcuacugccugaccagauggaugcugaucgaggccgagcugaagugcuucggcaacaccgccguggccaagugcaacgagaagcacgacgaggaguucugcgacaugcugagacuguucgacuucaacaagcaggccauccagagacugaaggcccccgcccagaugagcauccagcugaucaacaaggccgugaacgcccugaucaacgaccagcugaucaugaagaaccaccugagagacaucaugugcauccccuacugcaacuacagcaaguacugguaccugaaccacaccaccaccggcaagaccagccugcccaagugcuggcuggugagcaacggcagcuaccugaacgagacccacuucagcgacgacaucgagcagcaggccgacaacaugaucaccgagaugcugcagaaggaguacauggagagacagggcaagaccccccugggccugguggaccuguucguguucagcaccagcuucuaccugaucagcaucuuccugcaccuggugaagauccccacccacagacacaucgugggcaagcccugccccaagccccacagacugaaccacaugggcaucugcagcugcggccuguacaagcagcccggcgugcccgugaaguggaagagaugaggacuaguuauaagacugacuagcccgaugggccucccaacgggcccuccuccccuccuugcaccgagauuaaucaaaggcucuuuucagagccaccaaaaaaaaaaaaaaaaaaaaaaaaaaaaaaaaaaaaaaaaaaaaaaaaaaaaaaaaaaaaaaaaaaaaaaaaaaaaaaaaaaaaaaaaaaaaaaaaaaaaa

SEQ ID NO: 29573 - RNA, 1689 nt, Artificial Sequence
  mRNA product Design i-3 (hSL-A100) comprising derived and/or modified sequence from LASV(Josiah;Clade IV)__NP_694870__GPCmut5 (opt5)
aggagaaagcuuaccaugggccagaucgugaccuucuuucaagaggucccccacguuauugaagaggugaugaacaucgugcugauugcccucagcguccuggcugugcuuaaggggcuguacaauuucgccacaugcggacucguuggccuggugacguuucuucugcucugugggagauccugcaccacaucucuguauaaaggagucuacgaacugcagacccucgagcugaacauggaaacacuuaauaugaccaugccucugagcuguacaaagaacaauucccaucacuauaucauggugggcaacgagaccgggcucgagcugacgcuuaccaauacaucuauuaucaaccauaaauucugcaaucugagcgacgcgcacaagaaaaaccucuacgaucaugcucugauguccaucauuucuaccuuucaccugagcaucccgaauuucaaccaguaugaagccauguccugugacuuuaauggaggcaagauuagcguucaguacaaccucucucacuccuaugccggcgaugcugccaaucauugcgggacaguggcuaacggaguccugcaaaccuucaugcggauggccuggggcgggagcuacaucgcgcuugacucuggauguggcaacugggauugcauuaugacguccuaccaguaucugaucauucagaauacaaccugggaggaccacugucaguuuagccgccccucuccuaucggguaccucggacugcuuucccaaagaacacgggauaucuauauuagccgcagacugcucggcaccuucaccuggacacuguccgacucugaaggcaaggauacgcccgggggauacugccugacccgguggaugcucaucgaggccgagcugaaauguuuuggcaacacagcuguggccaagugcaaugaaaaacaugacgaggaguucugcgauaugcuucgccuguuugacuucaacaagcaggcuauucagagacucaaagccccugcgcagaugagcauccaacugauuaauaaggccgugaacgcucuuaucaaugaucagcugaucaugaagaaccaccuccgggacauuauguguauccccuauugcaauuacuccaaauauugguaccugaaccacaccacaaccgggcgcacgagccugccuaaguguuggcucgucucuaauggauccuaccugaacgaaacacauuucagcgacgauauugaacagcaagccgacaauaugaucaccgagaugcuucagaaagaguauauggaaagacagggcaagaccccgcuggggcucguugaucuguuuguguucucuaccagcuuuuaccugauuuccaucuuccuucaccucgugaaaauccccacacaucggcacauugucggaaagucuugcccuaaaccccaucgccugaaccacaugggcaucuguagcugcggccuguauaagcagccuggggugcccguuaaguggaaaagaugaggacuaguuauaagacugacuagcccgaugggccucccaacgggcccuccuccccuccuugcaccgagauuaaucaaaggcucuuuucagagccaccaaaaaaaaaaaaaaaaaaaaaaaaaaaaaaaaaaaaaaaaaaaaaaaaaaaaaaaaaaaaaaaaaaaaaaaaaaaaaaaaaaaaaaaaaaaaaaaaaaaaa

SEQ ID NO: 29574 - RNA, 1686 nt, Artificial Sequence
  mRNA product Design i-3 (hSL-A100) comprising derived and/or modified sequence from LASV(LP;Clade I)__AAF86701__GPCmut5 (opt5)
aggagaaagcuuaccaugggccagaucauuaccuucuuucaagaggugccccacgucaucgaagagguuaugaacauugugcugaucgcccucagccugcuugcuauucugaaggggcucuacaauaucgccacaugcggaaucauuggccugguggcguuccuuuuucugugugggaaauccugcucucucacgcugaagggaggcuaugaacugcagacccucgagcugaacauggaaacacuuaauaugaccaugccucugagcuguaccaaaaacuccucucaucacuacaucagagucgggaaugagacaggacucgagcugacacuuaccaacacgagcauuaucaaucauaaguucugcaaccuguccgacgcucacaaaaagaaucucuaugaucaugcccugaugucuauuaucagcaccuuucaccuguccauuccgaacuucaaucaguacgaagccaugagcugugacuuuaacggcggcaagaucucugugcaguauaaucucucccacagcuacgcuggggaugccgcugagcauugcggaacaguugccaacggcgugcugcaaaccuucaugcggauggcguggggagggcgcuauaucgcccuugacucuggcugugggaauugggauugcauuaugacauccuaccaguaccugaucauucagaacaccacgugggaagaccacugucaguuuagcagacccucuccuaucggauaucucggccugcuuucccaacggacacgcgauauuuacaucagcagacggcugcucggcaccuucacauggacccuguccgacucugaggggaacgagacccccggaggcuauugccugacacgcuggaugcucaucgaagcugagcugaaauguuuugggaauacggccgucgcuaagugcaacgaaaaacaugaugaggaguucugcgacaugcuuagacuguuugauuucaauaagcaggccauucggcgccucaaagcgccugcccagaugagcauccagcugauuaacaaggcugugaaugcccuuaucaacgaccaacugauuaugaagaaucaccucagagauaucauguguauccccuacugcaacuauuccaaauacugguaucugaaucacaccagcucuggacggacaucccugccuaaguguuggcucauuagcaacggcucuuaccugaaugaaacccaguucagcgacgacaucgagcagcaagcugauaacaugauuacagaaaugcuucagaaagaguacaucgaacgccaggggaagaccccgcugggacucguugacauuuuuaucuucuccacgucuuuuuaucugauuagcaucuuccugcaucuuaucaaaauucccacacacagacauaucgugggcaagccuugccccaaaccucaccggcucaaucauaugggcgucuguuccugcgggcuguacaagcaccccggagugccgaccaaguggaaacgcugaggacuaguuauaagacugacuagcccgaugggccucccaacgggcccuccuccccuccuugcaccgagauuaaucaaaggcucuuuucagagccaccaaaaaaaaaaaaaaaaaaaaaaaaaaaaaaaaaaaaaaaaaaaaaaaaaaaaaaaaaaaaaaaaaaaaaaaaaaaaaaaaaaaaaaaaaaaaaaaaaaaaa

SEQ ID NO: 29575 - RNA, 1686 nt, Artificial Sequence
  mRNA product Design i-3 (hSL-A100) comprising derived and/or modified sequence from LASV(803213;Clade II)__AAF86703__GPCmut5 (opt5)
aggagaaagcuuaccaugggccagaucauuaccuucuuucaagaggugccccacgucaucgaagagguuaugaacauugugcugaucgcccucagccugcuugcuauucugaaggggaucuacaauguggccacaugcggacucuucggccugaucuccuuucuucugcucugugggagaucuugcagcgucacguauaaaggaguguacgaacugcagacccuggagcucaacauggcgaaucugaacaugacaaugccucuuuccuguaccaagaauaacucucaucacuauauuaugguuggcaaugaaacagggcuggagcucacccugacaaacaccagcaucauuaaucauaaauucugcaaccuuuccgacgcucacaagaaaaaucuguacgaucaugcccucaugucuaucauuagcacguuucaccuguccaucccgaacuucaaucaguaugaggccaugagcugugacuuuaacggaggcaagauuucugugcaguacaaucugucccacagcuucgcugucgaugccgcuaaccauugcggcaccaucgccaacggggugcuccaaacauuuaugcggauggcguggggaggcucuuauaucgcccuggacuccggguguggaaauugggauugcauuaugaccagcuaccaguaccuuaucauucagaacacaaccugggaagaccacugucaguucucucgccccuccccuaucggcuaucuggggcuccugagccaaagaacgcgggauauuuacaucucccgcagacuucugggaacauuuaccuggacacucucugacagcgagggcaaugaagcucccggcggguauugccugacccgguggaugcugaucgaggccgagcucaaguguuucggaaacaccgcuguugccaaaugcaaugaaaagcaugaugaggaauuuugcgacaugcugcgccuuuucgauuucaacaaacaggcgauuaagagacugaaaacgccugcccagauguccauccagcucauuaauaaggcugugaacgcccugaucaaugaccaacuuauuaugaagaaccaucugcgggauaucauguguauccccuacugcaauuauagccgcuacugguaucucaaccacacagucaccggcaaaacaucucugccuagauguuggcugguguccaaugggagcuaccucaacgagacccacuuuucugacgacauugaacagcaggcugauaauaugaucacagagaugcugcaaaaggaguacauggaccggcagggaaaaaccccgcuuggccugguggaucucuucgucuuuagcacguccuucuaucugauuucuaucuuucugcaccuuguuaagauucccacacaucgccacaucguggggaaaccuugccccaagccucauagacucaaccacaugggaauuuguagcugcggccuguacaaacaccccggcgugccggucaaguggaagcggugaggacuaguuauaagacugacuagcccgaugggccucccaacgggcccuccuccccuccuugcaccgagauuaaucaaaggcucuuuucagagccaccaaaaaaaaaaaaaaaaaaaaaaaaaaaaaaaaaaaaaaaaaaaaaaaaaaaaaaaaaaaaaaaaaaaaaaaaaaaaaaaaaaaaaaaaaaaaaaaaaaaaa

SEQ ID NO: 29576 - RNA, 1686 nt, Artificial Sequence
  mRNA product Design i-3 (hSL-A100) comprising derived and/or modified sequence from LASV(GA391;Clade III)__CAA36645__GPCmut5 (opt5)
aggagaaagcuuaccaugggccagaucgugaccuucuuucaagaggucccccacguuauugaagaggugaugaacaucgugcugauugcccucagcauccuggcuauucuuaaggggcuguacaaugucgccacaugcggacucaucggccuggugacguuccuucugcucuccgggagaucuuguagccugaucuauaaaggaaccuacgaacugcagacacucgagcugaacauggaaacccuuaauaugacaaugccucuguccugcaccaagaacaauucucaucacuauauucggguuggcaacgagacagggcucgagcugacccuuacgaauaccagcauccugaaccauaaauuuuguaaucucuccgacgcgcacaagcgcaaccuguacgaucauucucugaugagcauuaucuccacauuccaccucagcauuccgaauuuuaaccaguaugaagcuaugucuugcgacuucaauggaggcaaaaucaccgugcaguacaaccugucccacagcuuugccgucgaugccgcuggccauugugggacacuugccaauggagugcugcaaaccuucaugagaauggcuuggggcgggucuuauauugcccucgacuccggaugcggcaacugggauuguaucaugacgagcuaccaguaccugaucauucagaacacaaccugggacgaucacugccaguuuucucggcccuccccuaucggguaucuuggacugcucagccaacgcacaagagacauuuacaucucccggcgccugcugggcaccuucaccuggacacucucugauagcgagggcaaugaaacgcccgggggauauugucugaccagauggaugcuuauugaggcggagcugaagugcuuuggcaacacagccguugcuaaguguaaugaaaaacaugacgaggaguucugcgauaugcuccggcuguuugacuucaacaagcaggccauccgcagacuuaaaaccccugcucagauguccauccagcugauuaauaaggccgugaacgcgcucaucaaugaucaacugauuaugaaaaaccaucugcgggacaucaugugcauucccuacuguaauuauagccgcuacugguaucucaaccacacaucuaccgggaagacgucccugccuagaugcuggcuuaucagcaauggaucuuaccugaacgaaacaaaguucagcgacgauaucgaacagcaggccgacaauaugauuaccgagaugcuccaaaaagaguacaucgaucggcagggcaagaccccgcuggggcuggucgaccuuuuuguguucuccacaucuuuuuaucucauuagcaucuuccugcaccuggugaaaauucccacccaccgccauaucgucggaaagccuugucccaaaccucacagacucaaccauaugggcauuugcuccuguggccuguacaagcagcccgggguuccggugcgguggaaaagaugaggacuaguuauaagacugacuagcccgaugggccucccaacgggcccuccuccccuccuugcaccgagauuaaucaaaggcucuuuucagagccaccaaaaaaaaaaaaaaaaaaaaaaaaaaaaaaaaaaaaaaaaaaaaaaaaaaaaaaaaaaaaaaaaaaaaaaaaaaaaaaaaaaaaaaaaaaaaaaaaaaaaa

SEQ ID NO: 29577 - RNA, 1689 nt, Artificial Sequence
  mRNA product Design i-3 (hSL-A100) comprising derived and/or modified sequence from LASV(AV;Clade V)__CCA30314__GPCmut5 (opt5)
aggagaaagcuuaccaugggccagaucgugaccuucuuucaagaggucccccacguuauugaagaggugaugaacaucgugcugauugcccucagcauccuggcuguccuuaaggggcuguacaauauugccacaugcggacucaucggccugaucacguuccuucugcucugugggagauccugcucuagcaaccuguauaaaggaguguacgaacugcagucccucgaccugaauauggagacccuuaacaugacaaugccucugucuuguaccaagaauaacagccaucacuauauucggguuggcaaugauacagggcucgaacugacccuuacaaacaccuccauccugaaucauaaauuuugcaaccucucugacgcgcacaagaaagaucuguacgaccaugcucugaugagcauuaucuccacguuccaccucagcauuccgaauuuuaaccaguaugaggccaugucuugugauuucaauggaggcaagaucuccgugcaguacaaccugagccacucuuaugccauugacgcugccaaucauugcggcaccgucgcuaacgggauccuucaaacauuuaugcgcauggccuggggaggcuccuacaucgcgcuggauagcggguguggaaacugggacugcauuaugaccucuuaccaguaucucaucauucagaauacaaccugggagaaccacugucaguucuccagacccagcccuaucggcuaccuggggcuucugucccaacggacgcgcgauauuuauaucucuagacggcuccugggaacauuuaccuggacacugagcgacuccgaaggcaaugccacccccggcggguacugccucacccgcuggaugcugaucgaggcugaacuuaaguguuucggaaacacagccguggcuaaaugcaaugagaagcaugaugaggaauuuugcgacaugcugagacucuucgauuuuaacaaacaggccauuagccggcugaagucuccugcgcagauguccauccagcuuauuaauaaagccguuaacgcucugaucaaugaccaacucauuaugaagaaccaucugcgcgacaucauguguauccccuauugcaauuacagcaaguauugguaccugaaccacacgauuaccggcaaaacaucucucccuaaguguuggcuggugagcaauggguccuaccuuaacgagacccacuucucugaugacaucgaacagcaggccgauaauaugauuacagagaugcugcaaaaagaauauauggagagacagggaaagaccccgcucggccuggucgaccuguucguguuuagcacguccuucuaccuuaucagcauuuuucuccggcuggugaaaauccccacacaccgccauauugucgggaagccuugccccaaaccucacagacugaaccauaugggaaucuguucuugcggccucuauaagcagcccggcguuccggugcgguggaagcgcugaggacuaguuauaagacugacuagcccgaugggccucccaacgggcccuccuccccuccuugcaccgagauuaaucaaaggcucuuuucagagccaccaaaaaaaaaaaaaaaaaaaaaaaaaaaaaaaaaaaaaaaaaaaaaaaaaaaaaaaaaaaaaaaaaaaaaaaaaaaaaaaaaaaaaaaaaaaaaaaaaaaaa

SEQ ID NO: 29578 - RNA, 1686 nt, Artificial Sequence
  mRNA product Design i-3 (hSL-A100) comprising derived and/or modified sequence from LASV(Togo/2016/7082;Clade VI)__AMR44577__GPCmut5 (opt5)
aggagaaagcuuaccaugggccagaucauuaccuucuuucaagaggugccccacgucaucgaagagguuaugaacauugugcugaucgcccucagccugcuugcuauucugaaggggguguacaaugucgccacaugcggaaucaucggccucgugacguuccuguuucuuugugggagauccugcucucugauuuauaaaggaagcuacgaacuccagacccuggagcugaacauggaaacacucaauaugaccaugccucuguccuguacaaagaacucuagccaucacuauauccggguuggcaaugagaccgggcuugagcugacacucaccaacacguccauuaucaaucauaaauucugcaaccugucugacgcgcacaagcgcaaucuuuacgaucaugcucugaugagcauucucuccaccuuucaccugagcaucccgaacuucaaucaguaugaagccaugucuugugacuuuaacggaggcaaaauuuccgugcaguacaaucugagccacgccuaugcugucgaugccgcugagcauugcggcacaguggccaacgggguucuccaaaccuucaugagaauggcguggggaggcucuuacaucgcccuggacuccggguguggaaauugggauugcaucaugacaagcuaccaguaucuuauuauccagaacaccacgugggaagaccacugucaguuuucucggcccuccccuauuggcuaccuggggcuccugagccaacgcacaagagauaucuauauuucccggcgccuucugggaaccuucacauggacccucucugacagcgagggcaacgagacccccggcggguacugccugacaagauggaugcugaucgaagcugagcucaaguguuuuggaaauacggccguggcuaagugcaacgaaaaacaugaugaggaguucugcgacaugcugcggcuuuuugauuucaauaagcaggccauccagcgccugaaauccccugcgcagaugagcauucaacucaucaacaaggccgucaaugcucugauuaacgaccagcuuaucaugaaaaaucaccugagagauaugauguguauucccuauugcaacuacucuaaguauugguaccucaaucacaccuccagcggccggacaucucugccuaaguguuggcuggugagcaacggguccuaccucaaugaaacccauuucucugacgacaucgagcagcaagccgauaacaugaucacagaaaugcugcagaaagaguauauugaccgccagggaaagaccccgcuuggccugguggaucucuuugucuucagcacguccuuuuaccugaucagcauuuuccugcaccuuaucaaaauucccacacauagacacaucguugggaagccuugccccaaaccucaucggcucaaucacaugggaauuuguucuugcggccuguauaagcagcccggcgugccgacccgcuggaaaagaugaggacuaguuauaagacugacuagcccgaugggccucccaacgggcccuccuccccuccuugcaccgagauuaaucaaaggcucuuuucagagccaccaaaaaaaaaaaaaaaaaaaaaaaaaaaaaaaaaaaaaaaaaaaaaaaaaaaaaaaaaaaaaaaaaaaaaaaaaaaaaaaaaaaaaaaaaaaaaaaaaaaaa

SEQ ID NO: 29579 - RNA, 1686 nt, Artificial Sequence
  mRNA product Design i-3 (hSL-A100) comprising derived and/or modified sequence from LASV(KAK-428;Clade n.d. (VII))__ANH09740__GPCmut5 (opt5)
aggagaaagcuuaccaugggccagaucgugaccuucuuucaagaggucccccacguuauugaagaggugaugaacaucgugcugauugcccucagccugcuugcuauccugaaggggcucuacaauuucgccacaugcggagucauuggccugaucacguuucuucugcucugugggagauccugcucugcgaccuauaaaggacaguacgaacugcagacacuggagcucaacauggaaagccugaauaugaccaugccucuuuccuguacaaagaacaauucucaucacuauauccgggcuggcaacaauaccgggcuggagcucacacugaccaacacgagcauuaucucccauaaauucugcaaucuuucugacgcccacaagaaaaaccuguacgaucauacccucaugagcauuaucacaaccuuucaccuguccauuccgaauuucaaccaguaugaggccaugagcugugacuuuaauggaggcaagaucucuauucaauacaaccugucccacagcuaugcuggcgaugccgcucagcauugcgggacaguggccaauggaguucuccagaccuucaugcgcauggcguggggcgggucuuaccuggcccuugacuccggauguagaggcugggauugcaucaucagcucuuaccaguaucugauuauccaaaacacgacaugggacgaucacugucaguuuucccggcccagcccuauuggguaccucggauucgugucccagaagacccgcgacaucuauauuucuagacggcugcuuggcacauuuaccuggacccugagcgauuccgaaggccaugacaugcccgggggauacugccucacacgcuggaugcugaucgaggcugaucugaaauguuucggcaacacggccgucgcuaagugcaaugaaaaacacgacgaggaguuuugcgauauguggagacucuucgacuucaacaagcaggccauccaacggcugaaagcgccugcccagaugaauauucagcuuaucaacaaggcugugaaugcccugauuaacgaccaacucaugaugaagaaucaucugcgcgauaucauguguauucccuauugcaacuacagcaaauuuugguaucuuaauaacaccacaaccgggagaacaucucugccucgguguuggcucaucuccaauggaagcuaccugaacgaaacccacuucucugacgauaucgagcagcaggcugacaauaugauuacggaaaugcugcagaaggaguacauggaucgccaaggcaaaacaccgcucgggcugguugaccuuuuuguguucagcaccuccuuuuaucugaucaccauuuuccuccaccuggucaagauccccacacauagacacauugugggaaaaccuugccccaagccucaucggcugaaccacaugggcaucuguucuugcggccuuuacaaacagcccggggugccgguccgcuggaagagaugaggacuaguuauaagacugacuagcccgaugggccucccaacgggcccuccuccccuccuugcaccgagauuaaucaaaggcucuuuucagagccaccaaaaaaaaaaaaaaaaaaaaaaaaaaaaaaaaaaaaaaaaaaaaaaaaaaaaaaaaaaaaaaaaaaaaaaaaaaaaaaaaaaaaaaaaaaaaaaaaaaaaa

SEQ ID NO: 29580 - RNA, 1686 nt, Artificial Sequence; identical to SEQ ID NO: 29574
  mRNA product Design i-3 (hSL-A100) comprising derived and/or modified sequence from LASV(Pinneo-NIG-1969;Clade I)__AIT17836__GPCmut5 (opt5)

SEQ ID NO: 29581 - RNA, 1686 nt, Artificial Sequence
  mRNA product Design i-3 (hSL-A100) comprising derived and/or modified sequence from LASV(ISTH0009-NIG-2011;Clade II)__AIT17404__GPCmut5 (opt5)
aggagaaagcuuaccaugggccagaucauuaccuucuuucaagaggugccccacgucaucgaagagguuaugaacauugugcugaucgcccucagccugcuugcuauucugaaggggaucuacaauguggccacaugcggacucuucggccuggucuccuuucuucugcucugugggagaucuugcagcacgaccuauaaaggaguguacgaacugcagacacuggagcucgacauggcgucccugaacaugaccaugccucuuucuuguacaaagaauaacagccaucacuauaucaugguuggcaaugaaaccgggcuggagcucacacugaccaacacguccauuaucaaucauaaauucugcaaccuuucugaugcucacaagaaaaaucuguacgaccaugcccucaugagcauuaucuccaccuuucaccugagcauuccgaacuucaaucaguaugaggccaugucuugugauuuuaacggaggcaagaucuccgugcaguacaaucugagccacgcuuaugccgucgacgcugccaaccauugcggcacaauugcgaauggggugcuccaaaccuucaugcggauggccuggggaggcucuuacaucgcucuggauuccggguguggaagcugggacugcaucaugacaucuuaccaguaucuuauuauccagaacaccacgugggaagaucacugucaguuuucccgccccagcccuauuggcuaccuggggcuccugucccaaagaacacgggacaucuauauuucucgcagacuucugggaaccuucacauggacccucagcgauuccgagggcaacgaaacccccggcggguacugccugacacgguggaugcugaucgaggccgagcucaaguguuuuggaaauacggcuguugccaaaugcaacgaaaagcaugacgaggaguucugcgauaugcugcgccuuuuugacuucaauaaacaggcgaucagacggcugaagaccccugcccagaugagcauucagcucaucaacaaagcugugaaugcccugauuaacgaucaacuuaucaugaagaaucaucugcgcgacauuauguguauccccuauugcaacuacucuaaguauugguaccucaaucacacagucaccggcaaaacaucccugccuagauguuggcuggugagcaacgggucuuaccucaaugaaacccacuucagcgacgauaucgaacagcaggcugacaacaugauuacggagcugcuucaaaaggaguauauggaucggcagggaaaaacaccgcugggccucguggaccuguuugucuucuccaccucuuuuuaccugaucagcauuuuccuucaccucaucaagauucccacccaucgccacaucacagggaaaccuugccccaagccucauagacugaaucacaugggaauuuguuccugcggccuguauaaacaccccggcguuccggugaaguggaagcggugaggacuaguuauaagacugacuagcccgaugggccucccaacgggcccuccuccccuccuugcaccgagauuaaucaaaggcucuuuucagagccaccaaaaaaaaaaaaaaaaaaaaaaaaaaaaaaaaaaaaaaaaaaaaaaaaaaaaaaaaaaaaaaaaaaaaaaaaaaaaaaaaaaaaaaaaaaaaaaaaaaaaa

SEQ ID NO: 29582 - RNA, 1686 nt, Artificial Sequence
  mRNA product Design i-3 (hSL-A100) comprising derived and/or modified sequence from LASV(ISTH2010-NIG-2012;Clade II)__AIT17482__GPCmut5 (opt5)
aggagaaagcuuaccaugggccagaucauuaccuucuuucaagaggugccccacgucaucgaagagguuaugaacauugugcugaucgcccucagccugcuugcuauucugaaggggaucuacaauguggccacaugcggacucuucggccuggucuccuuucuucugcucugugggagaucuugcagcacgaccuauaaaggaguguacgaacugcagacacuggagcucgacauggcgucccugaacaugaccaugccucuuucuuguacaaagaauaacagccaucacuauaucaugguuggcaaugaaaccgggcuggagcucacacugaccaacacguccauuaucaaucauaaauucugcaaccuuucugaugcucacaagaaaaaucuguacgaccaugcccucaugagcauuaucuccaccuuucaccugagcauuccgaacuucaaucaguaugaggccaugucuugugauuuuaacggaggcaagaucuccgugcaguacaaucugagccacgcuuaugccgucgacgcugccaaccauugcggcacaauugcgaauggggugcuccaaaccuucaugcggauggccuggggaggcucuuacaucgcucuggauuccggguguggaagcugggacugcaucaugacaucuuaccaguaucuuauuauccagaacauuaccugggaagaucacugucaguuuucccgccccagcccuaucggcuaccuggggcuccugucccaaagaacgcgggacauuuauaucucucgcagacuucugggaacauucaccuggacacucagcgauuccgagggcaacgaaacccccggcggguacugccugacccgguggaugcugaucgaggccgagcucaaguguuuuggaaauacagcuguugccaaaugcaacgaaaagcaugacgaggaguucugcgauaugcugcgccuuuuugacuucaauaaacaggcgauuagacggcugaagacgccugcccagaugagcauccagcucauuaacaaagcugugaaugcccugaucaacgaucaacuuauuaugaagaaucaucugcgcgacaucauguguauccccuauugcaacuacucuaaguauugguaccucaaucacaccgucacaggcaaaaccucccugccuagauguuggcuggugagcaacgggucuuaccucaaugaaacacacuucagcgacgauauugaacagcaggcugacaacaugaucaccgagcugcuucaaaaggaguauauugaucggcagggaaaaacgccgcugggccucguggaccuguuugucuucuccacaucuuuuuaccugaucagcauuuuccuucaccucguuaagauccccacccaucgccacgugguggggaaaccuugccccaagccucauagacugaaucacaugggaauuuguuccugcggccuguauaaacaccccggcgucccggugaaguggaagcggugaggacuaguuauaagacugacuagcccgaugggccucccaacgggcccuccuccccuccuugcaccgagauuaaucaaaggcucuuuucagagccaccaaaaaaaaaaaaaaaaaaaaaaaaaaaaaaaaaaaaaaaaaaaaaaaaaaaaaaaaaaaaaaaaaaaaaaaaaaaaaaaaaaaaaaaaaaaaaaaaaaaaa

SEQ ID NO: 29583 - RNA, 1686 nt, Artificial Sequence
  mRNA product Design i-3 (hSL-A100) comprising derived and/or modified sequence from LASV(Lassa virus/H.sapiens-wt/NGA/2015/ISTH_0543;Clade II)__AVO03639__GPCmut5 (opt5)
aggagaaagcuuaccaugggccagaucauuaccuucuuucaagaggugccccacgucaucgaagagguuaugaacauugugcugaucgcccucagccugcuugcuauucugaaggggaucuacaauguggccacaugcggacucuucggccuggucuccuuucuucugcucugugggagaucuugcagcacgaccuauaaaggaguguacgaacugcagacacuggagcucgacauggcgaaccugaauaugaccaugccucuuuccuguacaaagaacaauucucaucacuauaucaugguuggcaacgaaaccgggcuggagcucacacugaccaauacgagcauuaucaaccauaaauucugcaaucuuuccgaugcucacaagaaaaaccuguacgaccaugcccucaugucuauuaucagcaccuuucaccuguccauuccgaauuucaaccaguaugaggccaugagcugugauuuuaauggaggcaagaucucugugcaguacaaccugucccacacauaugcugucgacgccgcuaaucauugcggcaccauugccaacggggugcuccaaacauucaugcggauggcguggggaggcagcuacaucgcccuggauucuggguguggauccugggacugcaucaugaccagcuaccaguaucuuguuauucagaacacgacaugggaagaucacugucaguuuucucgccccuccccuaucggcuaccuggggcuccugagccaaagaacccgggacauuuauaucucccgcagacuucugggaacauucaccuggacccucucugauagcgagggcaaugaaacacccggcggguacugccugacgcgguggaugcugauugaggcugagcucaaguguuuuggaaacaccgccguggcuaaaugcaaugaaaagcaugacgaggaguucugcgauaugcugcgccuuuuugacuucaacaaacaggccaucagacggcugaagaccccugcgcagauguccauccagcucauuaauaaagccgucaacgcucugaucaaugaucaacuuauuaugaagaaccaucugcgcgacaucauguguauucccuauugcaauuacagcaaguauugguaccucaaccacacagugacaggcaaaaccucucugccuagauguuggcugguguccaaugggagcuaccucaacgaaacgcacuucucugacgauaucgaacagcaggccgacaauaugaucacagagcugcuucaaaaggaguauauugaucggcagggaaaaaccccgcugggccucgucgaccuguuuguuuucagcaccuccuuuuaccugaucucuauuuuccuucaccucgugaagauccccacacaucgccacauuaccgggaaaccuugccccaagccucauagacugaaccacaugggaaucuguagcugcggccuguauaaacaccccggcgugccggucaaguggaagcggugaggacuaguuauaagacugacuagcccgaugggccucccaacgggcccuccuccccuccuugcaccgagauuaaucaaaggcucuuuucagagccaccaaaaaaaaaaaaaaaaaaaaaaaaaaaaaaaaaaaaaaaaaaaaaaaaaaaaaaaaaaaaaaaaaaaaaaaaaaaaaaaaaaaaaaaaaaaaaaaaaaaaa

SEQ ID NO: 29584 - RNA, 1686 nt, Artificial Sequence
  mRNA product Design i-3 (hSL-A100) comprising derived and/or modified sequence from LASV(Lassa virus/H.sapiens-wt/NGA/2016/ISTH_0009;Clade II)__AVO03571__GPCmut5 (opt5)
aggagaaagcuuaccaugggccagaucauuaccuucuuucaagaggugccccacgucaucgaagagguuaugaacauugugcugaucgcccucagccugcuugcuauucugaaggggaucuacaauguggccacaugcggacuccugggccuugucuccuuccugcuccugugugggagaucuugcagcacgaccuauaaaggaguguacgaacugcagacacucgagcuggacauggcgucccuuaacaugaccaugccucugucuuguacaaagaauaacagccaucacuauaucaugguuggcaaugaaaccgggcucgagcugacacuuaccaacacguccauuaucaaucauaaauuuugcaaccugucugaugcucacaagaaaaaucucuacgaccaugcccugaugagcauuaucuccaccuuccaccugagcauuccgaacuuuaaucaguaugaggccaugucuugugauuucaacggaggccggaucuccgugcaguacaaucucagccacucuuaugcugucgacgccgcuaaccauugcggcacaauugccaauggggugcugcaaaccuuuaugcgcauggcguggggaggcuccuacaucgcccuugauagcggguguggaucuugggacugcaucaugacauccuaccaguaucugauuauccagaacaccacgugggaagaucacugucaguucagcagacccuccccuauuggcuaccucgggcugcuuucucaacggacacgcgacaucuauauuagcagacggcugcucggaaccuuuacauggacccuguccgauagcgagggcaacgaaacccccggcggguacugccugacacgcuggaugcucaucgaggcugagcugaaguguuucggaaauacggccguugcuaagugcaacgaaaaacaugacgaggaauuuugcgauaugcuuagacuguucgacuuuaauaagcaggccauccggcgccucaaaaccccugcgcagaugucuauucagcugaucaacaaggccgugaaugcucuuauuaacgaucaacugaucaugaaaaaucaccucagagacauuauguguauccccuauugcaacuacuccaaguauugguaccugaaucacacagucaccggcaagacaagccugccucgguguuggcucgugucuaacgggagcuaccugaaugagacccauuucuccgacgauaucgaacagcaggccgacaacaugauuacggagcuucugcaaaaagaguauaucgaucgccagggaaagacaccgcucggccugguggaccuguucgucuuuucuaccagcuucuaccuuauuuccaucuuucuccaccugguuaaaauucccacccauagacacaucacagggaagccuugccccaaaccucaucggcugaaucacaugggaauuuguagcugcggccucuauaaccaccccggcgugccggugaaguggaaacgcugaggacuaguuauaagacugacuagcccgaugggccucccaacgggcccuccuccccuccuugcaccgagauuaaucaaaggcucuuuucagagccaccaaaaaaaaaaaaaaaaaaaaaaaaaaaaaaaaaaaaaaaaaaaaaaaaaaaaaaaaaaaaaaaaaaaaaaaaaaaaaaaaaaaaaaaaaaaaaaaaaaaaa

SEQ ID NO: 29585 - RNA, 1686 nt, Artificial Sequence
  mRNA product Design i-3 (hSL-A100) comprising derived and/or modified sequence from LASV(Lassa virus/H.sapiens-wt/NGA/2016/ISTH_0017;Clade II)__AVO03567__GPCmut5 (opt5)
aggagaaagcuuaccaugggccagaucauuaccuucuuucaagaggugccccacgucaucgaagagguuaugaacauugugcugaucgcccucagccugcuugcuauucugaaggggaucuacaauguggccacaugcggacucuucggccuggucuccuuucuucugcucugugggagaucuugcagcacgaccuauaaaggaguguacgaacugcagacacuggagcucgacauggcgucccugaacaugaccaugccucuuucuuguacaaagaauaacagccaucacuauaucaugguuggcaaugaaaccgggcuggagcucacacugaccaacacguccauuaucaaucauaaauucugcaaccuuucugaugcucacaagaaaaaucuguacgaccaugcccucaugagcauuaucuccaccuuucaccugagcauuccgaacuucaaucaguaugaggccaugucuugugauuuuaacggaggcaagaucuccgugcaguacaaucugagccacacauaugcuauugacgccgcuaaccauugcggcaccaucgccaaugggguccuccaaacauucaugcggauggcguggggaggcucuuacaucgcccuggauuccggguguggaagcugggacugcauuaugaccucuuaccaguaucuuaucauucagaacacgacaugggaagaucacugucaguuuucccgccccagcccuaucggcuaccuggggcuccugucccaaagaacccgggacauuuauaucucucgcagacuucugggaacauucaccuggacccucagcgauuccgagggcaacgaaacacccggcggguacugccugacgcgguggaugcugaucgaggcugagcucaaguguuuuggaaauaccgccguggcuaaaugcaacgaaaagcaugacgaggaguucugcgauaugcugcgccuuuuugacuucaauaaacaggccauuagacggcugaagaccccugcgcagaugagcauccagcucauuaacaaagccguuaaugcucugaucaacgaucaacuuauuaugaagaaucaucugcgcgacaucauguguauccccuauugcaacuacucuaaguauugguaccucaaucacacagugacaggcaaaaccucccugccuagauguuggcuggucagcaacgggucuuaccucaaugaaacgcacuucagcgacgauauugaacagcaggccgacaacaugaucacagagcugcuucaaaaggaguauauggaucggcagggaaaaaccccgcugggccucguggaccuguuuguguucuccaccucuuuuuaccugauuagcaucuuccuucaccucguccgcauucccacacauagacacguuaucgggaagccuugccccaaaccucaucggcugaaucacaugggaauuuguuccugcggccuguauaagcaccccggcgugccggugaaauggaagcgcugaggacuaguuauaagacugacuagcccgaugggccucccaacgggcccuccuccccuccuugcaccgagauuaaucaaaggcucuuuucagagccaccaaaaaaaaaaaaaaaaaaaaaaaaaaaaaaaaaaaaaaaaaaaaaaaaaaaaaaaaaaaaaaaaaaaaaaaaaaaaaaaaaaaaaaaaaaaaaaaaaaaaa

SEQ ID NO: 29586 - RNA, 1686 nt, Artificial Sequence
  mRNA product Design i-3 (hSL-A100) comprising derived and/or modified sequence from LASV(Lassa virus/H.sapiens-wt/NGA/2018/ISTH_0959;Clade II)__AVV65099__GPCmut5 (opt5)
aggagaaagcuuaccaugggccagaucauuaccuucuuucaagaggugccccacgucaucgaagagguuaugaacauugugcugaucgcccucagccugcuugcuauucugaaggggaucuacaauguggucacaugcggacucuucggccugguguccuuucuucugcucugugggagaucuugcagcacgaccuauaaaggaguuuacgaacugcagacacuggagcucgacauggccucccugaacaugaccaugccucuuucuuguacaaagaauaacagccaucacuauaucauggugggcaaugaaaccgggcuggagcucacacugaccaacacguccauuaucaaucauaaauucugcaaccuuucugaugcgcacaagaaaaaucuguacgaccaugcucucaugagcauuaucuccaccuuucaccugagcauuccgaacuucaaucaguaugaggccaugucuugugauuuuaacggaggcaagaucuccguccaguacaaucugagccacgccuaugcuauugacgccgcuaaccauugcggcacaaucgccaauggggugcuccaaaccuucaugcggauggcguggggaggcucuuacaucgcccuggauuccggguguggaagcugggacugcauuaugacaucuuaccaguaucuuaucauucagaacaccacgugggaagaucacugucaguuuucccgccccagcccuaucggcuaccuggggcuccugucccaaagaacacgggacauuuauaucucucgcagacuucugggaaccuucacauggacccucagcgauuccgagggcaacgaaacccccggcggguacugccugacacgguggaugcugaucgaggcugagcucaaguguuuuggaaauacggccguugcuaaaugcaacgaaaagcaugacgaggaguucugcgauaugcugcgccuuuuugacuucaauaaacaggccauuagacggcugaagaccccugcgcagaugagcauccagcucauuaacaaagccgugaaugcucugaucaacgaucaacuuauuaugaagaaucaucugcgcgacaucauguguauccccuauugcaacuacucuaaguauugguaccucaaucacacagucaccggcaaaacaucccugccuagauguuggcuggugagcaacgggucuuaccucaaugaaacccacuucagcgacgauauugaacagcaggccgacaacaugaucacggagcugcuucaaaaggaguauauugaucggcagggaaaaacaccgcugggccucguggaccuguuugucuucuccaccucuuuuuaccugaucagcauuuuccuucaccucguuaagauccccacccaucgccacgugauugggaaaccuugccccaagccucauagacugaaucacaugggaaucuguuccugcggccuguauaaacaccccggcgugccggucaaguggaagcggugaggacuaguuauaagacugacuagcccgaugggccucccaacgggcccuccuccccuccuugcaccgagauuaaucaaaggcucuuuucagagccaccaaaaaaaaaaaaaaaaaaaaaaaaaaaaaaaaaaaaaaaaaaaaaaaaaaaaaaaaaaaaaaaaaaaaaaaaaaaaaaaaaaaaaaaaaaaaaaaaaaaaa

SEQ ID NO: 29587 - RNA, 1686 nt, Artificial Sequence
  mRNA product Design i-3 (hSL-A100) comprising derived and/or modified sequence from LASV(LASV003-NIG-2008;Clade II)__AIT17580__GPCmut5 (opt5)
aggagaaagcuuaccaugggccagaucauuaccuucuuucaagaggugccccacgucaucgaagagguuaugaacauugugcugaucgcccucagccugcuugcuauucugaaggggaucuacaauguggccacaugcggacucuucggccuggucuccuuucuucugcucugugggagaucuugcagcacgaccuauaaaggaguguacgaacugcagacacuggagcucgacauggcgucccugaacaugaccaugccucuuucuuguacaaagaauaacagccaucacuauaucaugguuggcaaugaaaccgggcuggagcucacacugaccaacacguccauuaucaaucauaaauucugcaaccuuucugaugcucacaagaaaaaucuguacgaccaugcccucaugagcauuaucuccaccuuucaccugagcauuccgaacuucaaucaguaugaggccaugucuugugauuuuaacggaggcaagaucuccgugcaguacaaucugagccacacauaugcugucgacgccgcuaaccauugcggcaccauugccaauggggugcuccaaacauucaugcggauggcguggggaggcucuuacaucgcccuggauuccggguguggaagcugggacugcaucaugaccucuuaccaguaucuuauuauccagaacacgacaugggaagaucacugucaguuuucccgccccagcccuauuggcuaccuggggcuccugucccaaagaacccgggacaucuauauuucucgcagacuucugggaacauucaccuggacccucagcgauuccgagagcaacgaaacacccggcggcuacugccugacgcgguggaugcugaucgaggcugagcucaaguguuuugggaauaccgccguugcuaaaugcaacgaaaagcaugacgaggaguucugcgauaugcugcgccuuuuugacuucaauaaacaggccaucagacggcugaaggcgccugcccagaugucuauucagcucaucaacaaagcugugaaugcccugauuaacgaucaacuuaucaugaagaaucaucugcgcgacauuauguguauccccuauugcaacuacuccaaguauugguaccucaaucacacagucaccggaagaacaagccugccucgguguuggcuggugucuaacggcagcuaccucaaugaaacccacuucuccgacgauaucgaacagcaggcugacaacaugauuacggagcugcuucaaaaagaguauauggaucgccaggggaagacaccgcugggacucguggaccuguuugucuucucuaccagcuuuuaccugaucuccauuuuccuucaccucguuaaaauccccacccauagacacgugauuggcaagccuugccccaaaccucaucggcugaaucacauggggaucuguagcugcggacuguauaagcaccccggcgugccggucaaauggaagcgcugaggacuaguuauaagacugacuagcccgaugggccucccaacgggcccuccuccccuccuugcaccgagauuaaucaaaggcucuuuucagagccaccaaaaaaaaaaaaaaaaaaaaaaaaaaaaaaaaaaaaaaaaaaaaaaaaaaaaaaaaaaaaaaaaaaaaaaaaaaaaaaaaaaaaaaaaaaaaaaaaaaaaa

SEQ ID NO: 29588 - RNA, 1686 nt, Artificial Sequence
  mRNA product Design i-3 (hSL-A100) comprising derived and/or modified sequence from LASV(LASV035-NIG-2009;Clade II)__AIT17588__GPCmut5 (opt5)
aggagaaagcuuaccaugggccagaucauuaccuucuuucaagaggugccccacgucaucgaagagguuaugaacauugugcugaucgcccucagccugcuugcuauucugaaggggaucuacaauguggccacaugcggacucuucggccuggucuccuuucuucugcucugugggagaucuugcagcacgaccuauaaaggaguguacgaacugcagacacuggagcucgacauggcgucccugaacaugaccaugccucuuucuuguacaaagaauaacagccaucacuauaucaugguuggcaaugaaaccgggcuggagcucacacugaccaacacguccauuaucaaucauaaauucugcaaccuuucugaugcucacaagaaaaaucuguacgaccaugcccucaugagcauuaucuccaccuuucaccugagcauuccgaacuucaaucaguaugaggccaugucuugugauuuuaacggaggcaagaucuccgugcaguacaaucugagccacgcuuaugccgucgacgcugccaaccauugcggcacaauugcgaauggggugcuccaaaccuucaugcggauggccuggggaggcucuuacaucgcucuggauuccggguguggaagcugggacugcaucaugacaucuuaccaguaucuuauuauccagaacaccacgugggaagaucacugucaguuuucccgccccagcccuauuggcuaccuggggcuccugucccaaagaacacgggacaucuauauuucucgcagacuucugggaaccuucacauggacccucagcgauuccgagggcaacgaaacccccggcggguacugccugacacgguggaugcugaucgaggccgagcucaaguguuuuggaaauacggcuguugccaaaugcaacgaaaagcaugacgaggaguucugcgauaugcugcgccuuuuugacuucaauaaacaggcgaucagacggcugaaggccccugcucagaugagcauucagcucaucaacaaagccgugaaugcucugauuaacgaucaacuuaucaugaagaaucaucugcgcgacauuauguguauccccuauugcaacuacucuaaguauugguaccucaaucacaccgucacaggcaaaaccucccugccuagauguuggcuggugagcaacgggucuuaccucaaugaaacacacuucagcgacgauaucgaacagcaggccgacaacaugauuaccgagcugcuucaaaaggaguauaucgaucggcagggaaaaacgccgcugggccucguggaccuguuugucuucuccacaucuuuuuaccugauuagcaucuuccuucaccucguuaagauucccacccaucgccacgugaucgggaaaccuugccccaagccucauagacugaaucacaugggaauuuguuccugcggccuguauaaacaccccggcgugccggucaaguggaagcggugaggacuaguuauaagacugacuagcccgaugggccucccaacgggcccuccuccccuccuugcaccgagauuaaucaaaggcucuuuucagagccaccaaaaaaaaaaaaaaaaaaaaaaaaaaaaaaaaaaaaaaaaaaaaaaaaaaaaaaaaaaaaaaaaaaaaaaaaaaaaaaaaaaaaaaaaaaaaaaaaaaaaa

SEQ ID NO: 29589 - RNA, 1686 nt, Artificial Sequence
  mRNA product Design i-3 (hSL-A100) comprising derived and/or modified sequence from LASV(LASV1000-NIG-2009;Clade II)__AIT17782__GPCmut5 (opt5)
aggagaaagcuuaccaugggccagaucauuaccuucuuucaagaggugccccacgucaucgaagagguuaugaacauugugcugaucgcccucagccugcuugcuauucugaaggggaucuacaauguggccacaugcggacucuucggccuggucuccuuucuucugcucugugggagaucuugcagcacgaccuauaaaggaguguacgaacugcagacacuggagcucgacauggcgucccugaacaugaccaugccucuuucuuguacaaagaauaacagccaucacuauaucaugguuggcaaugaaaccgggcuggagcucacacugaccaacacguccauuaucaaucauaaauucugcaaccuuucugaugcucacaagaaaaaucuguacgaccaugcccucaugagcauuaucuccaccuuucaccugagcauuccgaacuucaaucaguaugaggccaugucuugugauuuuaacggaggcaagaucuccgugcaguacaaucugagccacacauaugcugucgacgccgcuaaccauugcggcaccauugccaauggggugcuccaaacauucaugcggauggcguggggaggcucuuacaucgcccuggauuccggguguggaagcugggacugcaucaugaccucuuaccaguaucuuauuauccagaacacgacaugggaagaucacugucaguuuucccgccccagcccuauuggcuaccuggggcuccugucccaaagaacccgggacaucuauauuucucgcagacuucugggaacauucaccuggacccucagcgauuccgagggcaacgaaacacccggcggguacugccugacgcgguggaugcugaucgaggcugagcucaaguguuuuggaaauaccgccguugcuaaaugcaacgaaaagcaugacgaggaguucugcgauaugcugcgccuuuuugacuucaauaaacaggccaucaagagacugaaaaccccugcgcagaugagcauucagcucaucaacaaggccgugaaugcucugauuaacgaucaacuuaucaugaagaaucaucugcgggacauuauguguauccccuauugcaacuacucuaaauauugguaccucaaucacacagucacaggcaagaccucccugccucgcuguuggcuggugagcaacgggucuuaccucaaugaaacgcacuucagcgacgauaucgaacagcaggccgacaacaugauuacagagcugcuucaaaaagaguauaucgauagacagggaaagaccccgcugggccucguggaccuguuugucuucuccaccucuuuuuaccugauuagcaucuuccuucaccucguuaaaauucccacacaucggcacgugguggggaagccuugccccaaaccucaucgccugaaucacaugggaaucuguuccugcggccuguauaagcaccccggcgucccggugaaguggaaaagaugaggacuaguuauaagacugacuagcccgaugggccucccaacgggcccuccuccccuccuugcaccgagauuaaucaaaggcucuuuucagagccaccaaaaaaaaaaaaaaaaaaaaaaaaaaaaaaaaaaaaaaaaaaaaaaaaaaaaaaaaaaaaaaaaaaaaaaaaaaaaaaaaaaaaaaaaaaaaaaaaaaaaa

SEQ ID NO: 29590 - RNA, 1686 nt, Artificial Sequence
  mRNA product Design i-3 (hSL-A100) comprising derived and/or modified sequence from LASV(LASV221-NIG-2010;Clade II)__AIT17624__GPCmut5 (opt5)
aggagaaagcuuaccaugggccagaucauuaccuucuuucaagaggugccccacgucaucgaagagguuaugaacauugugcugaucgcccucagccugcuugcuauucugaaggggaucuacaauguggccacaugcggacucuucggccuggucuccuuucuucugcucugugggagaucuugcagcacgaccuauaaaggaguguacgaacugcagacacuggagcucgacauggcgucccugaacaugaccaugccucuuucuuguacaaagaauaacagccaucacuauaucaugguuggcaaugaaaccgggcuggagcucacacugaccaacacguccauuaucaaucauaaauucugcaaccuuucugaugcucacaagaaaaaucuguacgaccaugcccucaugagcauuaucuccaccuuucaccugagcauuccgaacuucaaucaguaugaggccaugucuugugauuuuaacggaggcaagaucuccgugcaguacaaucugagccacacauaugcuauugacgccgcuaaccauugcggcaccaucgccaaugggguccuccaaacauucaugcggauggcguggggaggcucuuacaucgcccuggauuccggguguggaagcugggacugcauuaugaccucuuaccaguaucuuaucauucagaacacgacaugggaagaucacugucaguuuucccgccccagcccuaucggcuaccuggggcuccugucccaaagaacccgggacauuuauaucucucgcagacuucugggaacauucaccuggacccucagcgauuccgagggcaacgaaacacccggcggguacugccugacgcgguggaugcugaucgaggcugagcucaaguguuuuggaaauaccgccguggcuaaaugcaacgaaaagcaugacgaggaguucugcgauaugcugcgccuuuuugacuucaauaaacaggccauuagacggcugaagaccccugcgcagaugagcauccagcucauuaacaaagccguuaaugcucugaucaacgaucaacuuauuaugaagaaucaucugcgcgacaucauguguauccccuauugcaacuacucuaaguauugguaccucaaucacacagugacaggcaaaaccucccugccuagauguuggcuggucagcaacgggucuuaccucaaugaaacgcacuucagcgacgauauugaacagcaggccgacaacaugaucacagagaugcugcaaaaggaguauauggaucggcagggaaaaaccccgcuuggccugguggaccucuuuguguucuccaccucuuuuuaccugauuagcaucuuccugcaccuugucaagauucccacacaucgccacguuaucgggaaaccuugccccaagccucauagacucaaucacaugggaauuuguuccugcggccuguauaaacaccccggcgugccggugaaguggaagcggugaggacuaguuauaagacugacuagcccgaugggccucccaacgggcccuccuccccuccuugcaccgagauuaaucaaaggcucuuuucagagccaccaaaaaaaaaaaaaaaaaaaaaaaaaaaaaaaaaaaaaaaaaaaaaaaaaaaaaaaaaaaaaaaaaaaaaaaaaaaaaaaaaaaaaaaaaaaaaaaaaaaaa

SEQ ID NO: 29591 - RNA, 1686 nt, Artificial Sequence
  mRNA product Design i-3 (hSL-A100) comprising derived and/or modified sequence from LASV(LASV237-NIG-2010;Clade II)__AIT17638__GPCmut5 (opt5)
aggagaaagcuuaccaugggccagaucauuaccuucuuucaagaggugccccacgucaucgaagagguuaugaacauugugcugaucgcccucagccugcuugcuauucugaaggggaucuacaauguggccacaugcggacucuucggccuggucuccuuucuucugcucugugggagaucuugcagcacgaccuauaaaggaguguacgaacugcagacacuggagcucgacauggcgucccugaacaugaccaugccucuuucuuguacaaagaauaacagccaucacuauaucaugguuggcaaugaaaccgggcuggagcucacacugaccaacacguccauuaucaaucauaaauucugcaaccuuucugaugcucacaagaaagaccuguacgaucaugcccucaugagcauuaucuccaccuuucaccugagcauuccgaauuucaaccaguaugaggccaugucuugugacuuuaauggaggcaagaucuccgugcaguacaaccugagccacacauaugcugucgaugccgcuaaucauugcggcaccauugccaacggggugcuccaaacauucaugcggauggcguggggaggcucuuacaucgcccuggacuccggguguggaagcugggauugcaucaugaccucuuaccaguaucuuauuauccagaauacgacaugggaagaccacugucaguuuucccgccccagcccuauuggcuaccuggggcuccugucccaaagaacccgggauaucuauauuucucgcagacuucugggaacauucaccuggacccucagcgacuccgagggcaacgaaacacccggcggguacugccugacgcgguggaugcugaucgaggcugagcucaaguguuuuggaaacaccgccguugcuaaaugcaaugaaaagcaugaugaggaguucugcgacaugcugcgccuuuuugauuucaacaaacaggccaucagacggcugaagaccccugcgcagaugagcauucagcucaucaauaaagccgugaacgcucugauuaaugaccaacuuaucaugaagaaccaucugcgcgacauuauguguauccccuauugcaauuacucuaaguauugguaccucaaccacacagucacaggcaaaaccucccugccuagauguuggcuggugagcaaugggucuuaccucaacgaaacgcacuucagcgaugacaucgaacagcaggccgauaauaugauuacagagcugcuucaaaaggaguauauggaccggcagggaaaaaccccgcugggccucguggaucuguuugucuucuccaccucuuuuuaccugaucagcauuuuccuucaccucaucaagauucccacacaucgccacaucaccgggaaaccuugccccaagccucauagacugaaccacaugggaauuuguuccugcggccuguauaaacaccccggcguuccggugaaguggaagcggugaggacuaguuauaagacugacuagcccgaugggccucccaacgggcccuccuccccuccuugcaccgagauuaaucaaaggcucuuuucagagccaccaaaaaaaaaaaaaaaaaaaaaaaaaaaaaaaaaaaaaaaaaaaaaaaaaaaaaaaaaaaaaaaaaaaaaaaaaaaaaaaaaaaaaaaaaaaaaaaaaaaaa

SEQ ID NO: 29592 - RNA, 1686 nt, Artificial Sequence
  mRNA product Design i-3 (hSL-A100) comprising derived and/or modified sequence from LASV(LASV253-NIG-2011;Clade II)__AIT17670__GPCmut5 (opt5)
aggagaaagcuuaccaugggccagaucauuaccuucuuucaagaggugccccacgucaucgaagagguuaugaacauugugcugaucgcccucagccugcuugcuauucugaaggggaucuacaauguggccacaugcggacucuucggccuggucuccuuucuucugcucugugggagaucuugcagcacgaccuauaaaggaguguacgaacugcagacacuggagcucgacauggcgucccugaacaugaccaugccucuuucuuguacaaagaauaacagccaucacuauaucaugguuggcaaugaaaccgggcuggagcucacacugaccaacacguccauuaucaaucauaaauucugcaaccuuucugaugcucacaagaaaaaucuguacgaccaugcccucaugagcauuaucuccaccuuucaccugagcauuccgaacuucaaucaguaugaggccaugucuugugauuuuaacggaggcaagaucuccgugcaguacaaucugagccacacauaugcugucgacgccgcuaaccauugcggcaccauugccaauggggugcuccaaacauucaugcggauggcguggggaggcucuuacaucgcccuggauuccggguguggaagcugggacugcaucaugaccucuuaccaguaucuuauuauccagaacacgacaugggaagaucacugucaguuuucccgccccagcccuauuggcuaccuggggcuccugucccaaagaacccgggacaucuauauuucucgcagacuucugggaacauucaccuggacccucagcgauuccgagggcaacgaaacacccggcggguacugccugacgcgguggaugcugaucgaggcugagcucaaguguuuuggaaauaccgccguugcuaaaugcaacgaaaagcaugacgaggaguucugcgauaugcugcgccuuuuugacuucaauaaacaggccaucagacggcugaaggcgccugcccagaugagcauucagcucaucaacaaagcugugaaugcccugauuaacgaucaacuuaucaugaagaaucaucugcgcgacauuauguguauccccuauugcaacuacucuaaguauugguaccucaaucacacagucaccggcagaacaucccugccucgguguuggcuggugagcaacgggucuuaccucaaugaaacccacuucagcgacgauaucgaacagcaggcugacaacaugauuacggagcugcuucaaaaagaguauaucgaucgccagggaaagacaccgcugggccucguggaccuguuugucuucuccaccucuuuuuaccugauuagcaucuuccuucaccucguuaaaauucccacccauagacacaucauugggaagccuugccccaaaccucaucggcugaaucacaugggaaucuguuccugcggccuguauaagcaccccggcgugccggugaaauggaagcgcugaggacuaguuauaagacugacuagcccgaugggccucccaacgggcccuccuccccuccuugcaccgagauuaaucaaaggcucuuuucagagccaccaaaaaaaaaaaaaaaaaaaaaaaaaaaaaaaaaaaaaaaaaaaaaaaaaaaaaaaaaaaaaaaaaaaaaaaaaaaaaaaaaaaaaaaaaaaaaaaaaaaaa

SEQ ID NO: 29593 - RNA, 1686 nt, Artificial Sequence
  mRNA product Design i-3 (hSL-A100) comprising derived and/or modified sequence from LASV(LASV254-NIG-2011;Clade II)__AIT17674__GPCmut5 (opt5)
aggagaaagcuuaccaugggccagaucauuaccuucuuucaagaggugccccacgucaucgaagagguuaugaacauugugcugaucgcccucagccugcuugcuauucugaaggggaucuacaauguggccacaugcggacucuucggccuggucuccuuucuucugcucugugggagaucuugcagcacgaccuauaaaggaguguacgaacugcagacacuggagcucgacaugaccaaccugaauaugacaaugccucuuuccuguaccaagaacaauucucaucacuauaucaugguuggcaacgaaacagggcuggagcucacccugacgaauaccagcauuaucaaccauaaauucugcaaucuuuccgaugcgcacaagaaaaaccuguacaaucaugcucucaugucuauuaucagcacauuucaccuguccauuccgaacuucaaucaguaugaggccaugagcugugacuuuaacggaggcaagaucucugugcaguacaaucugucccacagcuaugccgucgaugcugccaaccauugcggcaccauugcuaacggggugcuccaaacauucaugcggauggccuggggaggcucuuacaucgcgcuggacuccggguguggaaauugggauugcaucaugaccagcuaccaguaucuuauuauccagaacacgacaugggaagaccacugucaguuuucucgccccuccccuauuggcuaccuggggcuccugagccaaagaacccgggauaucuauauuucccgcagacuucugggaacauucaccuggacccucucugacagcgagggcaaugaaacacccggcggguacugccugacgcgguggaugcugaucgaggccgagcucaaguguuuuggaaacaccgcuguugccaaaugcaaugaaaagcaugaugaggaguucugcgacaugcugcgccuuuuugauuucaacaaacaggcuaucagacggcugaagaccccugcccaggcgaauauucagcucaucaacaaagccgugaaugcucugauuaacgaccaacuuaucaugaagaaucaucugcgcgauauuauguguauccccuauugcaacuacuccaaguauugguaccucaaucacacagucacaggcaaaaccagccugccuagauguuggcuggugucuaacggguccuaccucaaugaaacgcacuucagcgacgacaucgaacagcaggccgauaacaugauuacagagcugcuucaaaaggaguauauggaccggcagggaaaaaccccgcugggccucguggaucuguuugucuucucuaccagcuuuuaccugaucuccauuuuccuucaccucguuaagauccccacacaucgccacgugauugggaaaccuugccccaagccucauagacugaaccacaugggaaucuguucuugcggccuguauaaacaccccggcgugccggucaaguggaagcggugaggacuaguuauaagacugacuagcccgaugggccucccaacgggcccuccuccccuccuugcaccgagauuaaucaaaggcucuuuucagagccaccaaaaaaaaaaaaaaaaaaaaaaaaaaaaaaaaaaaaaaaaaaaaaaaaaaaaaaaaaaaaaaaaaaaaaaaaaaaaaaaaaaaaaaaaaaaaaaaaaaaaa

SEQ ID NO: 29594 - RNA, 1686 nt, Artificial Sequence
  mRNA product Design i-3 (hSL-A100) comprising derived and/or modified sequence from LASV(Nig08-A19;Clade III)__ADU56618__GPCmut5 (opt5)
aggagaaagcuuaccaugggccagaucgugaccuucuuucaagaggucccccacguuauugaagaggugaugaacaucgugcugauugcccucagcauccuggcuauucuuaaggggcuguacaauaucgccacaugcggacucaucggccuggucacguuccuucugcucuccgggagaucuuguagcaugaccuauaaaggaguguacgaacugcagacacuggagcucaacaugaauacccugaacaugacaaugccucuuuccugcaccaagaauaacucucaucacuauauuaugguuggcaaugaaacagggcuggagcucacccugacgaacaccagccuucugcaucacaaauuuuguaaucucuccgacgcgcauaagaaaaaccuguacgaucacacacugaugucuaucauuagcaccuuccaccucuccaucccgaauuuuaaccaguaugaggcuaugagcugcgacuucaauggaggcaagauuacagugcaguacaaccugucucauuccuaugccaucgaugccgcuaaucacuguggcaccgucgccaacggggugcuucaaacguuuaugcggauggcuuggggaggcagcuacauugcccuggacucugggugcggaaagugggauuguaucaugacauccuaccaguaucucaucauucagaacaccacaugggaagaccauugccaguucagccgccccucuccuaucggcuaccuggggcuucugucccaaagaacccgggauauuuauaucagccgcagacuccugggaaccuuuacauggacgcuguccgacucugagggcaaugaaacccccggcggguacugucucacacgguggaugcugauugaggcggagcuuaaaugcuucggaaacaccgccguugcuaaguguaaugaaaaacacgaugaggaauuuugcgacaugcugcgccucuucgauuuuaacaagcaggccaucagacggcugaaagcuccugcccagaugagcauccagcuuauuaauaaggcggugaacgcccugaucaaugaccaacucauuaugaagaaccaucugcgcgauaucaugugcauucccuauuguaauuacuccaaauauugguaccugaaccacacaagcaccggcagaacgucucucccucggugcuggcuggucuccaaugggagcuaccuuaacgagacacacuucucugacgacaucgaacagcaggcugauaauaugaucaccgagaugcugcaaaaggaguaucucgaccgccagggaaaaaccccgcugggccugguggaucuuuucguguuuagcacauccuucuaccucauuucuaucuuucugcaucuggucaagauucccacccacagacauaucguugggaaaccuugucccaagccucaccggcucaaccacaugggaauuugcagcuguggccuguauaaacagcccggcgugccggugcgcuggaagagaugaggacuaguuauaagacugacuagcccgaugggccucccaacgggcccuccuccccuccuugcaccgagauuaaucaaaggcucuuuucagagccaccaaaaaaaaaaaaaaaaaaaaaaaaaaaaaaaaaaaaaaaaaaaaaaaaaaaaaaaaaaaaaaaaaaaaaaaaaaaaaaaaaaaaaaaaaaaaaaaaaaaaa

SEQ ID NO: 29595 - RNA, 1689 nt, Artificial Sequence
  mRNA product Design i-3 (hSL-A100) comprising derived and/or modified sequence from LASV(G1180-SLE-2010;Clade IV)__AIT17168__GPCmut5 (opt5)
aggagaaagcuuaccaugggccagaucgugaccuucuuucaagaggucccccacguuauugaagaggugaugaacaucgugcugauugcccucagcauccuggcuguccuuaaggggcuguacaauuucgccacaugcggacucgugggccugcuuacguuucugcuccugugugggagauccugcaccgcgucucgguauaaaggaguuuacgaacugcagacacucgagcugaacauggaaacccuuaauaugacaaugccucugagcuguaccaagaacaauucccaucacuauauuauggugggcaacgagacagggcucgagcugacccuuacgaauaccucuaucaucaaccauaaauucugcaaucugagcgacgcucacaagaaaaaccucuacgaucaugcccugauguccauuaucucuacauuucaccugagcauuccgaauuucaaccaguaugaagccauguccugugacuuuaauggaggcaagaucagcguccaguacaaccucucucacuccuaugcuggcgaugccgcuaaucauugcgggaccguggccaacggaguucugcaaacauucaugcgcauggcguggggcgggagcuacauugcccuugacucuggauguggcuccugggauugcaucaugaccagcuaccaguaucugauuauccagaacacgacaugggaggaccacugucaguuuucuagacccuccccuaucggguaccucggacugcuuagccaacggacccgcgauauuuauaucuccagacggcugcucggcacauucaccuggacccugucugacagcgaaggcaaggauacacccgggggauacugccugacgcgcuggaugcucauugaggcugagcugaaauguuuuggcaauaccgccguggcuaagugcaacgaaaaacaugacgaggaguucugcgauaugcuuagacuguuugacuucaauaagcaggccauccagcggcucaaagcgccugcccagauguccauucaacugaucaacaaggcugucaaugcccuuaucaacgaucagcugauuaugaagaaucaccuccgcgacaucauguguauucccuauugcaacuacagcaaauauugguaccugaaucacacaaccacagggaagaccucucugccuaaauguuggcucguguccaacggaagcuaccugaaugaaacgcauuucucugacgauaucgaacagcaagcugacaacaugauuacagagaugcuucagaaggaguauauggaaagacagggcaaaaccccgcuggggcucguggaucuguuugucuucagcaccuccuuuuaccugaucucuaucuuccuucaccucguuaagauucccacacaucggcacaucgugggaaaaagcugcccuaagccccaucgccugaaucacaugggcauuuguuccugcggccuguauaagcagccuggggugcccgucaaauggaagagaugaggacuaguuauaagacugacuagcccgaugggccucccaacgggcccuccuccccuccuugcaccgagauuaaucaaaggcucuuuucagagccaccaaaaaaaaaaaaaaaaaaaaaaaaaaaaaaaaaaaaaaaaaaaaaaaaaaaaaaaaaaaaaaaaaaaaaaaaaaaaaaaaaaaaaaaaaaaaaaaaaaaaa

SEQ ID NO: 29596 - RNA, 1689 nt, Artificial Sequence
  mRNA product Design i-3 (hSL-A100) comprising derived and/or modified sequence from LASV(G1442-SLE-2011;Clade IV)__AIT17180__GPCmut5 (opt5)
aggagaaagcuuaccaugggccagaucgugaccuucuuucaagaggucccccacguuauugaagaggugaugaacaucgugcugauugcccucagcauccuggcuguccuuaaggggcuguacaauguggccacaugcggacucauuggccugguuacguuccuucugcucugugggagauccugcaccacaacccuguauaaaggaguguacgaacugcagacacucgagcugaacauggaaacccuuaauaugacaaugccucugucuuguaccaagaacaauagccaucacuauauccgggucggcaacgagacggggcucgagcugacccuuacaaauaccuccaucauuaaccauaaauuuugcaaucugucugacgcgcacaagaaaaaccucuacgaucaugcucugaugagcaucauuuccacauuccaccugucuaucccgaauuuuaaccaguaugaagccaugagcugugacuucaauggaggcaagauuuccgugcaguacaaccucagccacucuuaugccggcgaugcugccaaucauugcgggaccguugcuaacggagugcugcaaacguuuaugcgcauggccuggggcggguccuacaucgcgcuugacagcggauguggcaacugggauugcauuaugacaucuuaccaguaucugaucauccagaauaccacaugggacgaucacugucaguucuccagacccagcccuauuggguaccucggacugcuuucucaacggacccgcgacgucuauaucuccagacggcugcucggcaccuuuacauggacgcugagcgauuccgagggcaaggacacccccgggggauacugccugacacgcuggaugcucauugaagccgagcugaaauguuucggcaacaccgcuguggccaagugcaaugagaaacaugaugaagaguuuugcgacaugcuuagacuguucgauuuuaacaagcaggcuauccagcggcucaaagccccugcgcagaugucuauucaacugaucaauaaggccgugaacgcucuuaucaaugaccagcugauuaugaagaaccaccuccgcgacaucauguguauucccuauugcaauuacagcaaauauugguaccugaacaauacagccaccgggaagacgucccugccuaaauguuggcucaucagcaacggaucuuaccugaaugaaacacacuucuccgaugacauugagcaggaagcugauaacaugaucaccgagaugcuucaaaaggaguauauggaaagacagggcaaaaccccgcuggggcucgucgaccuguucguuuuuagcacaucuuucuaccugaucagcauuuuucuucaucucgugaagauccccacccaccggcauauugugggaaaauccugcccuaagccccaccgccugaaucauaugggcaucuguucuugcggccuguauaagcagccugggguccccgugagauggaaacggugaggacuaguuauaagacugacuagcccgaugggccucccaacgggcccuccuccccuccuugcaccgagauuaaucaaaggcucuuuucagagccaccaaaaaaaaaaaaaaaaaaaaaaaaaaaaaaaaaaaaaaaaaaaaaaaaaaaaaaaaaaaaaaaaaaaaaaaaaaaaaaaaaaaaaaaaaaaaaaaaaaaaa

SEQ ID NO: 29597 - RNA, 1689 nt, Artificial Sequence
  mRNA product Design i-3 (hSL-A100) comprising derived and/or modified sequence from LASV(G3010-SLE-2013;Clade IV)__AIT17344__GPCmut5 (opt5)
aggagaaagcuuaccaugggccagaucgugaccuucuuucaagaggucccccacguuauugaagaggugaugaacaucgugcugauugcccucagcauccuggcuguccuuaaggggcuguacaauuucgccacaugcggacucgugggccugguuacguuucuucugcucugugggagauccugcaccacaucucuguauaaaggaguguacgaacugcagacccucgagcugaacauggaaacacuuaauaugaccaugccucugagcuguacaaagaacaauucccaucacuauauuauggucggcaacgagaccgggcucgagcugacgcuuaccaauacaucuaucaucaaccauaaauucugcaaucugagcgacgcgcacaagaaaaaccucuacaaucaugcucugauguccauuaucucuaccuuucaccugagcauuccgaacuucaaucaguaugaagccauguccugugauuuuaacggaggcaagaucagcgugcaguacaaucucucucacuccuaugccggcgacgcugccagccauugcgggacaguugcuaacggagugcugcaaaccuucaugcggauggccuggggcgggucuuacauugcgcuugauuccggauguggcaagugggacugcaucaugacgagcuaccaguaucugauuauccagaacacaaccugggaggaucacugucaguuuucucgccccuccccuaucggguaccucggacugcuuagccaaagaacacgggacauuuauaucucccgcagacugcucggcaccuucaccuggacacugucugauagcgaaggcaaagacacgcccgggggauacugccugacccgguggaugcucauugaggccgagcugaaguguuuuggcaauacagcugucgccaaaugcaacgaaaagcaugaugaggaguucugcgacaugcuucgccuguuugauuucaauaaacaggcuauccagagacucaagaccccugcccagauguccauucaacugaucaacaaggcggugaaugcccuuaucaacgaccagcugauuaugaaaaaucaccuccgggauaucauguguauucccuauugcaacuacagcaaguauugguaccugaaucacacaaccacggggaaaacaucucugccuaaguguuggcucguguccaacggaagcuaccugaaugaaacccauuucucugacgacaucgaacagcaagcugauaacaugauuaccgagaugcuucagaaagaguauauggaacgccagggcaagacaccgcuggggcucgucgaccuguuuguuuucagcaccuccuuuuaccugaucucuaucuuccuucaccucgugaaaauucccacacauagacacaucgugggaaagagcugcccuaagccccaucggcugaaucacaugggcauuuguuccugcggccuguauaaacagccugggguccccgugcgcuggaagagaugaggacuaguuauaagacugacuagcccgaugggccucccaacgggcccuccuccccuccuugcaccgagauuaaucaaaggcucuuuucagagccaccaaaaaaaaaaaaaaaaaaaaaaaaaaaaaaaaaaaaaaaaaaaaaaaaaaaaaaaaaaaaaaaaaaaaaaaaaaaaaaaaaaaaaaaaaaaaaaaaaaaaa

SEQ ID NO: 29598 - RNA, 1689 nt, Artificial Sequence
  mRNA product Design i-3 (hSL-A100) comprising derived and/or modified sequence from LASV(G502-SLE-2009;Clade IV)__AIT17126__GPCmut5 (opt5)
aggagaaagcuuaccaugggccagaucgugaccuucuuucaagaggucccccacguuauugaagaggugaugaacaucgugcugauugcccucagcauccuggcuguccuuaaggggcuguacaauuucgccacaugcggacucgugggccugcuuacguuucugcuccugugugggagauccugcaccacaggacuguauaaaggcguuuacgaacuccagacccuggagcuuaacauggaaacacugaauaugaccaugccucucucuuguacaaagaacaauagccaucacuauauuaugguggggaacgagaccggacuggagcuuacgcugaccaauacauccaucaucaaccauaaauucugcaaucucucugacgcgcacaagaaaaaccuguacgaucaugcucugaugagcauuaucuccaccuuucaccucucuauuccgaauuucaaccaguaugaagccaugagcugugacuuuaauggcggcaagaucuccguccaguacaaccugagccacucuuaugccggggaugcugccgaccauugcggaacaguggcuaauggcguucuucaaaccuucaugcggauggccuggggaggguccuacauugcgcuggauagcggcugugggcgcugggacugcaucaugacgucuuaccaguaucucauuauccagaacacaaccugggaggaucacugucaguuuuccagacccagcccuaucggauaccugggccuucugucucaacggacacgcgacauuuauaucuccagacggcuccugggcaccuucaccuggacacugagcgauuccgaagggaaggacacgcccggaggcuacugccucacccgcuggaugcugauugaggccgagcuuaaauguuuugggaacacagcuguggccaagugcaaugaaaaacaugaugaggaguucugcgacaugcugagacucuuugauuucaacaagcaggcuauccagcggcugaaagccccugcgcagaugucuauucaacuuaucaauaaggccgucaacgcucugaucaaugaccagcucgugaugaagaaccaucugcgcgacauuauguguauccccuauugcaauuacagcagauauugguaccugaaccacaccacaaccggacggacgucccucccuaaauguuggcuggugagcaauggcucuuaccuuaacgaaacacacuucuccgaugacauugaacagcaagccgauaauaugaucaccgagaugcugcagaaggaguauauggaacgccaggggaaaaccccgcucggacuggucgaccuguuuguuuucagcacaucuuuuuaccuuauuagcaucuuccuccaccuggugaagauccccacccauagacacauugugggcaaauccugcccuaagccccaucggcugaaccacaugggcaucuguucuugcgggcucuauaaacagccuggaguccccgugaaguggaagcgcugaggacuaguuauaagacugacuagcccgaugggccucccaacgggcccuccuccccuccuugcaccgagauuaaucaaaggcucuuuucagagccaccaaaaaaaaaaaaaaaaaaaaaaaaaaaaaaaaaaaaaaaaaaaaaaaaaaaaaaaaaaaaaaaaaaaaaaaaaaaaaaaaaaaaaaaaaaaaaaaaaaaaa

SEQ ID NO: 29599 - RNA, 1689 nt, Artificial Sequence
  mRNA product Design i-3 (hSL-A100) comprising derived and/or modified sequence from LASV(G733-SLE-2010;Clade IV)__AIT17154__GPCmut5 (opt5)
aggagaaagcuuaccaugggccagaucgugaccuucuuucaagaggucccccacguuauugaagaggugaugaacaucgugcugauugcccucagcauccuggcuguccuuaaggggcuguacaauuucgccacaugcggaauugugggccucguuuccuuucugcuucugugugggagaucuugcacgaccagccucuauaaaggaguguacgaacugcagacacuggagcucaacauggaaacccugaauaugacaaugccucuuuccuguaccaagaacaauucucaucacuauaucauggucggcaacgagacagggcuggagcucacccugacgaauaccagcaucauuaaccauaaauucugcaaucuuuccgacgcgcacaagaaaaaccuguacgaucaugcucucaugucuaucauuagcacauuucaccuguccaucccgaauuucaaccaguaugaagccaugagcugugacuuuaauggaggcaagauuucugugcaguacaaccugucccacagcuaugccggcgaugcugccaaucauugcgggaccaucgcuaacggaguucuccaaacauucaugcggauggccuggggcgggucuuacauugcgcuggacuccggaugugaucgcugggacugcaucaugaccagcuaccaguaucuuaucauucagaacacgacaugggaggaucacugucaguuuucuagacccuccccuaucggcuaccuggggcuccugagccaacggacccgcgacauuuauaucuccagacggcuucugggaacauucaccuggacccucucugauagcgaaggcaaggacacacccggcggguacugccugacgcgcuggaugcugauugaggccgagcucaaauguuuuggaaauaccgcuguggccaagugcaacgaaaaacaugaugaggaguucugcgacaugcugagacuuuuugauuucaauaagcaggcuauccagcggcugaaagccccugcgcagauguccauccaacucauuaacaaggccgucaaugcucugaucaacgaccagcuuauuaugaagaaucaucugcgcgacaucauguguauucccuauugcaacuacagcaaauauugguaccucaaucacacaaccacaggcaagaccucucugccuaaauguuggcugguguccaacgggagcuaccucaaugaaacgcacuucucugaugacaucgaacagcaagccgauaacaugaucacagagaugcugcagaaggaguauauggaaagacagggaaaaaccccgcuuggccugguggaccucuuugucuucagcaccuccuuuuaccugauuucuaucuuccugcaccuuguuaagauucccacacaucggcacgugguggggaaaagcugcccuaagccccaucgccucaaucacaugggaaucuguuccugcggccuguauggccagccugggguccccgugaaguggaaaagaugaggacuaguuauaagacugacuagcccgaugggccucccaacgggcccuccuccccuccuugcaccgagauuaaucaaaggcucuuuucagagccaccaaaaaaaaaaaaaaaaaaaaaaaaaaaaaaaaaaaaaaaaaaaaaaaaaaaaaaaaaaaaaaaaaaaaaaaaaaaaaaaaaaaaaaaaaaaaaaaaaaaaa

SEQ ID NO: 29600 - RNA, 1689 nt, Artificial Sequence
  mRNA product Design i-3 (hSL-A100) comprising derived and/or modified sequence from MOPV/LASV reassortant(IGS-1;Clade IV)__AFY05576__GPCmut5 (opt5)
aggagaaagcuuaccaugggccagaucgugaccuucuuucaagaggucccccacguuauugaagaggugaugaacaucgugcugauugcccucagcguccuggcugugcuuaaggggcuguacaauuucgccacaugcggacucguuggccuggugacguuucuucugcucugugggagauccugcaccacaucucuguauaaaggagucuacgaacugcagacccucgagcugaacauggaaacacuuaauaugaccaugccucugagcuguacaaagaacaauucccaucacuauaucauggugggcaacgagaccgggcucgagcugacgcuuaccaauacaucuauuaucaaccauaaauucugcaaucugagcgacgcgcacaagaaaaaccucuacgaucaugcucugauguccaucauuucuaccuuucaccugagcaucccgaauuucaaccaguaugaagccauguccugugacuuuaauggaggcaagauuagcguucaguacaaccucucucacuccuaugccggcgaugcugccaaucauugcgggacaguggcuaacggaguccugcaaaccuucaugcggauggccuggggcgggagcuacaucgcgcuugacucuggauguggcaacugggauugcauuaugacguccuaccaguaucugaucauucagaauacaaccugggaggaccacugucaguuuagccgccccucuccuaucggguaccucggacugcuuucccaaagaacacgggauaucuauauuagccgcagacugcucggcaccuucaccuggacacuguccgacucugaaggcgaggauacgcccgggggauacugccugacccgguggaugcucaucgaggccgaacugaaguguuuuggcaacacagcuguggccaaaugcaaugagaagcaugacgaagaguucugcgauaugcuucgccuguuugacuucaacaaacaggcuauucagagacucaaggccccugcgcagaugagcauccaacugauuaauaaagccgugaacgcucuuaucaaugaucagcugaucaugaagaaccaccuccgggacauuauguguauccccuauugcaauuacuccaaguauugguaccugaaccacaccacaaccgggcgcacgagccugccuaaauguuggcucgucucuaauggauccuaccugaacgaaacacauuucagcgacgauauugagcagcaagccgacaauaugaucaccgagaugcuucagaaggaauauauggagagacagggcaaaaccccgcuggggcucguugaucuguuuguguucucuaccagcuuuuaccugauuuccaucuuccuucaccucgugaagauccccacacaucggcacauugucggaaaaucuugcccuaagccccaucgccugaaccacaugggcaucuguagcugcggccuguauaaacagccuggggugcccguuaaguggaagagaugaggacuaguuauaagacugacuagcccgaugggccucccaacgggcccuccuccccuccuugcaccgagauuaaucaaaggcucuuuucagagccaccaaaaaaaaaaaaaaaaaaaaaaaaaaaaaaaaaaaaaaaaaaaaaaaaaaaaaaaaaaaaaaaaaaaaaaaaaaaaaaaaaaaaaaaaaaaaaaaaaaaaa

SEQ ID NO: 29601 - RNA, 1689 nt, Artificial Sequence
  mRNA product Design i-3 (hSL-A100) comprising derived and/or modified sequence from LASV(LM765-SLE-2012;Clade IV)__AIT17814__GPCmut5 (opt5)
aggagaaagcuuaccaugggccagaucgugaccuucuuucaagaggucccccacguuauugaagaggugaugaacaucgugcugauugcccucagcauccuggcuguccuuaaggggcuguacaauuucgccacaugcggacucgugggccugguuacguuucuucugcucugugggagauccugcaccacaucucuguauaaaggaguguacgaacugcagacccucgagcugaacauggaaacacuuaauaugaccaugccucugagcuguacaaagaacaauucccaucacuauauuauggucggcaacgagaccgggcucgagcugacgcuuaccaauacaucuaucaucgaccauaaauucugcaaccugagcgaugcgcaccggaagaaucucuacgaccaugcucugauguccauuaucucuaccuuucaccugagcauuccgaacuucaaucaguaugaagccauguccugugauuuuaacggaggcaaaaucagcgugcaguacaaucucucucacuccuaugccaaggacgcugccgaucauugcggcacaguugcuaacggggugcugcaaaccuucaugcgcauggccuggggaggcagcuacauugcgcuugacucuggguguggaagaugggauugcaucaugacguccuaccaguaucugauuauccagaauacaaccugggaggaccacugucaguuuagccggcccucuccuaucggcuaccucgggcugcuuucccaacgcacaagagauauuuauaucagccggcgccugcucggaaccuucaccuggacacuguccgacucugaaggcaaggauacgcccggcggguacugccugaccagauggaugcucauugaggccgagcugaaauguuuuggaaacacagcugucgccaagugcaacgaaaaacaugacgaggaguucugcgauaugcuucggcuguuugacuucaauaagcaggcuauccagcgccucaaagccccugcgcagaugagcauucaacugaucaacaaggccgugaaugcucuuaucaacgaccagcugauuaugaagaaucaccucagagauaucauguguauucccuauugcaacuacuccaaauauugguaccugaaucacaccacaaccggcaagacgagccugccuaaauguuggcucgugucuaacggguccuaccugaaugaaacacauuucagcgacgauaucgaacagcaagccgacaacaugauuaccgagaugcuucagaaggaguauauggaacggcagggaaaaaccccgcugggccucgucgaucuguuuguuuucucuaccagcuuuuaccugaucuccaucuuccuucaccucgugaagauucccacacaucgccacaucguggggaaaccuugccccaagccucauagacugaaucacaugggaauuuguucuugcggccuguauaagcagcccggcgucccggugaaauggaagcggugaggacuaguuauaagacugacuagcccgaugggccucccaacgggcccuccuccccuccuugcaccgagauuaaucaaaggcucuuuucagagccaccaaaaaaaaaaaaaaaaaaaaaaaaaaaaaaaaaaaaaaaaaaaaaaaaaaaaaaaaaaaaaaaaaaaaaaaaaaaaaaaaaaaaaaaaaaaaaaaaaaaaa

SEQ ID NO: 29602 - RNA, 1689 nt, Artificial Sequence
  mRNA product Design i-3 (hSL-A100) comprising derived and/or modified sequence from LASV(LM776-SLE-2012;Clade IV)__AIT17824__GPCmut5 (opt5)
aggagaaagcuuaccaugggccagaucgugaccuucuuucaagaggucccccacguuauugaagaggugaugaacaucgugcugauugcccucagcauccuggcuguccuuaaggggcuguacaauuucgccacaugcggacucgugggccugguuacguuucuucugcucugugggagauccugcaccacaucuguguauaaaggagucuacgaacugcagacccuggagcucaacauggaaacacugaauaugaccaugccucuuagcuguacaaagaacaauucccaucacuauauuauggugggcaacgagaccgggcuggagcucacgcugaccaauacaucuaucaucaaccauaaauucugcaaucuuagcgacgcgcacaagaaaaaccuguacgaucaugcucucauguccauuaucucuaccuuucaccugagcauuccgaauuucaaccaguaugaagccauguccugugacuuuaauggaggcaagaucagcguucaguacaaccugucucacuccuaugccggcgaugcugccaaucauugcgggacaguggcuaacggaguccuccaaaccuucaugcggauggccuggggcgggagcuacauugcgcuggacucuggauguggcaagugggauugcaucaugacguccuaccaguaucuuauuauccagaacacaaccugggaggaccacugucaguuuagccgccccucuccuaucggguaccugggacuccugucccaaagaacacgggauauuuauaucagccgcagacuucugggcaccuucaccuggacacucuccgacucugaaggcaaagauacgcccgggggauacugccugacccgguggaugcugauugaggccgagcucaaguguuuuggcaauacagcuguggccaaaugcaacgaaaagcaugacgaggaguucugcgauaugcugcgccuuuuugacuucaauaaacaggcuauccagagacugaaggccccugcgcagaugagcauucaacucaucaacaaggccgugaaugcucugaucaacgaucagcuuauuaugaaaaaucaucugcgggacaucauguguauucccuauugcaacuacuccaaguauugguaccucaaucacaccacaaccgggaaaacgagccugccuaaguguuggcuggucucuaacggauccuaccucaaugaaacacacuucagcgacgauaucgaacagcaagccgacaacaugauuaccgagaugcugcagaaagaguauauggaacgccagggcaagaccccgcuugggcugguugaucucuuuguguucucuaccagcuuuuaccugaucuccaucuuccugcaccuugugaaaauucccacacauagacacaucgucggaaagucuugcccuaagccccaucggcucaaucacaugggcauuuguagcugcggccuguauaaacagccuggggugcccguucgcuggaagagaugaggacuaguuauaagacugacuagcccgaugggccucccaacgggcccuccuccccuccuugcaccgagauuaaucaaaggcucuuuucagagccaccaaaaaaaaaaaaaaaaaaaaaaaaaaaaaaaaaaaaaaaaaaaaaaaaaaaaaaaaaaaaaaaaaaaaaaaaaaaaaaaaaaaaaaaaaaaaaaaaaaaaa

SEQ ID NO: 29603 - RNA, 1689 nt, Artificial Sequence
  mRNA product Design i-3 (hSL-A100) comprising derived and/or modified sequence from LASV(Mad39;Clade IV)__ANH09722__GPCmut5 (opt5)
aggagaaagcuuaccaugggccagaucgugaccuucuuucaagaggucccccacguuauugaagaggugaugaacaucgugcugauugcccucagcauccuggcuguccuuaaggggcuguacaauguggccacaugcggacucauuggccugguuacguuccuucugcucugugggagauccugcaccacaacccuguauaaaggaguguacgaacugcaggcgcucgagcugaacauggaaacacuuaauaugaccaugccucugucuuguacaaagaacaauagccaucacuauauccgggucggcaacgagaccgggcucgagcugacgcuuaccaauacaucccugaucaaccauaaauuuugcaaucucucugacgcucacaagaaaaaccuguacgaucaugcccugaugagcauuaucuccaccuuccaccucucuauuccgaauuuuaaccaguaugaagccaugagcugugacuucaaugauggaaagaucuccgugcaguacaaccugagccacacauaugcuggcgacaccgccaaucauugcggcacgguugcuaacggggugcuucaaacauuuaugcgcauggccuggggaggcucuuacauugcgcuggauuccggguguggaggcugggacugcaucaugaccagcuaccaguaucucauuauccagaacacaaccugggaggaucacugucaguucucuagacccuccccuaucggguaccugggacuucugagccaacggacccgcgacauuuauaucucuagacggcuccugggcacauuuacguggacccuguccgauagcgaaggcaaggacacacccgggggauacugccucacccgcuggaugcugauugaggccgagcuuaaauguuucggcaauacagcugucgccaagugcaacgaaaaacaugaugaggaauuuugcgacaugcugagacucuucgauuuuaauaagcaggcuauccagcggcugaaagccccugcgcagauguccauucaacuuaucaacaaggccgugaaugcucugaucaacgaccagcucauuaugaagaaucaucugcgcgacaucauguguauucccuauugcaacuacucuaaauauugguaccugaaucacaccgugacggggaagacaagccucccuaaauguuggcuggucuccaacggaagcuaccuuaaugagacccacuucucugaugacaucgaacagcaagccgauaacaugauuaccgagaugcugcagaaggaguauauggaaagacagggcaaaacaccgcucgggcugguugaccuguucguguuuuccaccagcuucuaccuuaucucuaucuuucuccaccuggugaagauucccacacaucggcacgucgugggaaaaccuugccccaagccucaucgccugaaucacaugggcaucuguagcugcggcuucuauaagcagcccgggguuccggugagauggaaacggugaggacuaguuauaagacugacuagcccgaugggccucccaacgggcccuccuccccuccuugcaccgagauuaaucaaaggcucuuuucagagccaccaaaaaaaaaaaaaaaaaaaaaaaaaaaaaaaaaaaaaaaaaaaaaaaaaaaaaaaaaaaaaaaaaaaaaaaaaaaaaaaaaaaaaaaaaaaaaaaaaaaaa

SEQ ID NO: 29604 - RNA, 1689 nt, Artificial Sequence
  mRNA product Design i-3 (hSL-A100) comprising derived and/or modified sequence from LASV(Z0947-SLE-2011;Clade IV)__AIT17840__GPCmut5 (opt5)
aggagaaagcuuaccaugggccagaucgugaccuucuuucaagaggucccccacguuauugaagaggugaugaacaucgugcugauugcccucagcauccuggcuguccuuaaggggcuguacaauuucgccacaugcggacucgugggccugguuacguuucuucugcucugugggagauccugcaccauuucucuguauaaaggaguguacgaacugcagacacucgagcugaacauggaaacccuuaauaugacaaugccucugagcuguaccaagaacaauucccaucacuauaucauggucggcaacgagacagggcucgagcugacccuuacgaauaccucuaucauuaaccauaaauucugcaaucugagcgacgcgcacaagaaaaaccucuacgaucaugcucugauguccaucauuucuacauuucaccugagcaucccgaauuucaaccaguaugaagccauguccugugacuuuaauggaggcaagauuagcgugcaguacaaccucucucacuccuaugccggcgaugcugccaaucauugcgggaccguugcuaacggagugcugcaaacauucaugcggauggccuggggcgggagcuacaucgcgcuugacucuggaugugaucgcugggacugcauuaugaccuccuaccaguaucugaucauccagaacacgacaugggaggaucacugucaguuuagcagacccucuccuauuggcuaccucgggcugcuuucccaacggacccgcgacaucuauauuagcagacggcugcucggaacauucaccuggacccuguccgauucugaaggcaaggacacacccggcggguacugccugacgcgcuggaugcucaucgaggccgagcugaaauguuuuggaaauaccgcugucgccaagugcaacgaaaaacaugaugaggaguucugcgacaugcuuagacuguuugauuucaauaagcaggcuauucagcggcucaaagccccugcgcagaugagcauccaacugaucaacaaggccgugaaugcucuuauuaacgaccagcugaucaugaagaaucaccuccgcgacauuauguguauccccuauugcaacuacuccaaauauugguaccugaaucacacaaccacaggcaagaccagccugccuaaauguuggcucgugucuaacggguccuaccugaaugaaacgcauuucagcgaugacauugaacagcaagccgauaacaugaucacagagaugcuucagaaggaguauauggaaagacagggaaaaaccccgcugggccucgucgaccuguuuguuuucucuaccagcuuuuaccugaucuccauuuuccuucaccucgugaagauccccacacaucggcacauuguggggaaaccuugccccaagccucaucgccugaaucacaugggaaucuguucuugcggccuguauaagcagcccggcgucccggugaaauggaagagaugaggacuaguuauaagacugacuagcccgaugggccucccaacgggcccuccuccccuccuugcaccgagauuaaucaaaggcucuuuucagagccaccaaaaaaaaaaaaaaaaaaaaaaaaaaaaaaaaaaaaaaaaaaaaaaaaaaaaaaaaaaaaaaaaaaaaaaaaaaaaaaaaaaaaaaaaaaaaaaaaaaaaa

SEQ ID NO: 29605 - RNA, 1665 nt, Artificial Sequence
  mRNA product Design i-3 (A100) comprising derived and/or modified sequence from LASV(Josiah;Clade IV)__NP_694870__GPCmut5 (opt1)
aggagaaagcuuaccaugggccagaucgugaccuucuuccaggaggucccccacgugaucgaggaggugaugaacaucguccugaucgcccucagcgugcuggccgugcugaaggggcucuacaacuucgcgaccugcggccuggucgggcuggugacguuccuccugcugugcggccgcuccugcaccaccagccucuacaaggggguguacgagcugcagacccuggagcucaacauggagacgcugaacaugaccaugccgcuguccugcaccaagaacaacagccaccacuacaucauggucggcaacgagaccggccucgagcugacgcugaccaacaccuccaucaucaaccacaaguucugcaaccucagcgacgcccacaagaagaaccuguacgaccacgcccugauguccaucaucagcaccuuccaccucuccauccccaacuucaaccaguacgaggccaugagcugcgacuucaacgggggcaagaucuccgugcaguacaaccugagccacuccuacgccggggacgcggccaaccacugcggcacgguggccaacgggguccugcagaccuucaugcggauggccuggggcggcagcuacaucgcgcucgacuccgggugcggcaacugggacugcaucaugaccagcuaccaguaccugaucauccagaacaccacgugggaggaccacugccaguucucccggcccagccccaucggguaccugggccuccugucccagcgcacccgggacaucuacaucagccgccggcugcucggcaccuucaccuggacgcugagcgacuccgaggggaaggacaccccgggcggguacugccugacccgcuggaugcucaucgaggccgagcugaagugcuucggcaacaccgccguggccaagugcaacgagaagcacgacgaggaguucugcgacaugcugcggcuguucgacuucaacaagcaggccauccagcgccugaaggcgcccgcccagaugagcauccagcugaucaacaaggccgugaacgcccucaucaacgaccagcugaucaugaagaaccaccuccgggacaucaugugcauccccuacugcaacuacuccaaguacugguaccucaaccacacgaccaccggccgcaccagccugcccaagugcuggcuggucuccaacggcagcuaccucaacgagacgcacuucuccgacgacaucgagcagcaggccgacaacaugaucaccgagaugcugcagaaggaguacauggagcggcaggggaagacgccccugggccucguggaccuguucguguucagcaccuccuucuaccugaucagcaucuuccugcaccucgucaagaucccgacccaccgccacaucguggggaaguccugccccaagccccaccggcugaaccacaugggcaucugcagcugcgggcuguacaagcagcccggcgugccggucaaguggaagcgcugaggacuaguuauaagacugacuagcccgaugggccucccaacgggcccuccuccccuccuugcaccgagauuaauaaaaaaaaaaaaaaaaaaaaaaaaaaaaaaaaaaaaaaaaaaaaaaaaaaaaaaaaaaaaaaaaaaaaaaaaaaaaaaaaaaaaaaaaaaaaaaaaaaaa

SEQ ID NO: 29606 - RNA, 1662 nt, Artificial Sequence
  mRNA product Design i-3 (A100) comprising derived and/or modified sequence from LASV(LP;Clade I)__AAF86701__GPCmut5 (opt1)
aggagaaagcuuaccaugggccagaucaucaccuucuuccaggaggugccccacgucaucgaggaggugaugaacaucgugcugaucgcccucagccugcuggccauccucaaggggcuguacaacaucgcgaccugcggcaucaucgggcuggucgccuuccucuuccugugcggcaaguccugcagccugacgcucaagggcggguacgagcugcagacccuggagcucaacauggagacccugaacaugaccaugccgcuguccugcacgaagaacagcucccaccacuacauccgcgugggcaacgagaccgggcucgagcugacccugaccaacacgagcaucaucaaccacaaguucugcaaccucuccgacgcccacaagaagaaccuguacgaccacgcccugaugagcaucaucuccaccuuccaccucagcauccccaacuucaaccaguacgaggccauguccugcgacuucaacggcgggaagaucagcgugcaguacaaccugucccacagcuacgcgggcgacgccgccgagcacugcgggaccgucgccaacggcgugcugcagaccuucaugcggauggcguggggcgggcgcuacaucgcccucgacuccggcugcgggaacugggacugcaucaugacgagcuaccaguaccugaucauccagaacaccaccugggaggaccacugccaguucucccggcccagccccaucggcuaccugggccuccugucccagcgcacccgggacaucuacaucagccgccggcugcucgggacguucaccuggacccugagcgacuccgagggcaacgagacccccgggggcuacugccugacgcgcuggaugcucaucgaggccgagcugaagugcuucgggaacaccgccguggccaagugcaacgagaagcacgacgaggaguucugcgacaugcugcggcuguucgacuucaacaagcaggcgauccgccggcugaaggcccccgcccagaugagcauccagcugaucaacaaggccgucaacgcccucaucaacgaccagcugaucaugaagaaccaccuccgcgacaucaugugcauccccuacugcaacuacuccaaguacugguaccucaaccacaccagcuccggccggaccagccugcccaagugcuggcugaucuccaacgggagcuaccucaacgagacgcaguucuccgacgacaucgagcagcaggcggacaacaugaucaccgagaugcugcagaaggaguacaucgagcgccagggcaagaccccgcuggggcucguggacaucuucaucuucagcaccuccuucuaccugaucagcaucuuccugcaccugaucaagaucccgacgcaccggcacaucgugggcaagcccugccccaagccccaccgccucaaccacaugggggucugcuccugcggccuguacaagcacccgggcgugcccaccaaguggaagcggugaggacuaguuauaagacugacuagcccgaugggccucccaacgggcccuccuccccuccuugcaccgagauuaauaaaaaaaaaaaaaaaaaaaaaaaaaaaaaaaaaaaaaaaaaaaaaaaaaaaaaaaaaaaaaaaaaaaaaaaaaaaaaaaaaaaaaaaaaaaaaaaaaaaa

SEQ ID NO: 29607 - RNA, 1662 nt, Artificial Sequence
  mRNA product Design i-3 (A100) comprising derived and/or modified sequence from LASV(803213;Clade II)__AAF86703__GPCmut5 (opt1)
aggagaaagcuuaccaugggccagaucaucaccuucuuccaggaggugccccacgucaucgaggaggugaugaacaucgugcugaucgcccucagccugcuggccauccucaaggggaucuacaacgucgcgaccugcggccuguucgggcugaucuccuuccuccugcugugcggccgcagcugcuccgugacguacaaggggguguacgagcuccagacccuggagcugaacauggccaaccucaacaugaccaugccgcugagcugcaccaagaacaacucccaccacuacaucauggucggcaacgagacgggccuggagcucacccugaccaacaccagcaucaucaaccacaaguucugcaaccuguccgacgcccacaagaagaaccucuacgaccacgcccugaugagcaucaucuccacguuccaccugagcauccccaacuucaaccaguacgaggccauguccugcgacuucaacgggggcaagaucagcgugcaguacaaccucucccacagcuucgcgguggacgccgccaaccacugcgggaccaucgccaacggcguccugcagaccuucaugcggauggcguggggcggguccuacaucgcccuggacagcggcugcgggaacugggacugcaucaugaccuccuaccaguaccucaucauccagaacacgaccugggaggaccacugccaguucagccgccccucccccaucggcuaccuggggcugcucagccagcggacccgcgacaucuacaucagccggcgccugcugggcaccuucacguggacccucuccgacagcgagggcaacgaggcccccgggggcuacugccugacccgguggaugcugaucgaggccgagcucaagugcuucgggaacaccgccguggcgaagugcaacgagaagcacgacgaggaguucugcgacaugcugcgccuguucgacuucaacaagcaggccaucaagcggcucaagacgcccgcccagauguccauccagcugaucaacaaggccgugaacgcccugaucaacgaccagcucaucaugaagaaccaccuccgcgacaucaugugcauccccuacugcaacuacagccgguacugguaccugaaccacaccgucaccgggaagaccucccugccccgcugcuggcuggugagcaacggcuccuaccugaacgagacgcacuucagcgacgacaucgagcagcaggcggacaacaugaucaccgagaugcuccagaaggaguacauggaccggcagggcaagaccccgcuggggcugguggaccucuucgucuucuccaccagcuucuaccugaucuccaucuuccugcaccuggugaagaucccgacgcaccgccacaucgugggcaagcccugccccaagccccaccggcucaaccacauggggaucugcagcugcggccuguacaagcacccggggguccccgugaaguggaagcgcugaggacuaguuauaagacugacuagcccgaugggccucccaacgggcccuccuccccuccuugcaccgagauuaauaaaaaaaaaaaaaaaaaaaaaaaaaaaaaaaaaaaaaaaaaaaaaaaaaaaaaaaaaaaaaaaaaaaaaaaaaaaaaaaaaaaaaaaaaaaaaaaaaaaa

SEQ ID NO: 29608 - RNA, 1662 nt, Artificial Sequence
  mRNA product Design i-3 (A100) comprising derived and/or modified sequence from LASV(GA391;Clade III)__CAA36645__GPCmut5 (opt1)
aggagaaagcuuaccaugggccagaucgugaccuucuuccaggaggucccccacgugaucgaggaggugaugaacaucguccugaucgcccucagcauccuggccauccugaaggggcucuacaacguggcgaccugcggccugaucgggcuggugacguuccuccugcuguccggccgcagcugcucccucaucuacaaggggaccuacgagcugcagacccuggagcucaacauggagacccugaacaugacgaugccgcugagcugcaccaagaacaacucccaccacuacauccgggucggcaacgagaccggccucgagcugacccugacgaacaccagcauccucaaccacaaguucugcaaccuguccgacgcccacaagcgcaaccuguacgaccacagccucauguccaucaucagcaccuuccaccuguccauccccaacuucaaccaguacgaggccaugagcugcgacuucaacgggggcaagaucaccgugcaguacaaccugucccacagcuucgccguggacgccgcggggcacugcggcacgcucgccaacgggguccugcagaccuucaugcggauggccuggggcggcuccuacaucgcccuggacagcgggugcggcaacugggacugcaucaugaccuccuaccaguaccucaucauccagaacaccacgugggacgaccacugccaguucagccggcccucccccaucggguaccugggccugcucagccagcgcacccgggacaucuacaucagccgccggcugcugggcaccuucaccuggacgcucuccgacagcgaggggaacgagaccccgggcggguacugccugacccgcuggaugcugaucgaggcggagcucaagugcuucggcaacaccgccguggccaagugcaacgagaagcacgacgaggaguucugcgacaugcugcggcuguucgacuucaacaagcaggccauccgccggcucaagacgcccgcccagauguccauccagcugaucaacaaggcggugaacgcccugaucaacgaccagcucaucaugaagaaccaccuccgcgacaucaugugcauccccuacugcaacuacagccgguacugguaccugaaccacaccuccaccggcaagaccagccugccccgcugcuggcugaucuccaacggcagcuaccugaacgagacgaaguucuccgacgacaucgagcagcaggccgacaacaugaucaccgagaugcuccagaaggaguacaucgaccggcaggggaagacgccccugggccuggucgaccuguucguguucagcaccuccuucuaccucaucagcaucuuccugcaccuggugaagaucccgacccaccgccacaucgucgggaagcccugccccaagccccaccggcucaaccacaugggcaucugcuccugcgggcuguacaagcagccgggcgugcccgugcgcuggaagcggugaggacuaguuauaagacugacuagcccgaugggccucccaacgggcccuccuccccuccuugcaccgagauuaauaaaaaaaaaaaaaaaaaaaaaaaaaaaaaaaaaaaaaaaaaaaaaaaaaaaaaaaaaaaaaaaaaaaaaaaaaaaaaaaaaaaaaaaaaaaaaaaaaaaa

SEQ ID NO: 29609 - RNA, 1665 nt, Artificial Sequence
  mRNA product Design i-3 (A100) comprising derived and/or modified sequence from LASV(AV;Clade V)__CCA30314__GPCmut5 (opt1)
aggagaaagcuuaccaugggccagaucgugaccuucuuccaggaggucccccacgugaucgaggaggugaugaacaucguccugaucgcccucagcauccuggccgugcugaaggggcucuacaacaucgcgaccugcggccugaucgggcugaucacguuccuccugcugugcggccgcuccugcagcuccaaccucuacaaggggguguacgagcugcagagccuggaccucaacauggagacccugaacaugaccaugccgcuguccugcaccaagaacaacagccaccacuacauccgggucggcaacgacacgggccucgagcugacccugaccaacaccuccauccucaaccacaaguucugcaaccugagcgacgcccacaagaaggaccuguacgaccacgcccucauguccaucaucagcacguuccaccuguccauccccaacuucaaccaguacgaggccaugagcugcgacuucaacgggggcaagaucuccgugcaguacaaccugagccacuccuacgccaucgacgcggccaaccacugcgggaccguggccaacggcauccuccagaccuucaugcgcauggccuggggcgggagcuacaucgcgcuggacuccggcugcgggaacugggacugcaucaugaccagcuaccaguaccugaucauccagaacacgaccugggagaaccacugccaguucucccgccccagccccaucggcuaccucgggcugcugagccagcggacccgcgacaucuacaucucccggcgccuccugggcaccuucacguggacccugagcgacuccgagggcaacgccacccccgggggcuacugccucacccgguggaugcugaucgaggccgagcugaagugcuucgggaacacggccgucgccaagugcaacgagaagcacgacgaggaguucugcgacaugcuccgccuguucgacuucaacaagcaggcgaucagccggcugaagucccccgcccagaugagcauccagcucaucaacaaggccgugaacgcccugaucaacgaccagcugaucaugaagaaccaccuccgcgacaucaugugcauccccuacugcaacuacuccaaguacugguaccugaaccacaccaucaccgggaagaccagccugcccaagugcuggcucguguccaacggcagcuaccugaacgagacgcacuucuccgacgacaucgagcagcaggccgacaacaugaucaccgagaugcugcagaaggaguacauggagcggcagggcaagaccccgcucgggcuggucgaccuguucguguucagcaccuccuucuaccugaucagcaucuuccuccgccuggugaagaucccgacgcaccggcacaucgucggcaagcccugccccaagccccaccgccugaaccacauggggaucugcuccugcggccucuacaagcagccgggggugcccgugcgguggaagcgcugaggacuaguuauaagacugacuagcccgaugggccucccaacgggcccuccuccccuccuugcaccgagauuaauaaaaaaaaaaaaaaaaaaaaaaaaaaaaaaaaaaaaaaaaaaaaaaaaaaaaaaaaaaaaaaaaaaaaaaaaaaaaaaaaaaaaaaaaaaaaaaaaaaaa

SEQ ID NO: 29610 - RNA, 1662 nt, Artificial Sequence
  mRNA product Design i-3 (A100) comprising derived and/or modified sequence from LASV(Togo/2016/7082;Clade VI)__AMR44577__GPCmut5 (opt1)
aggagaaagcuuaccaugggccagaucaucaccuucuuccaggaggugccccacgucaucgaggaggugaugaacaucgugcugaucgcccucagccugcuggccauccucaagggggucuacaacguggcgaccugcggcaucaucgggcuggugacguuccuguuccucugcggccgcuccugcagccugaucuacaagggguccuacgagcugcagacccucgagcugaacauggagacccugaacaugaccaugccgcucagcugcacgaagaacuccagccaccacuacauccgggucggcaacgagaccggccuggagcugacccucaccaacacguccaucaucaaccacaaguucugcaaccugagcgacgcccacaagcgcaaccuguacgaccacgcccucauguccauccugagcaccuuccaccuguccauccccaacuucaaccaguacgaggccaugagcugcgacuucaacgggggcaagaucuccgugcaguacaaccucagccacgccuacgcgguggacgccgccgagcacugcgggaccgucgccaacggcgugcugcagaccuucaugcggauggcguggggcggguccuacaucgcccuggacagcggcugcgggaacugggacugcaucaugacguccuaccaguaccucaucauccagaacaccaccugggaggaccacugccaguucagccggcccucccccaucggcuaccuggggcugcucagccagcgcacccgggacaucuacaucagccgccggcugcugggcacguucaccuggacccucuccgacagcgagggcaacgagacccccgggggcuacugccugacgcgcuggaugcugaucgaggccgagcucaagugcuucgggaacaccgccguggccaagugcaacgagaagcacgacgaggaguucugcgacaugcugcggcuguucgacuucaacaagcaggcgauccagcgccucaagucccccgcccagaugagcauccagcugaucaacaaggccgucaacgcccugaucaacgaccagcucaucaugaagaaccaccuccgggacaugaugugcauccccuacugcaacuacuccaaguacugguaccugaaccacaccagcuccgggcgcaccagccugcccaagugcuggcugguguccaacggcagcuaccugaacgagacgcacuucuccgacgacaucgagcagcaggccgacaacaugaucaccgagaugcuccagaaggaguacaucgaccggcagggcaagaccccgcuggggcugguggaccucuucgucuucagcaccuccuucuaccugaucagcaucuuccugcaccugaucaagaucccgacgcaccgccacaucgugggcaagcccugccccaagccccaccggcucaaccacauggggaucugcuccugcggccuguacaagcagccgggggugcccacccgcuggaagcggugaggacuaguuauaagacugacuagcccgaugggccucccaacgggcccuccuccccuccuugcaccgagauuaauaaaaaaaaaaaaaaaaaaaaaaaaaaaaaaaaaaaaaaaaaaaaaaaaaaaaaaaaaaaaaaaaaaaaaaaaaaaaaaaaaaaaaaaaaaaaaaaaaaaa

SEQ ID NO: 29611 - RNA, 1662 nt, Artificial Sequence
  mRNA product Design i-3 (A100) comprising derived and/or modified sequence from LASV(KAK-428;Clade n.d. (VII))__ANH09740__GPCmut5 (opt1)
aggagaaagcuuaccaugggccagaucgugaccuucuuccaggaggucccccacgugaucgaggaggugaugaacaucguccugaucgcccucagccugcuggccauccucaaggggcuguacaacuucgcgaccugcggcgugaucgggcugaucacguuccuccugcugugcggccgcuccugcagcgccaccuacaaggggcaguacgagcuccagacccuggagcugaacauggagucccucaacaugaccaugccgcugagcugcacgaagaacaacucccaccacuacauccgggccggcaacaacaccggccuggagcucacccugaccaacacgagcaucaucucccacaaguucugcaaccugagcgacgcccacaagaagaaccucuacgaccacacccugauguccaucaucaccaccuuccaccugagcauccccaacuucaaccaguacgaggccauguccugcgacuucaacgggggcaagaucagcauccaguacaaccucucccacagcuacgcgggggacgccgcccagcacugcggcacgguggccaacgggguccugcagaccuucaugcgcauggcguggggcggcuccuaccuggcccucgacagcgggugccgcggcugggacugcaucaucuccagcuaccaguaccugaucauccagaacaccaccugggacgaccacugccaguucucccggcccagccccaucggguaccugggcuucgugagccagaagacgcgcgacaucuacaucucccggcgccuccugggcaccuucaccuggacccugagcgacuccgaggggcacgacaugccgggcggguacugccucacgcgguggaugcugaucgaggccgaccugaagugcuucggcaacaccgccguggccaagugcaacgagaagcacgacgaggaguucugcgacauguggcgccucuucgacuucaacaagcaggcgauccagcggcugaaggcccccgcccagaugaacauccagcugaucaacaaggccgucaacgcccucaucaacgaccagcugaugaugaagaaccaccuccgcgacaucaugugcauccccuacugcaacuacagcaaguucugguaccugaacaacaccaccacgggccggaccucccugccccgcugcuggcugaucagcaacggcuccuaccucaacgagacccacuucagcgacgacaucgagcagcaggcggacaacaugaucaccgagaugcugcagaaggaguacauggaccggcaggggaagacgccccugggccucguggaccuguucguguucuccaccagcuucuaccugaucaccaucuuccuccaccuggucaagaucccgacccaccgccacaucguggggaagcccugccccaagccccaccggcugaaccacaugggcaucugcuccugcgggcuguacaagcagccgggcgugcccguccgcuggaagcggugaggacuaguuauaagacugacuagcccgaugggccucccaacgggcccuccuccccuccuugcaccgagauuaauaaaaaaaaaaaaaaaaaaaaaaaaaaaaaaaaaaaaaaaaaaaaaaaaaaaaaaaaaaaaaaaaaaaaaaaaaaaaaaaaaaaaaaaaaaaaaaaaaaaa

SEQ ID NO: 29612 - RNA, 1662 nt, Artificial Sequence; identical to SEQ ID NO: 29606
  mRNA product Design i-3 (A100) comprising derived and/or modified sequence from LASV(Pinneo-NIG-1969;Clade I)__AIT17836__GPCmut5 (opt1)

SEQ ID NO: 29613 - RNA, 1662 nt, Artificial Sequence
  mRNA product Design i-3 (A100) comprising derived and/or modified sequence from LASV(ISTH0009-NIG-2011;Clade II)__AIT17404__GPCmut5 (opt1)
aggagaaagcuuaccaugggccagaucaucaccuucuuccaggaggugccccacgucaucgaggaggugaugaacaucgugcugaucgcccucagccugcuggccauccucaaggggaucuacaacgucgcgaccugcggccuguucgggcugguguccuuccuccugcugugcggccgcagcugcuccacgaccuacaaggggguguacgagcuccagacccuggagcuggacauggccagccucaacaugaccaugccgcuguccugcacgaagaacaacagccaccacuacaucauggucggcaacgagaccggccuggagcucacccugaccaacacguccaucaucaaccacaaguucugcaaccugagcgacgcccacaagaagaaccucuacgaccacgcccugauguccaucaucagcaccuuccaccuguccauccccaacuucaaccaguacgaggccaugagcugcgacuucaacgggggcaagaucuccgugcaguacaaccucagccacgcguacgccguggacgccgccaaccacugcgggaccaucgcgaacggcguccugcagaccuucaugcggauggccuggggcggguccuacaucgcccuggacagcggcugcggguccugggacugcaucaugacgagcuaccaguaccucaucauccagaacaccaccugggaggaccacugccaguucucccgccccagccccaucggcuaccuggggcugcucagccagcggacccgcgacaucuacaucucccggcgccugcugggcacguucaccuggacccucagcgacuccgagggcaacgagacccccgggggcuacugccugacgcgguggaugcugaucgaggccgagcucaagugcuucgggaacaccgccguggcgaagugcaacgagaagcacgacgaggaguucugcgacaugcugcgccuguucgacuucaacaagcaggccauccggcgccucaagacccccgcccagaugagcauccagcugaucaacaaggccgugaacgcccugaucaacgaccagcucaucaugaagaaccaccuccgggacaucaugugcaucccguacugcaacuacuccaaguacugguaccugaaccacaccgucacggggaagaccagccugccccgcugcuggcugguguccaacggcagcuaccugaacgagacccacuucuccgacgacaucgagcagcaggcggacaacaugaucaccgagcuccugcagaaggaguacauggaccggcagggcaagacgccccuggggcucguggaccuguucgucuucagcaccuccuucuaccugaucagcaucuuccugcaccucaucaagaucccgacccaccgccacaucaccggcaagcccugccccaagccccaccggcugaaccacauggggaucugcuccugcggccuguacaagcacccgggggugcccgugaaguggaagcgcugaggacuaguuauaagacugacuagcccgaugggccucccaacgggcccuccuccccuccuugcaccgagauuaauaaaaaaaaaaaaaaaaaaaaaaaaaaaaaaaaaaaaaaaaaaaaaaaaaaaaaaaaaaaaaaaaaaaaaaaaaaaaaaaaaaaaaaaaaaaaaaaaaaaa

SEQ ID NO: 29614 - RNA, 1662 nt, Artificial Sequence
  mRNA product Design i-3 (A100) comprising derived and/or modified sequence from LASV(ISTH2010-NIG-2012;Clade II)__AIT17482__GPCmut5 (opt1)
aggagaaagcuuaccaugggccagaucaucaccuucuuccaggaggugccccacgucaucgaggaggugaugaacaucgugcugaucgcccucagccugcuggccauccucaaggggaucuacaacgucgcgaccugcggccuguucgggcugguguccuuccuccugcugugcggccgcagcugcuccacgaccuacaaggggguguacgagcuccagacccuggagcuggacauggccagccucaacaugaccaugccgcuguccugcacgaagaacaacagccaccacuacaucauggucggcaacgagaccggccuggagcucacccugaccaacacguccaucaucaaccacaaguucugcaaccugagcgacgcccacaagaagaaccucuacgaccacgcccugauguccaucaucagcaccuuccaccuguccauccccaacuucaaccaguacgaggccaugagcugcgacuucaacgggggcaagaucuccgugcaguacaaccucagccacgcguacgccguggacgccgccaaccacugcgggaccaucgcgaacggcguccugcagaccuucaugcggauggccuggggcggguccuacaucgcccuggacagcggcugcggguccugggacugcaucaugacgagcuaccaguaccucaucauccagaacaucaccugggaggaccacugccaguucucccgccccagccccaucggcuaccuggggcugcucagccagcggacccgcgacaucuacaucucccggcgccugcugggcaccuucacguggacccucagcgacuccgagggcaacgagacccccgggggcuacugccugacccgguggaugcugaucgaggccgagcucaagugcuucgggaacacggccguggcgaagugcaacgagaagcacgacgaggaguucugcgacaugcugcgccuguucgacuucaacaagcaggccauccggcgccucaagacccccgcccagaugagcauccagcugaucaacaaggccgugaacgcccugaucaacgaccagcucaucaugaagaaccaccuccgggacaucaugugcauccccuacugcaacuacuccaaguacugguaccugaaccacaccgucaccgggaagacgagccugccccgcugcuggcugguguccaacggcagcuaccugaacgagacccacuucuccgacgacaucgagcagcaggcggacaacaugaucaccgagcuccugcagaaggaguacaucgaccggcagggcaagaccccgcuggggcucguggaccuguucgucuucagcacguccuucuaccugaucagcaucuuccugcaccucgugaagaucccgacccaccgccacguggucggcaagcccugccccaagccccaccggcugaaccacauggggaucugcuccugcggccuguacaagcacccgggggugcccgugaaguggaagcgcugaggacuaguuauaagacugacuagcccgaugggccucccaacgggcccuccuccccuccuugcaccgagauuaauaaaaaaaaaaaaaaaaaaaaaaaaaaaaaaaaaaaaaaaaaaaaaaaaaaaaaaaaaaaaaaaaaaaaaaaaaaaaaaaaaaaaaaaaaaaaaaaaaaaa

SEQ ID NO: 29615 - RNA, 1662 nt, Artificial Sequence
  mRNA product Design i-3 (A100) comprising derived and/or modified sequence from LASV(Lassa virus/H.sapiens-wt/NGA/2015/ISTH_0543;Clade II)__AVO03639__GPCmut5 (opt1)
aggagaaagcuuaccaugggccagaucaucaccuucuuccaggaggugccccacgucaucgaggaggugaugaacaucgugcugaucgcccucagccugcuggccauccucaaggggaucuacaacgucgcgaccugcggccuguucgggcugguguccuuccuccugcugugcggccgcagcugcuccacgaccuacaaggggguguacgagcuccagacccuggagcuggacauggccaaccucaacaugaccaugccgcugagcugcacgaagaacaacucccaccacuacaucauggucggcaacgagaccggccuggagcucacccugaccaacacgagcaucaucaaccacaaguucugcaaccuguccgacgcccacaagaagaaccucuacgaccacgcccugaugagcaucaucuccaccuuccaccugagcauccccaacuucaaccaguacgaggccauguccugcgacuucaacgggggcaagaucagcgugcaguacaaccucucccacaccuacgcgguggacgccgccaaccacugcgggaccaucgccaacggcguccugcagacguucaugcggauggcguggggcgggagcuacaucgcccuggacuccggcugcgggagcugggacugcaucaugaccuccuaccaguaccucgugauccagaacaccaccugggaggaccacugccaguucagccgccccucccccaucggcuaccuggggcugcucagccagcggacgcgcgacaucuacaucagccggcgccugcugggcaccuucaccuggacccucuccgacagcgagggcaacgagacgcccgggggcuacugccugacccgguggaugcugaucgaggccgagcucaagugcuucgggaacaccgccguggccaagugcaacgagaagcacgacgaggaguucugcgacaugcugcgccuguucgacuucaacaagcaggcgauccggcgccucaagacccccgcccagauguccauccagcugaucaacaaggccgucaacgcccugaucaacgaccagcucaucaugaagaaccaccuccgggacaucaugugcauccccuacugcaacuacagcaaguacugguaccugaaccacacggugaccgggaagaccucccugccccgcugcuggcuggugagcaacggcuccuaccugaacgagacccacuucagcgacgacaucgagcagcaggccgacaacaugaucacggagcuccugcagaaggaguacaucgaccggcagggcaagaccccgcuggggcucgucgaccuguucguguucuccaccagcuucuaccugaucuccaucuuccugcaccucgugaagaucccgacccaccgccacaucacgggcaagcccugccccaagccccaccggcugaaccacauggggaucugcagcugcggccuguacaagcacccggggguccccgugaaguggaagcgcugaggacuaguuauaagacugacuagcccgaugggccucccaacgggcccuccuccccuccuugcaccgagauuaauaaaaaaaaaaaaaaaaaaaaaaaaaaaaaaaaaaaaaaaaaaaaaaaaaaaaaaaaaaaaaaaaaaaaaaaaaaaaaaaaaaaaaaaaaaaaaaaaaaaa

SEQ ID NO: 29616 - RNA, 1662 nt, Artificial Sequence
  mRNA product Design i-3 (A100) comprising derived and/or modified sequence from LASV(Lassa virus/H.sapiens-wt/NGA/2016/ISTH_0009;Clade II)__AVO03571__GPCmut5 (opt1)
aggagaaagcuuaccaugggccagaucaucaccuucuuccaggaggugccccacgucaucgaggaggugaugaacaucgugcugaucgcccucagccugcuggccauccucaaggggaucuacaacgucgcgaccugcggccugcuggggcucguguccuuccugcugcucugcggccgcagcugcuccacgaccuacaaggggguguacgagcugcagacccuggagcucgacauggccagccugaacaugaccaugccgcuguccugcacgaagaacaacagccaccacuacaucauggucggcaacgagaccggccucgagcugacccugaccaacacguccaucaucaaccacaaguucugcaaccucagcgacgcccacaagaagaaccuguacgaccacgcccugauguccaucaucagcaccuuccaccucuccauccccaacuucaaccaguacgaggccaugagcugcgacuucaacgggggccggaucuccgugcaguacaaccugagccacuccuacgcgguggacgccgccaaccacugcgggaccaucgccaacggcguccugcagaccuucaugcgcauggcguggggcgggagcuacaucgcccucgacuccggcugcgggagcugggacugcaucaugacguccuaccaguaccugaucauccagaacaccaccugggaggaccacugccaguucagccggcccagccccaucggcuaccuggggcuccugucccagcgcacccgggacaucuacaucagccgccggcugcucggcacguucaccuggacccuguccgacagcgagggcaacgagacccccgggggcuacugccugacgcgcuggaugcucaucgaggccgagcugaagugcuucgggaacaccgccguggccaagugcaacgagaagcacgacgaggaguucugcgacaugcugcggcuguucgacuucaacaagcaggcgauccgccggcugaagacccccgcccagauguccauccagcugaucaacaaggccgugaacgcccucaucaacgaccagcugaucaugaagaaccaccuccgcgacaucaugugcaucccguacugcaacuacagcaaguacugguaccucaaccacaccgucacggggaagaccucccugccccggugcuggcuggugagcaacggcuccuaccucaacgagacccacuucagcgacgacaucgagcagcaggccgacaacaugaucaccgagcugcugcagaaggaguacaucgaccgccagggcaagacgccccucgggcugguggaccuguucgucuucuccaccagcuucuaccugaucuccaucuuccuccaccuggugaagaucccgacccaccggcacaucaccggcaagcccugccccaagccccaccgccugaaccacauggggaucugcagcugcggccucuacaaccacccgggggugcccgucaaguggaagcggugaggacuaguuauaagacugacuagcccgaugggccucccaacgggcccuccuccccuccuugcaccgagauuaauaaaaaaaaaaaaaaaaaaaaaaaaaaaaaaaaaaaaaaaaaaaaaaaaaaaaaaaaaaaaaaaaaaaaaaaaaaaaaaaaaaaaaaaaaaaaaaaaaaaa

SEQ ID NO: 29617 - RNA, 1662 nt, Artificial Sequence
  mRNA product Design i-3 (A100) comprising derived and/or modified sequence from LASV(Lassa virus/H.sapiens-wt/NGA/2016/ISTH_0017;Clade II)__AVO03567__GPCmut5 (opt1)
aggagaaagcuuaccaugggccagaucaucaccuucuuccaggaggugccccacgucaucgaggaggugaugaacaucgugcugaucgcccucagccugcuggccauccucaaggggaucuacaacgucgcgaccugcggccuguucgggcugguguccuuccuccugcugugcggccgcagcugcuccacgaccuacaaggggguguacgagcuccagacccuggagcuggacauggccagccucaacaugaccaugccgcuguccugcacgaagaacaacagccaccacuacaucauggucggcaacgagaccggccuggagcucacccugaccaacacguccaucaucaaccacaaguucugcaaccugagcgacgcccacaagaagaaccucuacgaccacgcccugauguccaucaucagcaccuuccaccuguccauccccaacuucaaccaguacgaggccaugagcugcgacuucaacgggggcaagaucuccgugcaguacaaccucagccacaccuacgcgaucgacgccgccaaccacugcgggaccaucgccaacggcgugcugcagacguucaugcggauggcguggggcggguccuacaucgcccuggacagcggcugcggguccugggacugcaucaugaccagcuaccaguaccucaucauccagaacaccaccugggaggaccacugccaguucucccgccccagccccaucggcuaccuggggcugcucagccagcggacgcgcgacaucuacaucucccggcgccugcugggcaccuucaccuggacccucagcgacuccgagggcaacgagacgcccgggggcuacugccugacccgguggaugcugaucgaggccgagcucaagugcuucgggaacaccgccgucgccaagugcaacgagaagcacgacgaggaguucugcgacaugcugcgccuguucgacuucaacaagcaggcgauccggcgccucaagacccccgcccagaugagcauccagcugaucaacaaggccgugaacgcccugaucaacgaccagcucaucaugaagaaccaccuccgggacaucaugugcauccccuacugcaacuacuccaaguacugguaccugaaccacacggugaccgggaagaccagccugccccgcugcuggcuggucuccaacggcagcuaccugaacgagacccacuucuccgacgacaucgagcagcaggccgacaacaugaucacggagcuccugcagaaggaguacauggaccggcagggcaagaccccgcuggggcucguggaccuguucguguucagcaccuccuucuaccugaucagcaucuuccugcaccucguccgcaucccgacccaccggcacgugaucggcaagcccugccccaagccccaccgccugaaccacauggggaucugcuccugcggccuguacaagcacccgggggugcccgucaaguggaagcggugaggacuaguuauaagacugacuagcccgaugggccucccaacgggcccuccuccccuccuugcaccgagauuaauaaaaaaaaaaaaaaaaaaaaaaaaaaaaaaaaaaaaaaaaaaaaaaaaaaaaaaaaaaaaaaaaaaaaaaaaaaaaaaaaaaaaaaaaaaaaaaaaaaaa

SEQ ID NO: 29618 - RNA, 1662 nt, Artificial Sequence
  mRNA product Design i-3 (A100) comprising derived and/or modified sequence from LASV(Lassa virus/H.sapiens-wt/NGA/2018/ISTH_0959;Clade II)__AVV65099__GPCmut5 (opt1)
aggagaaagcuuaccaugggccagaucaucaccuucuuccaggaggugccccacgucaucgaggaggugaugaacaucgugcugaucgcccucagccugcuggccauccucaaggggaucuacaacgucgugaccugcggccuguucgggcugguguccuuccuccugcugugcggccgcagcugcuccacgaccuacaagggggucuacgagcuccagacccuggagcuggacauggcgagccucaacaugaccaugccgcuguccugcacgaagaacaacagccaccacuacaucauggugggcaacgagaccggccuggagcucacccugaccaacacguccaucaucaaccacaaguucugcaaccugagcgacgcccacaagaagaaccucuacgaccacgcccugauguccaucaucagcaccuuccaccuguccauccccaacuucaaccaguacgaggccaugagcugcgacuucaacgggggcaagaucuccgugcaguacaaccucagccacgccuacgcgaucgacgccgccaaccacugcgggaccaucgccaacggcguccugcagaccuucaugcggauggcguggggcggguccuacaucgcccuggacagcggcugcggguccugggacugcaucaugacgagcuaccaguaccucaucauccagaacaccaccugggaggaccacugccaguucucccgccccagccccaucggcuaccuggggcugcucagccagcggacccgcgacaucuacaucucccggcgccugcugggcacguucaccuggacccucagcgacuccgagggcaacgagacccccgggggcuacugccugacgcgguggaugcugaucgaggccgagcucaagugcuucgggaacaccgccguggccaagugcaacgagaagcacgacgaggaguucugcgacaugcugcgccuguucgacuucaacaagcaggcgauccggcgccucaagacccccgcccagaugagcauccagcugaucaacaaggccgugaacgcccugaucaacgaccagcucaucaugaagaaccaccuccgggacaucaugugcaucccguacugcaacuacuccaaguacugguaccugaaccacaccgucacggggaagaccagccugccccgcugcuggcugguguccaacggcagcuaccugaacgagacccacuucuccgacgacaucgagcagcaggccgacaacaugaucaccgagcuccugcagaaggaguacaucgaccggcagggcaagacgccccuggggcucguggaccuguucgucuucagcaccuccuucuaccugaucagcaucuuccugcaccucgugaagaucccgacccaccgccacgugaucggcaagcccugccccaagccccaccggcugaaccacauggggaucugcuccugcggccuguacaagcacccggggguccccgugaaguggaagcgcugaggacuaguuauaagacugacuagcccgaugggccucccaacgggcccuccuccccuccuugcaccgagauuaauaaaaaaaaaaaaaaaaaaaaaaaaaaaaaaaaaaaaaaaaaaaaaaaaaaaaaaaaaaaaaaaaaaaaaaaaaaaaaaaaaaaaaaaaaaaaaaaaaaaa

SEQ ID NO: 29619 - RNA, 1662 nt, Artificial Sequence
  mRNA product Design i-3 (A100) comprising derived and/or modified sequence from LASV(LASV003-NIG-2008;Clade II)__AIT17580__GPCmut5 (opt1)
aggagaaagcuuaccaugggccagaucaucaccuucuuccaggaggugccccacgucaucgaggaggugaugaacaucgugcugaucgcccucagccugcuggccauccucaaggggaucuacaacgucgcgaccugcggccuguucgggcugguguccuuccuccugcugugcggccgcagcugcuccacgaccuacaaggggguguacgagcuccagacccuggagcuggacauggccagccucaacaugaccaugccgcuguccugcacgaagaacaacagccaccacuacaucauggucggcaacgagaccggccuggagcucacccugaccaacacguccaucaucaaccacaaguucugcaaccugagcgacgcccacaagaagaaccucuacgaccacgcccugauguccaucaucagcaccuuccaccuguccauccccaacuucaaccaguacgaggccaugagcugcgacuucaacgggggcaagaucuccgugcaguacaaccucagccacaccuacgcgguggacgccgccaaccacugcgggaccaucgccaacggcguccugcagacguucaugcggauggcguggggcggguccuacaucgcccuggacagcggcugcggguccugggacugcaucaugaccagcuaccaguaccucaucauccagaacaccaccugggaggaccacugccaguucucccgccccagccccaucggcuaccuggggcugcucagccagcggacgcgcgacaucuacaucucccggcgccugcugggcaccuucaccuggacccucagcgacuccgagagcaacgagacgccgggcggguacugccugacccgguggaugcugaucgaggccgagcucaagugcuucggcaacaccgccguggccaagugcaacgagaagcacgacgaggaguucugcgacaugcugcgccuguucgacuucaacaagcaggcgauccggcgccucaaggcccccgcccagauguccauccagcugaucaacaaggccgugaacgcccugaucaacgaccagcucaucaugaagaaccaccuccgggacaucaugugcauccccuacugcaacuacagcaaguacugguaccugaaccacaccgucacgggccgcaccucccugccccggugcuggcuggugagcaacggguccuaccugaacgagacccacuucagcgacgacaucgagcagcaggcggacaacaugaucaccgagcuccugcagaaggaguacauggaccgccagggcaagacgccccugggccucguggaccuguucgucuucuccaccagcuucuaccugaucuccaucuuccugcaccucgugaagaucccgacccaccggcacgugaucgggaagcccugccccaagccccaccgccugaaccacaugggcaucugcagcugcgggcuguacaagcacccgggcguccccgugaaguggaagcggugaggacuaguuauaagacugacuagcccgaugggccucccaacgggcccuccuccccuccuugcaccgagauuaauaaaaaaaaaaaaaaaaaaaaaaaaaaaaaaaaaaaaaaaaaaaaaaaaaaaaaaaaaaaaaaaaaaaaaaaaaaaaaaaaaaaaaaaaaaaaaaaaaaaa

SEQ ID NO: 29620 - RNA, 1662 nt, Artificial Sequence
  mRNA product Design i-3 (A100) comprising derived and/or modified sequence from LASV(LASV035-NIG-2009;Clade II)__AIT17588__GPCmut5 (opt1)
aggagaaagcuuaccaugggccagaucaucaccuucuuccaggaggugccccacgucaucgaggaggugaugaacaucgugcugaucgcccucagccugcuggccauccucaaggggaucuacaacgucgcgaccugcggccuguucgggcugguguccuuccuccugcugugcggccgcagcugcuccacgaccuacaaggggguguacgagcuccagacccuggagcuggacauggccagccucaacaugaccaugccgcuguccugcacgaagaacaacagccaccacuacaucauggucggcaacgagaccggccuggagcucacccugaccaacacguccaucaucaaccacaaguucugcaaccugagcgacgcccacaagaagaaccucuacgaccacgcccugauguccaucaucagcaccuuccaccuguccauccccaacuucaaccaguacgaggccaugagcugcgacuucaacgggggcaagaucuccgugcaguacaaccucagccacgcguacgccguggacgccgccaaccacugcgggaccaucgcgaacggcguccugcagaccuucaugcggauggccuggggcggguccuacaucgcccuggacagcggcugcggguccugggacugcaucaugacgagcuaccaguaccucaucauccagaacaccaccugggaggaccacugccaguucucccgccccagccccaucggcuaccuggggcugcucagccagcggacccgcgacaucuacaucucccggcgccugcugggcacguucaccuggacccucagcgacuccgagggcaacgagacccccgggggcuacugccugacgcgguggaugcugaucgaggccgagcucaagugcuucgggaacaccgccguggcgaagugcaacgagaagcacgacgaggaguucugcgacaugcugcgccuguucgacuucaacaagcaggccauccggcgccucaaggcccccgcccagaugagcauccagcugaucaacaaggccgugaacgcgcugaucaacgaccagcucaucaugaagaaccaccuccgggacaucaugugcauccccuacugcaacuacuccaaguacugguaccugaaccacaccgucaccgggaagacgagccugccccgcugcuggcugguguccaacggcagcuaccugaacgagacccacuucuccgacgacaucgagcagcaggccgacaacaugaucaccgagcuccugcagaaggaguacaucgaccggcagggcaagaccccgcuggggcucguggaccuguucgucuucagcacguccuucuaccugaucagcaucuuccugcaccucgugaagaucccgacccaccgccacgugaucggcaagcccugccccaagccccaccggcugaaccacauggggaucugcuccugcggccuguacaagcacccggggguccccgugaaguggaagcgcugaggacuaguuauaagacugacuagcccgaugggccucccaacgggcccuccuccccuccuugcaccgagauuaauaaaaaaaaaaaaaaaaaaaaaaaaaaaaaaaaaaaaaaaaaaaaaaaaaaaaaaaaaaaaaaaaaaaaaaaaaaaaaaaaaaaaaaaaaaaaaaaaaaaa

SEQ ID NO: 29621 - RNA, 1662 nt, Artificial Sequence
  mRNA product Design i-3 (A100) comprising derived and/or modified sequence from LASV(LASV1000-NIG-2009;Clade II)__AIT17782__GPCmut5 (opt1)
aggagaaagcuuaccaugggccagaucaucaccuucuuccaggaggugccccacgucaucgaggaggugaugaacaucgugcugaucgcccucagccugcuggccauccucaaggggaucuacaacgucgcgaccugcggccuguucgggcugguguccuuccuccugcugugcggccgcagcugcuccacgaccuacaaggggguguacgagcuccagacccuggagcuggacauggccagccucaacaugaccaugccgcuguccugcacgaagaacaacagccaccacuacaucauggucggcaacgagaccggccuggagcucacccugaccaacacguccaucaucaaccacaaguucugcaaccugagcgacgcccacaagaagaaccucuacgaccacgcccugauguccaucaucagcaccuuccaccuguccauccccaacuucaaccaguacgaggccaugagcugcgacuucaacgggggcaagaucuccgugcaguacaaccucagccacaccuacgcgguggacgccgccaaccacugcgggaccaucgccaacggcguccugcagacguucaugcggauggcguggggcggguccuacaucgcccuggacagcggcugcggguccugggacugcaucaugaccagcuaccaguaccucaucauccagaacaccaccugggaggaccacugccaguucucccgccccagccccaucggcuaccuggggcugcucagccagcggacgcgcgacaucuacaucucccggcgccugcugggcaccuucaccuggacccucagcgacuccgagggcaacgagacgcccgggggcuacugccugacccgguggaugcugaucgaggccgagcucaagugcuucgggaacaccgccguggccaagugcaacgagaagcacgacgaggaguucugcgacaugcugcgccuguucgacuucaacaagcaggcgaucaagcggcucaagacccccgcccagaugagcauccagcugaucaacaaggccgugaacgcccugaucaacgaccagcucaucaugaagaaccaccuccgcgacaucaugugcauccccuacugcaacuacuccaaguacugguaccugaaccacacggucaccgggaagaccagccugccccggugcuggcugguguccaacggcagcuaccugaacgagacccacuucuccgacgacaucgagcagcaggccgacaacaugaucacggagcuccugcagaaggaguacaucgaccgccagggcaagaccccgcuggggcucguggaccuguucgucuucagcaccuccuucuaccugaucagcaucuuccugcaccucgugaagaucccgacccaccggcacguggucggcaagcccugccccaagccccaccgccugaaccacauggggaucugcuccugcggccuguacaagcacccgggggugcccgugaaguggaagcggugaggacuaguuauaagacugacuagcccgaugggccucccaacgggcccuccuccccuccuugcaccgagauuaauaaaaaaaaaaaaaaaaaaaaaaaaaaaaaaaaaaaaaaaaaaaaaaaaaaaaaaaaaaaaaaaaaaaaaaaaaaaaaaaaaaaaaaaaaaaaaaaaaaaa

SEQ ID NO: 29622 - RNA, 1662 nt, Artificial Sequence
  mRNA product Design i-3 (A100) comprising derived and/or modified sequence from LASV(LASV221-NIG-2010;Clade II)__AIT17624__GPCmut5 (opt1)
aggagaaagcuuaccaugggccagaucaucaccuucuuccaggaggugccccacgucaucgaggaggugaugaacaucgugcugaucgcccucagccugcuggccauccucaaggggaucuacaacgucgcgaccugcggccuguucgggcugguguccuuccuccugcugugcggccgcagcugcuccacgaccuacaaggggguguacgagcuccagacccuggagcuggacauggccagccucaacaugaccaugccgcuguccugcacgaagaacaacagccaccacuacaucauggucggcaacgagaccggccuggagcucacccugaccaacacguccaucaucaaccacaaguucugcaaccugagcgacgcccacaagaagaaccucuacgaccacgcccugauguccaucaucagcaccuuccaccuguccauccccaacuucaaccaguacgaggccaugagcugcgacuucaacgggggcaagaucuccgugcaguacaaccucagccacaccuacgcgaucgacgccgccaaccacugcgggaccaucgccaacggcgugcugcagacguucaugcggauggcguggggcggguccuacaucgcccuggacagcggcugcggguccugggacugcaucaugaccagcuaccaguaccucaucauccagaacaccaccugggaggaccacugccaguucucccgccccagccccaucggcuaccuggggcugcucagccagcggacgcgcgacaucuacaucucccggcgccugcugggcaccuucaccuggacccucagcgacuccgagggcaacgagacgcccgggggcuacugccugacccgguggaugcugaucgaggccgagcucaagugcuucgggaacaccgccgucgccaagugcaacgagaagcacgacgaggaguucugcgacaugcugcgccuguucgacuucaacaagcaggcgauccggcgccucaagacccccgcccagaugagcauccagcugaucaacaaggccgugaacgcccugaucaacgaccagcucaucaugaagaaccaccuccgggacaucaugugcauccccuacugcaacuacuccaaguacugguaccugaaccacacggugaccgggaagaccagccugccccgcugcuggcuggucuccaacggcagcuaccugaacgagacccacuucuccgacgacaucgagcagcaggccgacaacaugaucacggagaugcuccagaaggaguacauggaccggcagggcaagaccccgcuggggcugguggaccucuucguguucagcaccuccuucuaccugaucagcaucuuccugcaccuggucaagaucccgacccaccgccacgugaucggcaagcccugccccaagccccaccggcucaaccacauggggaucugcuccugcggccuguacaagcacccgggggugcccgucaaguggaagcgcugaggacuaguuauaagacugacuagcccgaugggccucccaacgggcccuccuccccuccuugcaccgagauuaauaaaaaaaaaaaaaaaaaaaaaaaaaaaaaaaaaaaaaaaaaaaaaaaaaaaaaaaaaaaaaaaaaaaaaaaaaaaaaaaaaaaaaaaaaaaaaaaaaaaa

SEQ ID NO: 29623 - RNA, 1662 nt, Artificial Sequence
  mRNA product Design i-3 (A100) comprising derived and/or modified sequence from LASV(LASV237-NIG-2010;Clade II)__AIT17638__GPCmut5 (opt1)
aggagaaagcuuaccaugggccagaucaucaccuucuuccaggaggugccccacgucaucgaggaggugaugaacaucgugcugaucgcccucagccugcuggccauccucaaggggaucuacaacgucgcgaccugcggccuguucgggcugguguccuuccuccugcugugcggccgcagcugcuccacgaccuacaaggggguguacgagcuccagacccuggagcuggacauggccagccucaacaugaccaugccgcuguccugcacgaagaacaacagccaccacuacaucauggucggcaacgagaccggccuggagcucacccugaccaacacguccaucaucaaccacaaguucugcaaccugagcgacgcccacaagaaggaccucuacgaccacgcccugauguccaucaucagcaccuuccaccuguccauccccaacuucaaccaguacgaggccaugagcugcgacuucaacgggggcaagaucuccgugcaguacaaccucagccacaccuacgcgguggacgccgccaaccacugcgggaccaucgccaacggcguccugcagacguucaugcggauggcguggggcggguccuacaucgcccuggacagcggcugcggguccugggacugcaucaugaccagcuaccaguaccucaucauccagaacaccaccugggaggaccacugccaguucucccgccccagccccaucggcuaccuggggcugcucagccagcggacgcgcgacaucuacaucucccggcgccugcugggcaccuucaccuggacccucagcgacuccgagggcaacgagacgcccgggggcuacugccugacccgguggaugcugaucgaggccgagcucaagugcuucgggaacaccgccguggccaagugcaacgagaagcacgacgaggaguucugcgacaugcugcgccuguucgacuucaacaagcaggcgauccggcgccucaagacccccgcccagaugagcauccagcugaucaacaaggccgugaacgcccugaucaacgaccagcucaucaugaagaaccaccuccgggacaucaugugcauccccuacugcaacuacuccaaguacugguaccugaaccacacggucaccgggaagaccagccugccccgcugcuggcugguguccaacggcagcuaccugaacgagacccacuucuccgacgacaucgagcagcaggccgacaacaugaucacggagcuccugcagaaggaguacauggaccggcagggcaagaccccgcuggggcucguggaccuguucgucuucagcaccuccuucuaccugaucagcaucuuccugcaccucaucaagaucccgacccaccgccacaucacgggcaagcccugccccaagccccaccggcugaaccacauggggaucugcuccugcggccuguacaagcacccgggggugcccgugaaguggaagcgcugaggacuaguuauaagacugacuagcccgaugggccucccaacgggcccuccuccccuccuugcaccgagauuaauaaaaaaaaaaaaaaaaaaaaaaaaaaaaaaaaaaaaaaaaaaaaaaaaaaaaaaaaaaaaaaaaaaaaaaaaaaaaaaaaaaaaaaaaaaaaaaaaaaaa

SEQ ID NO: 29624 - RNA, 1662 nt, Artificial Sequence
  mRNA product Design i-3 (A100) comprising derived and/or modified sequence from LASV(LASV253-NIG-2011;Clade II)__AIT17670__GPCmut5 (opt1)
aggagaaagcuuaccaugggccagaucaucaccuucuuccaggaggugccccacgucaucgaggaggugaugaacaucgugcugaucgcccucagccugcuggccauccucaaggggaucuacaacgucgcgaccugcggccuguucgggcugguguccuuccuccugcugugcggccgcagcugcuccacgaccuacaaggggguguacgagcuccagacccuggagcuggacauggccagccucaacaugaccaugccgcuguccugcacgaagaacaacagccaccacuacaucauggucggcaacgagaccggccuggagcucacccugaccaacacguccaucaucaaccacaaguucugcaaccugagcgacgcccacaagaagaaccucuacgaccacgcccugauguccaucaucagcaccuuccaccuguccauccccaacuucaaccaguacgaggccaugagcugcgacuucaacgggggcaagaucuccgugcaguacaaccucagccacaccuacgcgguggacgccgccaaccacugcgggaccaucgccaacggcguccugcagacguucaugcggauggcguggggcggguccuacaucgcccuggacagcggcugcggguccugggacugcaucaugaccagcuaccaguaccucaucauccagaacaccaccugggaggaccacugccaguucucccgccccagccccaucggcuaccuggggcugcucagccagcggacgcgcgacaucuacaucucccggcgccugcugggcaccuucaccuggacccucagcgacuccgagggcaacgagacgcccgggggcuacugccugacccgguggaugcugaucgaggccgagcucaagugcuucgggaacaccgccguggccaagugcaacgagaagcacgacgaggaguucugcgacaugcugcgccuguucgacuucaacaagcaggcgauccggcgccucaaggcccccgcccagaugagcauccagcugaucaacaaggccgugaacgcccugaucaacgaccagcucaucaugaagaaccaccuccgggacaucaugugcaucccguacugcaacuacuccaaguacugguaccugaaccacaccgucacggggcgcaccagccugccccggugcuggcugguguccaacggcagcuaccugaacgagacccacuucuccgacgacaucgagcagcaggcggacaacaugaucaccgagcuccugcagaaggaguacaucgaccgccagggcaagacgccccuggggcucguggaccuguucgucuucagcaccuccuucuaccugaucagcaucuuccugcaccucgugaagaucccgacccaccggcacaucaucggcaagcccugccccaagccccaccgccugaaccacauggggaucugcuccugcggccuguacaagcacccgggggugcccgucaaguggaagcggugaggacuaguuauaagacugacuagcccgaugggccucccaacgggcccuccuccccuccuugcaccgagauuaauaaaaaaaaaaaaaaaaaaaaaaaaaaaaaaaaaaaaaaaaaaaaaaaaaaaaaaaaaaaaaaaaaaaaaaaaaaaaaaaaaaaaaaaaaaaaaaaaaaaa

SEQ ID NO: 29625 - RNA, 1662 nt, Artificial Sequence
  mRNA product Design i-3 (A100) comprising derived and/or modified sequence from LASV(LASV254-NIG-2011;Clade II)__AIT17674__GPCmut5 (opt1)
aggagaaagcuuaccaugggccagaucaucaccuucuuccaggaggugccccacgucaucgaggaggugaugaacaucgugcugaucgcccucagccugcuggccauccucaaggggaucuacaacgucgcgaccugcggccuguucgggcugguguccuuccuccugcugugcggccgcagcugcuccacgaccuacaaggggguguacgagcuccagacccuggagcuggacaugaccaaccucaacaugacgaugccgcugagcugcaccaagaacaacucccaccacuacaucauggucggcaacgagaccggccuggagcucacccugacgaacaccagcaucaucaaccacaaguucugcaaccuguccgacgcccacaagaagaaccucuacaaccacgcccugaugagcaucaucuccaccuuccaccugagcauccccaacuucaaccaguacgaggccauguccugcgacuucaacgggggcaagaucagcgugcaguacaaccucucccacagcuacgccguggacgcggccaaccacugcgggaccaucgccaacggcguccugcagacguucaugcggauggccuggggcggguccuacaucgcgcuggacagcggcugcgggaacugggacugcaucaugaccuccuaccaguaccucaucauccagaacaccaccugggaggaccacugccaguucagccgccccucccccaucggcuaccuggggcugcucagccagcggacgcgcgacaucuacaucagccggcgccugcugggcaccuucaccuggacccucuccgacagcgagggcaacgagacgcccgggggcuacugccugacccgguggaugcugaucgaggccgagcucaagugcuucgggaacaccgccguggccaagugcaacgagaagcacgacgaggaguucugcgacaugcugcgccuguucgacuucaacaagcaggccauccggcgccucaagacccccgcgcaggccaacauccagcugaucaacaaggccgugaacgcccugaucaacgaccagcucaucaugaagaaccaccuccgggacaucaugugcauccccuacugcaacuacuccaaguacugguaccugaaccacacggucaccgggaagaccagccugccccgcugcuggcugguguccaacggcagcuaccugaacgagacccacuucuccgacgacaucgagcagcaggccgacaacaugaucacggagcuccugcagaaggaguacauggaccggcagggcaagaccccgcuggggcucguggaccuguucgucuucagcaccuccuucuaccugaucagcaucuuccugcaccucgugaagaucccgacccaccgccacgugaucggcaagcccugccccaagccccaccggcugaaccacauggggaucugcuccugcggccuguacaagcacccggggguccccgugaaguggaagcgcugaggacuaguuauaagacugacuagcccgaugggccucccaacgggcccuccuccccuccuugcaccgagauuaauaaaaaaaaaaaaaaaaaaaaaaaaaaaaaaaaaaaaaaaaaaaaaaaaaaaaaaaaaaaaaaaaaaaaaaaaaaaaaaaaaaaaaaaaaaaaaaaaaaaa

SEQ ID NO: 29626 - RNA, 1662 nt, Artificial Sequence
  mRNA product Design i-3 (A100) comprising derived and/or modified sequence from LASV(Nig08-A19;Clade III)__ADU56618__GPCmut5 (opt1)
aggagaaagcuuaccaugggccagaucgugaccuucuuccaggaggucccccacgugaucgaggaggugaugaacaucguccugaucgcccucagcauccuggccauccugaaggggcucuacaacaucgcgaccugcggccugaucgggcuggugacguuccuccugcuguccggccgcagcugcuccaugaccuacaaggggguguacgagcuccagacccuggagcugaacaugaacacccucaacaugacgaugccgcugagcugcaccaagaacaacucccaccacuacaucauggucggcaacgagaccggccuggagcucacccugacgaacaccagccugcuccaccacaaguucugcaaccuguccgacgcccacaagaagaaccuguacgaccacacccucaugagcaucaucuccaccuuccaccugagcauccccaacuucaaccaguacgaggccauguccugcgacuucaacgggggcaagaucacggugcaguacaaccugagccacuccuacgccaucgacgccgcgaaccacugcgggaccguggccaacggcguccuccagaccuucaugcggauggccuggggcgggagcuacaucgcccuggacuccggcugcgggaagugggacugcaucaugaccagcuaccaguaccugaucauccagaacacgaccugggaggaccacugccaguucucccggcccagccccaucggcuaccucgggcugcugucccagcgcacccgggacaucuacaucagccgccggcuccugggcaccuucacguggacccugagcgacuccgagggcaacgagacccccgggggcuacugccucacccgcuggaugcugaucgaggcggagcugaagugcuucgggaacacggccguggccaagugcaacgagaagcacgacgaggaguucugcgacaugcuccggcuguucgacuucaacaagcaggccauccgccggcugaaggcccccgcgcagaugagcauccagcucaucaacaaggccgugaacgcccugaucaacgaccagcugaucaugaagaaccaccuccgcgacaucaugugcauccccuacugcaacuacuccaaguacugguaccugaaccacaccagcaccgggcggaccucccugccccgcugcuggcucgucagcaacggcuccuaccugaacgagacgcacuucagcgacgacaucgagcagcaggccgacaacaugaucaccgagaugcugcagaaggaguaccucgaccggcagggcaagaccccgcuggggcugguggaccuguucguguucuccaccagcuucuaccucaucuccaucuuccugcaccuggucaagaucccgacgcaccgccacaucgugggcaagcccugccccaagccccaccggcucaaccacauggggaucugcagcugcggccuguacaagcagccgggggugcccguccgcuggaagcggugaggacuaguuauaagacugacuagcccgaugggccucccaacgggcccuccuccccuccuugcaccgagauuaauaaaaaaaaaaaaaaaaaaaaaaaaaaaaaaaaaaaaaaaaaaaaaaaaaaaaaaaaaaaaaaaaaaaaaaaaaaaaaaaaaaaaaaaaaaaaaaaaaaaa

SEQ ID NO: 29627 - RNA, 1665 nt, Artificial Sequence
  mRNA product Design i-3 (A100) comprising derived and/or modified sequence from LASV(G1180-SLE-2010;Clade IV)__AIT17168__GPCmut5 (opt1)
aggagaaagcuuaccaugggccagaucgugaccuucuuccaggaggucccccacgugaucgaggaggugaugaacaucguccugaucgcccucagcauccuggccgugcugaaggggcucuacaacuucgcgaccugcggccugguggggcugcucaccuuccugcugcucugcggccgcuccugcaccgccagccgguacaagggggucuacgagcugcagacccuggagcucaacauggagacccugaacaugacgaugccgcuguccugcaccaagaacaacagccaccacuacaucauggugggcaacgagaccggccucgagcugacccugacgaacaccuccaucaucaaccacaaguucugcaaccucagcgacgcccacaagaagaaccuguacgaccacgcccugauguccaucaucagcaccuuccaccucuccauccccaacuucaaccaguacgaggccaugagcugcgacuucaacgggggcaagaucuccgugcaguacaaccugagccacuccuacgcgggggacgccgccaaccacugcggcaccgucgccaacggggugcugcagacguucaugcgcauggcguggggcggcagcuacaucgcccucgacuccgggugcggcagcugggacugcaucaugaccuccuaccaguaccugaucauccagaacaccaccugggaggaccacugccaguucagccggcccucccccaucggguaccugggccuccugagccagcgcacgcgggacaucuacaucagccgccggcugcucggcaccuucaccuggacccuguccgacagcgaggggaaggacacgccgggcggguacugccugacccgcuggaugcucaucgaggccgagcugaagugcuucggcaacaccgccguggccaagugcaacgagaagcacgacgaggaguucugcgacaugcugcggcuguucgacuucaacaagcaggcgauccagcgccugaaggcccccgcccagauguccauccagcugaucaacaaggccgucaacgcccucaucaacgaccagcugaucaugaagaaccaccuccgggacaucaugugcauccccuacugcaacuacagcaaguacugguaccucaaccacaccacgaccggcaagaccucccugcccaagugcuggcuggugagcaacggcuccuaccucaacgagacccacuucagcgacgacaucgagcagcaggcggacaacaugaucacggagaugcugcagaaggaguacauggagcgccaggggaagacgccccugggccucguggaccuguucgucuucuccaccagcuucuaccugaucuccaucuuccugcaccucgugaagaucccgacccaccggcacaucgugggcaagagcugccccaagccccaccgccugaaccacauggggaucugcuccugcgggcuguacaagcagcccggcgucccggugaaguggaagcggugaggacuaguuauaagacugacuagcccgaugggccucccaacgggcccuccuccccuccuugcaccgagauuaauaaaaaaaaaaaaaaaaaaaaaaaaaaaaaaaaaaaaaaaaaaaaaaaaaaaaaaaaaaaaaaaaaaaaaaaaaaaaaaaaaaaaaaaaaaaaaaaaaaaa

SEQ ID NO: 29628 - RNA, 1665 nt, Artificial Sequence
  mRNA product Design i-3 (A100) comprising derived and/or modified sequence from LASV(G1442-SLE-2011;Clade IV)__AIT17180__GPCmut5 (opt1)
aggagaaagcuuaccaugggccagaucgugaccuucuuccaggaggucccccacgugaucgaggaggugaugaacaucguccugaucgcccucagcauccuggccgugcugaaggggcucuacaacguggcgaccugcggccugaucgggcuggucacguuccuccugcugugcggccgcuccugcaccaccacccucuacaaggggguguacgagcugcagacgcuggagcucaacauggagacccugaacaugaccaugccgcugagcugcaccaagaacaacucccaccacuacauccgggugggcaacgagacgggccucgagcugacccugaccaacaccagcaucaucaaccacaaguucugcaaccucuccgacgcccacaagaagaaccuguacgaccacgcccugaugagcaucaucuccacguuccaccucagcauccccaacuucaaccaguacgaggccauguccugcgacuucaacgggggcaagaucagcguccaguacaaccugucccacagcuacgccggggacgcggccaaccacugcggcaccguggccaacggggugcugcagaccuucaugcgcauggccuggggcggcuccuacaucgcgcucgacagcgggugcggcaacugggacugcaucaugaccuccuaccaguaccugaucauccagaacacgaccugggacgaccacugccaguucagccgccccucccccaucggguaccugggccuccugagccagcggacccgcgacgucuacaucucccggcgccugcucggcaccuucacguggacccugagcgacagcgaggggaaggacaccccgggcggguacugccugacccgguggaugcucaucgaggccgagcugaagugcuucggcaacacggccguggccaagugcaacgagaagcacgacgaggaguucugcgacaugcugcgccucuucgacuucaacaagcaggccauccagcggcugaaggcgcccgcccagauguccauccagcugaucaacaaggccgugaacgcccucaucaacgaccagcugaucaugaagaaccaccuccgcgacaucaugugcauccccuacugcaacuacagcaaguacugguaccugaacaacaccgccaccggcaagaccucccugcccaagugcuggcugaucagcaacggcuccuaccucaacgagacgcacuucagcgacgacaucgagcaggaggcggacaacaugaucaccgagaugcugcagaaggaguacauggagcggcaggggaagacgccccugggccucgucgaccuguucguguucuccaccagcuucuaccugaucuccaucuuccugcaccucgugaagaucccgacccaccgccacaucgucggcaagagcugccccaagccccaccggcugaaccacauggggaucugcuccugcgggcuguacaagcagcccggcgugccggugcgcuggaagcggugaggacuaguuauaagacugacuagcccgaugggccucccaacgggcccuccuccccuccuugcaccgagauuaauaaaaaaaaaaaaaaaaaaaaaaaaaaaaaaaaaaaaaaaaaaaaaaaaaaaaaaaaaaaaaaaaaaaaaaaaaaaaaaaaaaaaaaaaaaaaaaaaaaaa

SEQ ID NO: 29629 - RNA, 1665 nt, Artificial Sequence
  mRNA product Design i-3 (A100) comprising derived and/or modified sequence from LASV(G3010-SLE-2013;Clade IV)__AIT17344__GPCmut5 (opt1)
aggagaaagcuuaccaugggccagaucgugaccuucuuccaggaggucccccacgugaucgaggaggugaugaacaucguccugaucgcccucagcauccuggccgugcugaaggggcucuacaacuucgcgaccugcggccugguggggcuggucacguuccuccugcugugcggccgcuccugcaccaccagccucuacaaggggguguacgagcugcagacccuggagcucaacauggagacgcugaacaugaccaugccgcuguccugcaccaagaacaacagccaccacuacaucauggugggcaacgagaccggccucgagcugacgcugaccaacaccuccaucaucaaccacaaguucugcaaccucagcgacgcccacaagaagaaccuguacaaccacgcccugauguccaucaucagcaccuuccaccucuccauccccaacuucaaccaguacgaggccaugagcugcgacuucaacgggggcaagaucuccguccaguacaaccugagccacuccuacgccggggacgcggccagccacugcggcacgguggccaacggggugcugcagaccuucaugcggauggccuggggcggcuccuacaucgcgcucgacagcgggugcggcaagugggacugcaucaugaccuccuaccaguaccugaucauccagaacaccacgugggaggaccacugccaguucagccgccccucccccaucggguaccugggccuccugagccagcggacccgcgacaucuacaucagccggcgccugcucggcaccuucaccuggacgcuguccgacagcgaggggaaggacaccccgggcggguacugccugacccgguggaugcucaucgaggccgagcugaagugcuucggcaacaccgccgucgccaagugcaacgagaagcacgacgaggaguucugcgacaugcugcgccucuucgacuucaacaagcaggccauccagcggcugaagacgcccgcgcagauguccauccagcugaucaacaaggccgugaacgcccucaucaacgaccagcugaucaugaagaaccaccuccgcgacaucaugugcauccccuacugcaacuacagcaaguacugguaccugaaccacaccaccaccggcaagacgucccugcccaagugcuggcuggugagcaacggcuccuaccucaacgagacccacuucagcgacgacaucgagcagcaggccgacaacaugaucaccgagaugcugcagaaggaguacauggagcggcaggggaagacgccccugggccucgucgaccuguucguguucuccaccagcuucuaccugaucuccaucuuccugcaccucgugaagaucccgacccaccgccacaucgucggcaagagcugccccaagccccaccggcugaaccacauggggaucugcuccugcgggcuguacaagcagcccggcgugccggugcgcuggaagcggugaggacuaguuauaagacugacuagcccgaugggccucccaacgggcccuccuccccuccuugcaccgagauuaauaaaaaaaaaaaaaaaaaaaaaaaaaaaaaaaaaaaaaaaaaaaaaaaaaaaaaaaaaaaaaaaaaaaaaaaaaaaaaaaaaaaaaaaaaaaaaaaaaaaa

SEQ ID NO: 29630 - RNA, 1665 nt, Artificial Sequence
  mRNA product Design i-3 (A100) comprising derived and/or modified sequence from LASV(G502-SLE-2009;Clade IV)__AIT17126__GPCmut5 (opt1)
aggagaaagcuuaccaugggccagaucgugaccuucuuccaggaggucccccacgugaucgaggaggugaugaacaucguccugaucgcccucagcauccuggccgugcugaaggggcucuacaacuucgcgaccugcggccugguggggcugcucacguuccugcugcucugcggccgcuccugcaccaccgggcuguacaagggcgucuacgagcugcagacccucgagcugaacauggagacgcugaacaugaccaugccgcucagcugcaccaagaacaacucccaccacuacaucauggugggcaacgagaccgggcuggagcugacgcucaccaacaccagcaucaucaaccacaaguucugcaaccuguccgacgcccacaagaagaaccuguacgaccacgcccucaugagcaucaucuccaccuuccaccugagcauccccaacuucaaccaguacgaggccauguccugcgacuucaacggcgggaagaucagcgugcaguacaaccugucccacagcuacgccggcgacgcggccgaccacugcgggacggucgccaacggcgugcuccagaccuucaugcggauggccuggggcggguccuacaucgcgcuggacagcggcugcgggcggugggacugcaucaugaccuccuaccaguaccugaucauccagaacaccacgugggaggaccacugccaguucagccgccccucccccaucggcuaccucggccugcugagccagcggacccgcgacaucuacaucucccggcgccuccuggggaccuucaccuggacgcugagcgacagcgagggcaaggacacccccgggggcuacugccucacccgguggaugcugaucgaggccgagcugaagugcuucgggaacaccgccguggccaagugcaacgagaagcacgacgaggaguucugcgacaugcuccgccuguucgacuucaacaagcaggccauccagcggcugaaggcgcccgcccagauguccauccagcucaucaacaaggccgucaacgcccugaucaacgaccagcuggugaugaagaaccaccuccgcgacaucaugugcauccccuacugcaacuacagccgguacugguaccugaaccacacgaccaccggccgcaccucccugcccaagugcuggcucgugagcaacggguccuaccugaacgagacgcacuucagcgacgacaucgagcagcaggccgacaacaugaucaccgagaugcugcagaaggaguacauggagcggcagggcaagaccccgcucgggcuggucgaccuguucguguucuccaccagcuucuaccugaucuccaucuuccuccaccuggugaagaucccgacgcaccgccacaucgucggcaagagcugccccaagccccaccggcugaaccacauggggaucugcuccugcggccucuacaagcagcccggcgugccggugaaguggaagcgcugaggacuaguuauaagacugacuagcccgaugggccucccaacgggcccuccuccccuccuugcaccgagauuaauaaaaaaaaaaaaaaaaaaaaaaaaaaaaaaaaaaaaaaaaaaaaaaaaaaaaaaaaaaaaaaaaaaaaaaaaaaaaaaaaaaaaaaaaaaaaaaaaaaaa

SEQ ID NO: 29631 - RNA, 1665 nt, Artificial Sequence
  mRNA product Design i-3 (A100) comprising derived and/or modified sequence from LASV(G733-SLE-2010;Clade IV)__AIT17154__GPCmut5 (opt1)
aggagaaagcuuaccaugggccagaucgugaccuucuuccaggaggucccccacgugaucgaggaggugaugaacaucguccugaucgcccucagcauccuggccgugcugaaggggcucuacaacuucgcgaccugcggcaucguggggcuggucuccuuccugcuccugugcggccgcagcugcacgaccucccuguacaaggggguguacgagcuccagacccuggagcugaacauggagacccucaacaugacgaugccgcugagcugcaccaagaacaacucccaccacuacaucauggugggcaacgagaccggccuggagcucacccugacgaacaccagcaucaucaaccacaaguucugcaaccuguccgacgcccacaagaagaaccucuacgaccacgcccugaugagcaucaucuccaccuuccaccugagcauccccaacuucaaccaguacgaggccauguccugcgacuucaacgggggcaagaucagcguccaguacaaccucucccacagcuacgccggggacgcggccaaccacugcggcaccaucgccaacggggugcugcagacguucaugcggauggccuggggcggcuccuacaucgcgcuggacagcgggugcgaccggugggacugcaucaugaccuccuaccaguaccucaucauccagaacaccaccugggaggaccacugccaguucagccgccccucccccaucggcuaccuggggcugcucagccagcggacgcgcgacaucuacaucagccggcgccugcugggcaccuucaccuggacccucuccgacagcgagggcaaggacacgcccgggggcuacugccugacccgguggaugcugaucgaggccgagcucaagugcuucgggaacaccgccguggccaagugcaacgagaagcacgacgaggaguucugcgacaugcugcgccuguucgacuucaacaagcaggccauccagcggcucaaggcgcccgcccagauguccauccagcugaucaacaaggccgucaacgcccugaucaacgaccagcucaucaugaagaaccaccuccgcgacaucaugugcauccccuacugcaacuacagcaaguacugguaccugaaccacaccacgaccgggaagaccucccugcccaagugcuggcuggugagcaacggcuccuaccugaacgagacccacuucagcgacgacaucgagcagcaggccgacaacaugaucacggagaugcuccagaaggaguacauggagcggcagggcaagaccccgcuggggcugguggaccucuucgucuucuccaccagcuucuaccugaucuccaucuuccugcaccuggugaagaucccgacccaccgccacguggucggcaagagcugccccaagccccaccggcucaaccacauggggaucugcuccugcggccuguacgggcagcccggcgugccggugaaguggaagcgcugaggacuaguuauaagacugacuagcccgaugggccucccaacgggcccuccuccccuccuugcaccgagauuaauaaaaaaaaaaaaaaaaaaaaaaaaaaaaaaaaaaaaaaaaaaaaaaaaaaaaaaaaaaaaaaaaaaaaaaaaaaaaaaaaaaaaaaaaaaaaaaaaaaaa

SEQ ID NO: 29632 - RNA, 1665 nt, Artificial Sequence
  mRNA product Design i-3 (A100) comprising derived and/or modified sequence from MOPV/LASV reassortant(IGS-1;Clade IV)__AFY05576__GPCmut5 (opt1)
aggagaaagcuuaccaugggccagaucgugaccuucuuccaggaggucccccacgugaucgaggaggugaugaacaucguccugaucgcccucagcgugcuggccgugcugaaggggcucuacaacuucgcgaccugcggccuggucgggcuggugacguuccuccugcugugcggccgcuccugcaccaccagccucuacaaggggguguacgagcugcagacccuggagcucaacauggagacgcugaacaugaccaugccgcuguccugcaccaagaacaacagccaccacuacaucauggucggcaacgagaccggccucgagcugacgcugaccaacaccuccaucaucaaccacaaguucugcaaccucagcgacgcccacaagaagaaccuguacgaccacgcccugauguccaucaucagcaccuuccaccucuccauccccaacuucaaccaguacgaggccaugagcugcgacuucaacgggggcaagaucuccgugcaguacaaccugagccacuccuacgccggggacgcggccaaccacugcggcacgguggccaacgggguccugcagaccuucaugcggauggccuggggcggcagcuacaucgcgcucgacuccgggugcggcaacugggacugcaucaugaccagcuaccaguaccugaucauccagaacaccacgugggaggaccacugccaguucucccggcccagccccaucggguaccugggccuccugucccagcgcacccgggacaucuacaucagccgccggcugcucggcaccuucaccuggacgcugagcgacuccgagggggaggacaccccgggcggguacugccugacccgcuggaugcucaucgaggccgagcugaagugcuucggcaacaccgccguggccaagugcaacgagaagcacgacgaggaguucugcgacaugcugcggcuguucgacuucaacaagcaggccauccagcgccugaaggcgcccgcccagaugagcauccagcugaucaacaaggccgugaacgcccucaucaacgaccagcugaucaugaagaaccaccuccgggacaucaugugcauccccuacugcaacuacuccaaguacugguaccucaaccacacgaccaccggccgcaccagccugcccaagugcuggcuggucuccaacggcagcuaccucaacgagacgcacuucuccgacgacaucgagcagcaggccgacaacaugaucaccgagaugcugcagaaggaguacauggagcggcaggggaagacgccccugggccucguggaccuguucguguucagcaccuccuucuaccugaucagcaucuuccugcaccucgucaagaucccgacccaccgccacaucguggggaaguccugccccaagccccaccggcugaaccacaugggcaucugcagcugcgggcuguacaagcagcccggcgugccggucaaguggaagcgcugaggacuaguuauaagacugacuagcccgaugggccucccaacgggcccuccuccccuccuugcaccgagauuaauaaaaaaaaaaaaaaaaaaaaaaaaaaaaaaaaaaaaaaaaaaaaaaaaaaaaaaaaaaaaaaaaaaaaaaaaaaaaaaaaaaaaaaaaaaaaaaaaaaaa

SEQ ID NO: 29633 - RNA, 1665 nt, Artificial Sequence
  mRNA product Design i-3 (A100) comprising derived and/or modified sequence from LASV(LM765-SLE-2012;Clade IV)__AIT17814__GPCmut5 (opt1)
aggagaaagcuuaccaugggccagaucgugaccuucuuccaggaggucccccacgugaucgaggaggugaugaacaucguccugaucgcccucagcauccuggccgugcugaaggggcucuacaacuucgcgaccugcggccugguggggcuggucacguuccuccugcugugcggccgcuccugcaccaccagccucuacaaggggguguacgagcugcagacccuggagcucaacauggagacgcugaacaugaccaugccgcuguccugcaccaagaacaacagccaccacuacaucauggugggcaacgagaccggccucgagcugacgcugaccaacaccuccaucaucgaccacaaguucugcaaccucagcgacgcccaccggaagaaccuguacgaccacgcccugauguccaucaucagcaccuuccaccucuccauccccaacuucaaccaguacgaggccaugagcugcgacuucaacgggggcaagaucuccguccaguacaaccugagccacuccuacgccaaggacgcggccgaccacugcgggacgguggccaacggcgugcugcagaccuucaugcgcauggccuggggcgggagcuacaucgcgcucgacuccggcugcgggcgcugggacugcaucaugaccagcuaccaguaccugaucauccagaacaccacgugggaggaccacugccaguucucccggcccagccccaucggcuaccuggggcuccugucccagcgcacccgggacaucuacaucagccgccggcugcucggcaccuucaccuggacgcugagcgacuccgagggcaaggacacccccgggggcuacugccugacccgcuggaugcucaucgaggccgagcugaagugcuucgggaacaccgccgucgccaagugcaacgagaagcacgacgaggaguucugcgacaugcugcggcuguucgacuucaacaagcaggccauccagcgccugaaggcgcccgcccagaugagcauccagcugaucaacaaggccgugaacgcccucaucaacgaccagcugaucaugaagaaccaccuccgggacaucaugugcauccccuacugcaacuacuccaaguacugguaccucaaccacacgaccaccgggaagaccagccugcccaagugcuggcugguguccaacggcagcuaccucaacgagacgcacuucuccgacgacaucgagcagcaggccgacaacaugaucaccgagaugcugcagaaggaguacauggagcgccagggcaagaccccgcuggggcucgucgaccuguucguguucagcaccuccuucuaccugaucagcaucuuccugcaccucgugaagaucccgacgcaccggcacaucgucggcaagcccugccccaagccccaccgccugaaccacauggggaucugcuccugcggccuguacaagcagccgggggugcccgugaaguggaagcggugaggacuaguuauaagacugacuagcccgaugggccucccaacgggcccuccuccccuccuugcaccgagauuaauaaaaaaaaaaaaaaaaaaaaaaaaaaaaaaaaaaaaaaaaaaaaaaaaaaaaaaaaaaaaaaaaaaaaaaaaaaaaaaaaaaaaaaaaaaaaaaaaaaaa

SEQ ID NO: 29634 - RNA, 1665 nt, Artificial Sequence
  mRNA product Design i-3 (A100) comprising derived and/or modified sequence from LASV(LM776-SLE-2012;Clade IV)__AIT17824__GPCmut5 (opt1)
aggagaaagcuuaccaugggccagaucgugaccuucuuccaggaggucccccacgugaucgaggaggugaugaacaucguccugaucgcccucagcauccuggccgugcugaaggggcucuacaacuucgcgaccugcggccugguggggcuggucacguuccuccugcugugcggccgcuccugcaccaccagcguguacaaggggguguacgagcuccagacccuggagcugaacauggagacgcucaacaugaccaugccgcuguccugcaccaagaacaacagccaccacuacaucauggucggcaacgagaccggccuggagcucacgcugaccaacaccuccaucaucaaccacaaguucugcaaccugagcgacgcccacaagaagaaccucuacgaccacgcccugauguccaucaucagcaccuuccaccuguccauccccaacuucaaccaguacgaggccaugagcugcgacuucaacgggggcaagaucuccgugcaguacaaccucagccacuccuacgccggggacgcggccaaccacugcggcacgguggccaacgggguccugcagaccuucaugcggauggccuggggcggcagcuacaucgcgcuggacuccgggugcggcaagugggacugcaucaugaccagcuaccaguaccucaucauccagaacaccacgugggaggaccacugccaguucucccgccccagccccaucggguaccugggccugcucucccagcggacccgcgacaucuacaucagccggcgccugcugggcaccuucaccuggacgcucagcgacuccgaggggaaggacaccccgggcggguacugccugacccgguggaugcugaucgaggccgagcucaagugcuucggcaacaccgccguggccaagugcaacgagaagcacgacgaggaguucugcgacaugcugcgccuguucgacuucaacaagcaggccauccagcggcucaaggcgcccgcccagaugagcauccagcugaucaacaaggccgugaacgcccugaucaacgaccagcucaucaugaagaaccaccuccgcgacaucaugugcauccccuacugcaacuacuccaaguacugguaccugaaccacacgaccaccggcaagaccagccugcccaagugcuggcuggucuccaacggcagcuaccugaacgagacgcacuucuccgacgacaucgagcagcaggccgacaacaugaucaccgagaugcuccagaaggaguacauggagcggcaggggaagacgccccugggccugguggaccucuucguguucagcaccuccuucuaccugaucagcaucuuccugcaccuggucaagaucccgacccaccgccacaucguggggaaguccugccccaagccccaccggcucaaccacaugggcaucugcagcugcgggcuguacaagcagcccggcgugccgguccgcuggaagcggugaggacuaguuauaagacugacuagcccgaugggccucccaacgggcccuccuccccuccuugcaccgagauuaauaaaaaaaaaaaaaaaaaaaaaaaaaaaaaaaaaaaaaaaaaaaaaaaaaaaaaaaaaaaaaaaaaaaaaaaaaaaaaaaaaaaaaaaaaaaaaaaaaaaa

SEQ ID NO: 29635 - RNA, 1665 nt, Artificial Sequence
  mRNA product Design i-3 (A100) comprising derived and/or modified sequence from LASV(Mad39;Clade IV)__ANH09722__GPCmut5 (opt1)
aggagaaagcuuaccaugggccagaucgugaccuucuuccaggaggucccccacgugaucgaggaggugaugaacaucguccugaucgcccucagcauccuggccgugcugaaggggcucuacaacguggcgaccugcggccugaucgggcuggucacguuccuccugcugugcggccgcuccugcaccaccacccucuacaaggggguguacgagcugcaggcccuggagcucaacauggagacgcugaacaugaccaugccgcugagcugcaccaagaacaacucccaccacuacauccgggugggcaacgagaccggccucgagcugacgcugaccaacaccagccucaucaaccacaaguucugcaaccuguccgacgcccacaagaagaaccuguacgaccacgcccucaugagcaucaucuccaccuuccaccugagcauccccaacuucaaccaguacgaggccauguccugcgacuucaacgacgggaagaucagcguccaguacaaccugucccacacguacgcgggcgacaccgccaaccacugcgggaccguggccaacggcgugcuccagaccuucaugcgcauggccuggggcgggagcuacaucgcgcuggacuccggcugcgggggcugggacugcaucaugacgagcuaccaguaccugaucauccagaacaccaccugggaggaccacugccaguucucccggcccagccccaucggguaccucggccugcugucccagcggacccgcgacaucuacaucagccggcgccuccugggcacguucaccuggacccuguccgacagcgaggggaaggacaccccgggcggguacugccucacgcgguggaugcugaucgaggccgagcugaagugcuucggcaacaccgccgucgccaagugcaacgagaagcacgacgaggaguucugcgacaugcuccgccuguucgacuucaacaagcaggccauccagcggcugaaggcgcccgcccagaugagcauccagcucaucaacaaggccgugaacgcccugaucaacgaccagcugaucaugaagaaccaccuccgcgacaucaugugcauccccuacugcaacuacuccaaguacugguaccugaaccacaccgugaccggcaagacgagccugcccaagugcuggcucgucuccaacggcagcuaccugaacgagacccacuucuccgacgacaucgagcagcaggccgacaacaugaucaccgagaugcugcagaaggaguacauggagcggcaggggaagacgccccucggccugguggaccuguucguguucagcaccuccuucuaccugaucagcaucuuccuccaccuggucaagaucccgacccaccgccacgugguggggaagcccugccccaagccccaccggcugaaccacaugggcaucugcuccugcggguucuacaagcagccgggcguccccgugcgcuggaagcggugaggacuaguuauaagacugacuagcccgaugggccucccaacgggcccuccuccccuccuugcaccgagauuaauaaaaaaaaaaaaaaaaaaaaaaaaaaaaaaaaaaaaaaaaaaaaaaaaaaaaaaaaaaaaaaaaaaaaaaaaaaaaaaaaaaaaaaaaaaaaaaaaaaaa

SEQ ID NO: 29636 - RNA, 1665 nt, Artificial Sequence
  mRNA product Design i-3 (A100) comprising derived and/or modified sequence from LASV(Z0947-SLE-2011;Clade IV)__AIT17840__GPCmut5 (opt1)
aggagaaagcuuaccaugggccagaucgugaccuucuuccaggaggucccccacgugaucgaggaggugaugaacaucguccugaucgcccucagcauccuggccgugcugaaggggcucuacaacuucgcgaccugcggccugguggggcuggucacguuccuccugcugugcggccgcuccugcaccaucagccucuacaaggggguguacgagcugcagacccuggagcucaacauggagacccugaacaugacgaugccgcuguccugcaccaagaacaacagccaccacuacaucauggugggcaacgagaccggccucgagcugacccugacgaacaccuccaucaucaaccacaaguucugcaaccucagcgacgcccacaagaagaaccuguacgaccacgcccugauguccaucaucagcaccuuccaccucuccauccccaacuucaaccaguacgaggccaugagcugcgacuucaacgggggcaagaucuccguccaguacaaccugagccacuccuacgccggggacgcggccaaccacugcggcaccguggccaacggggugcugcagacguucaugcggauggccuggggcggcagcuacaucgcgcucgacuccgggugcgaccggugggacugcaucaugaccagcuaccaguaccugaucauccagaacaccaccugggaggaccacugccaguucucccgccccagccccaucggcuaccuggggcuccugucccagcggacgcgcgacaucuacaucagccggcgccugcucggcaccuucaccuggacccugagcgacuccgagggcaaggacacgcccgggggcuacugccugacccgguggaugcucaucgaggccgagcugaagugcuucgggaacaccgccgucgccaagugcaacgagaagcacgacgaggaguucugcgacaugcugcgccucuucgacuucaacaagcaggccauccagcggcugaaggcgcccgcccagaugagcauccagcugaucaacaaggccgugaacgcccucaucaacgaccagcugaucaugaagaaccaccuccgcgacaucaugugcauccccuacugcaacuacuccaaguacugguaccugaaccacaccacgaccgggaagaccagccugcccaagugcuggcugguguccaacggcagcuaccucaacgagacccacuucuccgacgacaucgagcagcaggccgacaacaugaucacggagaugcugcagaaggaguacauggagcggcagggcaagaccccgcuggggcucgucgaccuguucguguucagcaccuccuucuaccugaucagcaucuuccugcaccucgugaagaucccgacccaccgccacaucgucggcaagcccugccccaagccccaccggcugaaccacauggggaucugcuccugcggccuguacaagcagccgggggugcccgugaaguggaagcgcugaggacuaguuauaagacugacuagcccgaugggccucccaacgggcccuccuccccuccuugcaccgagauuaauaaaaaaaaaaaaaaaaaaaaaaaaaaaaaaaaaaaaaaaaaaaaaaaaaaaaaaaaaaaaaaaaaaaaaaaaaaaaaaaaaaaaaaaaaaaaaaaaaaaa

SEQ ID NO: 29637 - RNA, 1665 nt, Artificial Sequence
  mRNA product Design i-3 (A100) comprising derived and/or modified sequence from LASV(Josiah;Clade IV)__NP_694870__GPCmut5 (opt1)
aggagaaagcuuaccaugggccagaucgugaccuucuuccaggaggucccccacgugaucgaggaggugaugaacaucguccugaucgcccucagcgugcuggccgugcugaaggggcucuacaacuucgcgaccugcggccuggucgggcuggugacguuccuccugcugugcggccgcuccugcaccaccagccucuacaaggggguguacgagcugcagacccuggagcucaacauggagacgcugaacaugaccaugccgcuguccugcaccaagaacaacagccaccacuacaucauggucggcaacgagaccggccucgagcugacgcugaccaacaccuccaucaucaaccacaaguucugcaaccucagcgacgcccacaagaagaaccuguacgaccacgcccugauguccaucaucagcaccuuccaccucuccauccccaacuucaaccaguacgaggccaugagcugcgacuucaacgggggcaagaucuccgugcaguacaaccugagccacuccuacgccggggacgcggccaaccacugcggcacgguggccaacgggguccugcagaccuucaugcggauggccuggggcggcagcuacaucgcgcucgacuccgggugcggcaacugggacugcaucaugaccagcuaccaguaccugaucauccagaacaccacgugggaggaccacugccaguucucccgccccagccccaucggguaccugggccuccugucccagcggacccgcgacaucuacaucagccggcgccugcucggcaccuucaccuggacgcugagcgacuccgaggggaaggacaccccgggcggguacugccugacccgguggaugcucaucgaggccgagcugaagugcuucggcaacaccgccguggccaagugcaacgagaagcacgacgaggaguucugcgacaugcugcgccucuucgacuucaacaagcaggccauccagcggcugaaggcgcccgcccagaugagcauccagcugaucaacaaggccgugaacgcccucaucaacgaccagcugaucaugaagaaccaccuccgcgacaucaugugcauccccuacugcaacuacuccaaguacugguaccugaaccacacgaccaccgggcggaccagccugcccaagugcuggcuggucuccaacggcagcuaccucaacgagacgcacuucuccgacgacaucgagcagcaggccgacaacaugaucaccgagaugcugcagaaggaguacauggagcgccagggcaagaccccgcuggggcugguggaccucuucguguucagcaccuccuucuaccugaucagcaucuuccugcaccucgucaagauccccacgcaccggcacaucgugggcaaguccugccccaagccccaccgccugaaccacauggggaucugcagcugcggccuguacaagcagccgggggugcccgucaaguggaagcggugaggacuaguuauaagacugacuagcccgaugggccucccaacgggcccuccuccccuccuugcaccgagauuaauaaaaaaaaaaaaaaaaaaaaaaaaaaaaaaaaaaaaaaaaaaaaaaaaaaaaaaaaaaaaaaaaaaaaaaaaaaaaaaaaaaaaaaaaaaaaaaaaaaaa

SEQ ID NO: 29638 - RNA, 1662 nt, Artificial Sequence
  mRNA product Design i-3 (A100) comprising derived and/or modified sequence from LASV(LP;Clade I)__AAF86701__GPCmut5 (opt1)
aggagaaagcuuaccaugggccagaucaucaccuucuuccaggaggugccccacgucaucgaggaggugaugaacaucgugcugaucgcccucagccugcuggccauccucaaggggcuguacaacaucgcgaccugcggcaucaucgggcuggucgccuuccucuuccugugcggcaaguccugcagccugacgcucaagggcggguacgagcugcagacccuggagcucaacauggagacccugaacaugaccaugccgcuguccugcacgaagaacagcucccaccacuacauccgcgugggcaacgagaccgggcucgagcugacccugaccaacacgagcaucaucaaccacaaguucugcaaccucuccgacgcccacaagaagaaccuguacgaccacgcccugaugagcaucaucuccaccuuccaccucagcauccccaacuucaaccaguacgaggccauguccugcgacuucaacggcgggaagaucagcgugcaguacaaccugucccacagcuacgcgggcgacgccgccgagcacugcgggaccgucgccaacggcgugcugcagaccuucaugcggauggcguggggcgggcgcuacaucgcccucgacuccggcugcgggaacugggacugcaucaugacgagcuaccaguaccugaucauccagaacaccaccugggaggaccacugccaguucucccggcccagccccaucggcuaccugggccuccugucccagcgcacccgggacaucuacaucagccgccggcugcucgggacguucaccuggacccugagcgacuccgagggcaacgagacccccgggggcuacugccugacgcgcuggaugcucaucgaggccgagcugaagugcuucgggaacaccgccguggccaagugcaacgagaagcacgacgaggaguucugcgacaugcugcggcuguucgacuucaacaagcaggcgauccgccggcugaaggccccggcccagaugagcauccagcugaucaacaaggccgucaacgcccucaucaacgaccagcugaucaugaagaaccaccuccgcgacaucaugugcauccccuacugcaacuacuccaaguacugguaccucaaccacaccagcuccggccggaccagccugcccaagugcuggcugaucuccaacggcagcuaccucaacgagacgcaguucuccgacgacaucgagcagcaggcggacaacaugaucaccgagaugcugcagaaggaguacaucgagcgccaggggaagaccccgcugggccugguggacaucuucaucuucagcaccuccuucuaccucaucagcaucuuccugcaccugaucaagauccccacgcaccggcacaucguggggaagcccugccccaagccgcaccgccucaaccacaugggcgucugcuccugcgggcuguacaagcaccccggcgugcccaccaaguggaagcggugaggacuaguuauaagacugacuagcccgaugggccucccaacgggcccuccuccccuccuugcaccgagauuaauaaaaaaaaaaaaaaaaaaaaaaaaaaaaaaaaaaaaaaaaaaaaaaaaaaaaaaaaaaaaaaaaaaaaaaaaaaaaaaaaaaaaaaaaaaaaaaaaaaaa

SEQ ID NO: 29639 - RNA, 1662 nt, Artificial Sequence
  mRNA product Design i-3 (A100) comprising derived and/or modified sequence from LASV(803213;Clade II)__AAF86703__GPCmut5 (opt1)
aggagaaagcuuaccaugggccagaucaucaccuucuuccaggaggugccccacgucaucgaggaggugaugaacaucgugcugaucgcccucagccugcuggccauccucaaggggaucuacaacgucgcgaccugcggccuguucgggcugaucuccuuccuccugcugugcggccgcagcugcuccgugacguacaaggggguguacgagcuccagacccuggagcugaacauggccaaccucaacaugaccaugccgcugagcugcaccaagaacaacucccaccacuacaucauggucggcaacgagacgggccuggagcucacccugaccaacaccagcaucaucaaccacaaguucugcaaccuguccgacgcccacaagaagaaccucuacgaccacgcccugaugagcaucaucuccacguuccaccugagcauccccaacuucaaccaguacgaggccauguccugcgacuucaacgggggcaagaucagcgugcaguacaaccucucccacagcuucgcgguggacgccgccaaccacugcgggaccaucgccaacggcguccugcagaccuucaugcggauggcguggggcggguccuacaucgcccuggacagcggcugcgggaacugggacugcaucaugaccuccuaccaguaccucaucauccagaacacgaccugggaggaccacugccaguucagccgccccucccccaucggcuaccuggggcugcucagccagcggacccgcgacaucuacaucagccggcgccugcugggcaccuucacguggacccucuccgacagcgagggcaacgaggcccccgggggcuacugccugacccgguggaugcugaucgaggccgagcucaagugcuucgggaacaccgccguggcgaagugcaacgagaagcacgacgaggaguucugcgacaugcugcgccuguucgacuucaacaagcaggccaucaagcggcucaagacgccggcccagauguccauccagcugaucaacaaggccgugaacgcccugaucaacgaccagcucaucaugaagaaccaccuccgcgacaucaugugcauccccuacugcaacuacagccgguacugguaccugaaccacaccgucaccggcaagaccucccugccccgcugcuggcuggugagcaacggguccuaccugaacgagacgcacuucagcgacgacaucgagcagcaggcggacaacaugaucaccgagaugcuccagaaggaguacauggaccggcagggcaagaccccgcugggccugguggaccuguucgucuucuccaccagcuucuaccucaucuccaucuuccugcaccuggugaagauccccacgcaccgccacaucguggggaagcccugccccaagccgcaccggcucaaccacaugggcaucugcagcugcgggcuguacaagcaccccggcguccccgugaaguggaagcgcugaggacuaguuauaagacugacuagcccgaugggccucccaacgggcccuccuccccuccuugcaccgagauuaauaaaaaaaaaaaaaaaaaaaaaaaaaaaaaaaaaaaaaaaaaaaaaaaaaaaaaaaaaaaaaaaaaaaaaaaaaaaaaaaaaaaaaaaaaaaaaaaaaaaa

SEQ ID NO: 29640 - RNA, 1662 nt, Artificial Sequence
  mRNA product Design i-3 (A100) comprising derived and/or modified sequence from LASV(GA391;Clade III)__CAA36645__GPCmut5 (opt1)
aggagaaagcuuaccaugggccagaucgugaccuucuuccaggaggucccccacgugaucgaggaggugaugaacaucguccugaucgcccucagcauccuggccauccugaaggggcucuacaacguggcgaccugcggccugaucgggcuggugacguuccuccugcuguccggccgcagcugcucccucaucuacaaggggaccuacgagcugcagacccuggagcucaacauggagacccugaacaugacgaugccgcugagcugcaccaagaacaacucccaccacuacauccgggucggcaacgagaccggccucgagcugacccugacgaacaccagcauccucaaccacaaguucugcaaccuguccgacgcccacaagcgcaaccuguacgaccacagccucauguccaucaucagcaccuuccaccuguccauccccaacuucaaccaguacgaggccaugagcugcgacuucaacgggggcaagaucaccgugcaguacaaccugucccacagcuucgccguggacgccgcggggcacugcggcacgcucgccaacgggguccugcagaccuucaugcggauggccuggggcggcuccuacaucgcccuggacagcgggugcggcaacugggacugcaucaugaccuccuaccaguaccucaucauccagaacaccacgugggacgaccacugccaguucagccgccccucccccaucggguaccugggccugcucagccagcggacccgcgacaucuacaucagccggcgccugcugggcaccuucaccuggacgcucuccgacagcgaggggaacgagaccccgggcggguacugccugacccgguggaugcugaucgaggcggagcucaagugcuucggcaacaccgccguggccaagugcaacgagaagcacgacgaggaguucugcgacaugcugcgccuguucgacuucaacaagcaggccauccggcgccucaagacgcccgcccagauguccauccagcugaucaacaaggcggugaacgcccugaucaacgaccagcucaucaugaagaaccaccuccgggacaucaugugcauccccuacugcaacuacagccgcuacugguaccugaaccacaccuccaccgggaagaccagccugccccggugcuggcugaucuccaacggcagcuaccugaacgagacgaaguucuccgacgacaucgagcagcaggccgacaacaugaucaccgagaugcugcagaaggaguacaucgaccgccagggcaagaccccgcucgggcuggucgaccuguucguguucagcaccuccuucuaccucaucagcaucuuccugcaccuggugaagauccccacgcaccggcacaucgucggcaagcccugccccaagccgcaccgccucaaccacauggggaucugcuccugcggccuguacaagcagcccggggugcccgugcgguggaagcgcugaggacuaguuauaagacugacuagcccgaugggccucccaacgggcccuccuccccuccuugcaccgagauuaauaaaaaaaaaaaaaaaaaaaaaaaaaaaaaaaaaaaaaaaaaaaaaaaaaaaaaaaaaaaaaaaaaaaaaaaaaaaaaaaaaaaaaaaaaaaaaaaaaaaa

SEQ ID NO: 29641 - RNA, 1665 nt, Artificial Sequence
  mRNA product Design i-3 (A100) comprising derived and/or modified sequence from LASV(AV;Clade V)__CCA30314__GPCmut5 (opt1)
aggagaaagcuuaccaugggccagaucgugaccuucuuccaggaggucccccacgugaucgaggaggugaugaacaucguccugaucgcccucagcauccuggccgugcugaaggggcucuacaacaucgcgaccugcggccugaucgggcugaucacguuccuccugcugugcggccgcuccugcagcuccaaccucuacaaggggguguacgagcugcagagccuggaccucaacauggagacccugaacaugaccaugccgcuguccugcaccaagaacaacagccaccacuacauccgggucggcaacgacacgggccucgagcugacccugaccaacaccuccauccucaaccacaaguucugcaaccugagcgacgcccacaagaaggaccuguacgaccacgcccucauguccaucaucagcacguuccaccuguccauccccaacuucaaccaguacgaggccaugagcugcgacuucaacgggggcaagaucuccgugcaguacaaccugagccacuccuacgccaucgacgcggccaaccacugcgggaccguggccaacggcauccuccagaccuucaugcgcauggccuggggcgggagcuacaucgcgcuggacuccggcugcgggaacugggacugcaucaugaccagcuaccaguaccugaucauccagaacacgaccugggagaaccacugccaguucucccggcccagccccaucggcuaccucgggcugcugagccagcgcacccgggacaucuacaucucccgccggcuccugggcaccuucacguggacccugagcgacuccgagggcaacgccacccccgggggcuacugccucacccgcuggaugcugaucgaggccgagcugaagugcuucgggaacacggccgucgccaagugcaacgagaagcacgacgaggaguucugcgacaugcuccggcuguucgacuucaacaagcaggcgaucagccgccugaaguccccggcccagaugagcauccagcucaucaacaaggccgugaacgcccugaucaacgaccagcugaucaugaagaaccaccuccgggacaucaugugcauccccuacugcaacuacuccaaguacugguaccugaaccacaccaucaccggcaagaccagccugcccaagugcuggcucguguccaacgggagcuaccugaacgagacgcacuucuccgacgacaucgagcagcaggccgacaacaugaucaccgagaugcugcagaaggaguacauggagcgccagggcaagaccccgcugggccucgucgaccuguucguguucagcaccuccuucuaccugaucagcaucuuccuccggcuggugaagauccccacgcaccgccacaucgucgggaagcccugccccaagccgcaccggcugaaccacaugggcaucugcuccugcgggcucuacaagcagcccggcgugcccgugcgcuggaagcggugaggacuaguuauaagacugacuagcccgaugggccucccaacgggcccuccuccccuccuugcaccgagauuaauaaaaaaaaaaaaaaaaaaaaaaaaaaaaaaaaaaaaaaaaaaaaaaaaaaaaaaaaaaaaaaaaaaaaaaaaaaaaaaaaaaaaaaaaaaaaaaaaaaaa

SEQ ID NO: 29642 - RNA, 1662 nt, Artificial Sequence
  mRNA product Design i-3 (A100) comprising derived and/or modified sequence from LASV(Togo/2016/7082;Clade VI)__AMR44577__GPCmut5 (opt1)
aggagaaagcuuaccaugggccagaucaucaccuucuuccaggaggugccccacgucaucgaggaggugaugaacaucgugcugaucgcccucagccugcuggccauccucaagggggucuacaacguggcgaccugcggcaucaucgggcuggugacguuccuguuccucugcggccgcuccugcagccugaucuacaagggguccuacgagcugcagacccucgagcugaacauggagacccugaacaugaccaugccgcucagcugcacgaagaacuccagccaccacuacauccgggucggcaacgagaccggccuggagcugacccucaccaacacguccaucaucaaccacaaguucugcaaccugagcgacgcccacaagcgcaaccuguacgaccacgcccucauguccauccugagcaccuuccaccuguccauccccaacuucaaccaguacgaggccaugagcugcgacuucaacgggggcaagaucuccgugcaguacaaccucagccacgccuacgcgguggacgccgccgagcacugcgggaccgucgccaacggcgugcugcagaccuucaugcggauggcguggggcggguccuacaucgcccuggacagcggcugcgggaacugggacugcaucaugacguccuaccaguaccucaucauccagaacaccaccugggaggaccacugccaguucagccgccccucccccaucggcuaccuggggcugcucagccagcggacccgcgacaucuacaucagccggcgccugcugggcacguucaccuggacccucuccgacagcgagggcaacgagacccccgggggcuacugccugacgcgguggaugcugaucgaggccgagcucaagugcuucgggaacaccgccguggccaagugcaacgagaagcacgacgaggaguucugcgacaugcugcgccuguucgacuucaacaagcaggcgauccagcggcucaaguccccggcccagaugagcauccagcugaucaacaaggccgucaacgcccugaucaacgaccagcucaucaugaagaaccaccuccgcgacaugaugugcauccccuacugcaacuacuccaaguacugguaccugaaccacaccagcuccggccggaccagccugcccaagugcuggcugguguccaacgggagcuaccugaacgagacgcacuucuccgacgacaucgagcagcaggccgacaacaugaucaccgagaugcuccagaaggaguacaucgaccgccagggcaagaccccgcugggccugguggaccuguucgucuucagcaccuccuucuaccucaucagcaucuuccugcaccugaucaagauccccacgcaccggcacaucguggggaagcccugccccaagccgcaccgccucaaccacaugggcaucugcuccugcgggcuguacaagcagcccggcgugcccacccgguggaagcgcugaggacuaguuauaagacugacuagcccgaugggccucccaacgggcccuccuccccuccuugcaccgagauuaauaaaaaaaaaaaaaaaaaaaaaaaaaaaaaaaaaaaaaaaaaaaaaaaaaaaaaaaaaaaaaaaaaaaaaaaaaaaaaaaaaaaaaaaaaaaaaaaaaaaa

SEQ ID NO: 29643 - RNA, 1662 nt, Artificial Sequence
  mRNA product Design i-3 (A100) comprising derived and/or modified sequence from LASV(KAK-428;Clade n.d. (VII))__ANH09740__GPCmut5 (opt1)
aggagaaagcuuaccaugggccagaucgugaccuucuuccaggaggucccccacgugaucgaggaggugaugaacaucguccugaucgcccucagccugcuggccauccucaaggggcuguacaacuucgcgaccugcggcgugaucgggcugaucacguuccuccugcugugcggccgcuccugcagcgccaccuacaaggggcaguacgagcuccagacccuggagcugaacauggagucccucaacaugaccaugccgcugagcugcacgaagaacaacucccaccacuacauccgggccggcaacaacaccggccuggagcucacccugaccaacacgagcaucaucucccacaaguucugcaaccugagcgacgcccacaagaagaaccucuacgaccacacccugauguccaucaucaccaccuuccaccugagcauccccaacuucaaccaguacgaggccauguccugcgacuucaacgggggcaagaucagcauccaguacaaccucucccacagcuacgcgggggacgccgcccagcacugcggcacgguggccaacgggguccugcagaccuucaugcgcauggcguggggcggcuccuaccuggcccucgacagcgggugccggggcugggacugcaucaucuccagcuaccaguaccugaucauccagaacaccaccugggacgaccacugccaguucucccgccccagccccaucggguaccugggcuucgugagccagaagacgcgggacaucuacaucucccgccggcuccugggcaccuucaccuggacccugagcgacuccgaggggcacgacaugccgggcggguacugccucacgcgcuggaugcugaucgaggccgaccugaagugcuucggcaacaccgccguggccaagugcaacgagaagcacgacgaggaguucugcgacauguggcggcuguucgacuucaacaagcaggcgauccagcgccugaaggcccccgcccagaugaacauccagcugaucaacaaggccgucaacgcccucaucaacgaccagcugaugaugaagaaccaccuccgggacaucaugugcauccccuacugcaacuacagcaaguucugguaccucaacaacaccaccacggggcgcaccucccugccccggugcuggcugaucagcaacggcuccuaccucaacgagacccacuucagcgacgacaucgagcagcaggcggacaacaugaucaccgagaugcugcagaaggaguacauggaccgccagggcaagacgccgcuggggcucguggaccuguucguguucuccaccagcuucuaccugaucaccaucuuccugcaccucgucaagauccccacccaccggcacaucgugggcaagcccugccccaagccgcaccgccugaaccacauggggaucugcuccugcggccuguacaagcagcccggggugcccguccgguggaagcgcugaggacuaguuauaagacugacuagcccgaugggccucccaacgggcccuccuccccuccuugcaccgagauuaauaaaaaaaaaaaaaaaaaaaaaaaaaaaaaaaaaaaaaaaaaaaaaaaaaaaaaaaaaaaaaaaaaaaaaaaaaaaaaaaaaaaaaaaaaaaaaaaaaaaa

SEQ ID NO: 29644 - RNA, 1662 nt, Artificial Sequence; identical to SEQ ID NO: 29638
  mRNA product Design i-3 (A100) comprising derived and/or modified sequence from LASV(Pinneo-NIG-1969;Clade I)__AIT17836__GPCmut5 (opt1)

SEQ ID NO: 29645 - RNA, 1662 nt, Artificial Sequence
  mRNA product Design i-3 (A100) comprising derived and/or modified sequence from LASV(ISTH0009-NIG-2011;Clade II)__AIT17404__GPCmut5 (opt1)
aggagaaagcuuaccaugggccagaucaucaccuucuuccaggaggugccccacgucaucgaggaggugaugaacaucgugcugaucgcccucagccugcuggccauccucaaggggaucuacaacgucgcgaccugcggccuguucgggcugguguccuuccuccugcugugcggccgcagcugcuccacgaccuacaaggggguguacgagcuccagacccuggagcuggacauggccagccucaacaugaccaugccgcuguccugcacgaagaacaacagccaccacuacaucauggucggcaacgagaccggccuggagcucacccugaccaacacguccaucaucaaccacaaguucugcaaccugagcgacgcccacaagaagaaccucuacgaccacgcccugauguccaucaucagcaccuuccaccuguccauccccaacuucaaccaguacgaggccaugagcugcgacuucaacgggggcaagaucuccgugcaguacaaccucagccacgcguacgccguggacgccgccaaccacugcgggaccaucgcgaacggcguccugcagaccuucaugcggauggccuggggcggguccuacaucgcccuggacagcggcugcggguccugggacugcaucaugacgagcuaccaguaccucaucauccagaacaccaccugggaggaccacugccaguucucccgccccagccccaucggcuaccuggggcugcucagccagcggacccgcgacaucuacaucucccggcgccugcugggcacguucaccuggacccucagcgacuccgagggcaacgagacccccgggggcuacugccugacgcgguggaugcugaucgaggccgagcucaagugcuucgggaacaccgccguggcgaagugcaacgagaagcacgacgaggaguucugcgacaugcugcgccuguucgacuucaacaagcaggccauccggcgccucaagaccccggcccagaugagcauccagcugaucaacaaggccgugaacgcccugaucaacgaccagcucaucaugaagaaccaccuccgggacaucaugugcauccccuacugcaacuacuccaaguacugguaccugaaccacaccgucacgggcaagaccagccugccccgcugcuggcugguguccaacgggagcuaccugaacgagacccacuucuccgacgacaucgagcagcaggcggacaacaugaucaccgagcuccugcagaaggaguacauggaccggcagggcaagacgccgcugggccugguggaccucuucgucuucagcaccuccuucuaccugaucagcaucuuccugcaccucaucaagauccccacccaccgccacaucaccgggaagcccugccccaagccgcaccggcugaaccacaugggcaucugcuccugcgggcuguacaagcaccccggcgugcccgugaaguggaagcgcugaggacuaguuauaagacugacuagcccgaugggccucccaacgggcccuccuccccuccuugcaccgagauuaauaaaaaaaaaaaaaaaaaaaaaaaaaaaaaaaaaaaaaaaaaaaaaaaaaaaaaaaaaaaaaaaaaaaaaaaaaaaaaaaaaaaaaaaaaaaaaaaaaaaa

SEQ ID NO: 29646 - RNA, 1662 nt, Artificial Sequence
  mRNA product Design i-3 (A100) comprising derived and/or modified sequence from LASV(ISTH2010-NIG-2012;Clade II)__AIT17482__GPCmut5 (opt1)
aggagaaagcuuaccaugggccagaucaucaccuucuuccaggaggugccccacgucaucgaggaggugaugaacaucgugcugaucgcccucagccugcuggccauccucaaggggaucuacaacgucgcgaccugcggccuguucgggcugguguccuuccuccugcugugcggccgcagcugcuccacgaccuacaaggggguguacgagcuccagacccuggagcuggacauggccagccucaacaugaccaugccgcuguccugcacgaagaacaacagccaccacuacaucauggucggcaacgagaccggccuggagcucacccugaccaacacguccaucaucaaccacaaguucugcaaccugagcgacgcccacaagaagaaccucuacgaccacgcccugauguccaucaucagcaccuuccaccuguccauccccaacuucaaccaguacgaggccaugagcugcgacuucaacgggggcaagaucuccgugcaguacaaccucagccacgcguacgccguggacgccgccaaccacugcgggaccaucgcgaacggcguccugcagaccuucaugcggauggccuggggcggguccuacaucgcccuggacagcggcugcggguccugggacugcaucaugacgagcuaccaguaccucaucauccagaacaucaccugggaggaccacugccaguucucccgccccagccccaucggcuaccuggggcugcucagccagcggacccgcgacaucuacaucucccggcgccugcugggcaccuucacguggacccucagcgacuccgagggcaacgagacccccgggggcuacugccugacccgguggaugcugaucgaggccgagcucaagugcuucgggaacacggccguggcgaagugcaacgagaagcacgacgaggaguucugcgacaugcugcgccuguucgacuucaacaagcaggccauccggcgccucaagaccccggcccagaugagcauccagcugaucaacaaggccgugaacgcccugaucaacgaccagcucaucaugaagaaccaccuccgggacaucaugugcauccccuacugcaacuacuccaaguacugguaccugaaccacaccgucaccggcaagacgagccugccccgcugcuggcugguguccaacgggagcuaccugaacgagacccacuucuccgacgacaucgagcagcaggcggacaacaugaucaccgagcuccugcagaaggaguacaucgaccggcagggcaagaccccgcugggccugguggaccucuucgucuucagcacguccuucuaccugaucagcaucuuccugcaccucgugaagauccccacccaccgccacguggucgggaagcccugccccaagccgcaccggcugaaccacaugggcaucugcuccugcgggcuguacaagcaccccggcgugcccgugaaguggaagcgcugaggacuaguuauaagacugacuagcccgaugggccucccaacgggcccuccuccccuccuugcaccgagauuaauaaaaaaaaaaaaaaaaaaaaaaaaaaaaaaaaaaaaaaaaaaaaaaaaaaaaaaaaaaaaaaaaaaaaaaaaaaaaaaaaaaaaaaaaaaaaaaaaaaaa

SEQ ID NO: 29647 - RNA, 1662 nt, Artificial Sequence
  mRNA product Design i-3 (A100) comprising derived and/or modified sequence from LASV(Lassa virus/H.sapiens-wt/NGA/2015/ISTH_0543;Clade II)__AVO03639__GPCmut5 (opt1)
aggagaaagcuuaccaugggccagaucaucaccuucuuccaggaggugccccacgucaucgaggaggugaugaacaucgugcugaucgcccucagccugcuggccauccucaaggggaucuacaacgucgcgaccugcggccuguucgggcugguguccuuccuccugcugugcggccgcagcugcuccacgaccuacaaggggguguacgagcuccagacccuggagcuggacauggccaaccucaacaugaccaugccgcugagcugcacgaagaacaacucccaccacuacaucauggucggcaacgagaccggccuggagcucacccugaccaacacgagcaucaucaaccacaaguucugcaaccuguccgacgcccacaagaagaaccucuacgaccacgcccugaugagcaucaucuccaccuuccaccugagcauccccaacuucaaccaguacgaggccauguccugcgacuucaacgggggcaagaucagcgugcaguacaaccucucccacaccuacgcgguggacgccgccaaccacugcgggaccaucgccaacggcguccugcagacguucaugcggauggcguggggcgggagcuacaucgcccuggacuccggcugcgggagcugggacugcaucaugaccuccuaccaguaccucgugauccagaacaccaccugggaggaccacugccaguucagccgccccucccccaucggcuaccuggggcugcucagccagcggacgcgcgacaucuacaucagccggcgccugcugggcaccuucaccuggacccucuccgacagcgagggcaacgagacgcccgggggcuacugccugacccgguggaugcugaucgaggccgagcucaagugcuucgggaacaccgccguggccaagugcaacgagaagcacgacgaggaguucugcgacaugcugcgccuguucgacuucaacaagcaggcgauccggcgccucaagaccccggcccagauguccauccagcugaucaacaaggccgucaacgcccugaucaacgaccagcucaucaugaagaaccaccuccgggacaucaugugcauccccuacugcaacuacagcaaguacugguaccugaaccacacggugaccggcaagaccucccugccccgcugcuggcuggugagcaacggguccuaccugaacgagacccacuucagcgacgacaucgagcagcaggccgacaacaugaucacggagcuccugcagaaggaguacaucgaccggcagggcaagaccccgcugggccuggucgaccucuucguguucuccaccagcuucuaccugaucuccaucuuccugcaccucgugaagauccccacccaccgccacaucacggggaagcccugccccaagccgcaccggcugaaccacaugggcaucugcagcugcgggcuguacaagcaccccggcguccccgugaaguggaagcgcugaggacuaguuauaagacugacuagcccgaugggccucccaacgggcccuccuccccuccuugcaccgagauuaauaaaaaaaaaaaaaaaaaaaaaaaaaaaaaaaaaaaaaaaaaaaaaaaaaaaaaaaaaaaaaaaaaaaaaaaaaaaaaaaaaaaaaaaaaaaaaaaaaaaa

SEQ ID NO: 29648 - RNA, 1662 nt, Artificial Sequence
  mRNA product Design i-3 (A100) comprising derived and/or modified sequence from LASV(Lassa virus/H.sapiens-wt/NGA/2016/ISTH_0009;Clade II)__AVO03571__GPCmut5 (opt1)
aggagaaagcuuaccaugggccagaucaucaccuucuuccaggaggugccccacgucaucgaggaggugaugaacaucgugcugaucgcccucagccugcuggccauccucaaggggaucuacaacgucgcgaccugcggccugcuggggcucguguccuuccugcugcucugcggccgcagcugcuccacgaccuacaaggggguguacgagcugcagacccuggagcucgacauggccagccugaacaugaccaugccgcuguccugcacgaagaacaacagccaccacuacaucauggucggcaacgagaccggccucgagcugacccugaccaacacguccaucaucaaccacaaguucugcaaccucagcgacgcccacaagaagaaccuguacgaccacgcccugauguccaucaucagcaccuuccaccucuccauccccaacuucaaccaguacgaggccaugagcugcgacuucaacgggggccggaucuccgugcaguacaaccugagccacuccuacgcgguggacgccgccaaccacugcgggaccaucgccaacggcguccugcagaccuucaugcgcauggcguggggcgggagcuacaucgcccucgacuccggcugcgggagcugggacugcaucaugacguccuaccaguaccugaucauccagaacaccaccugggaggaccacugccaguucagccggcccagccccaucggcuaccuggggcuccugucccagcgcacccgggacaucuacaucagccgccggcugcucggcacguucaccuggacccuguccgacagcgagggcaacgagacccccgggggcuacugccugacgcgcuggaugcucaucgaggccgagcugaagugcuucgggaacaccgccguggccaagugcaacgagaagcacgacgaggaguucugcgacaugcugcggcuguucgacuucaacaagcaggcgauccgccggcugaagaccccggcccagauguccauccagcugaucaacaaggccgugaacgcccucaucaacgaccagcugaucaugaagaaccaccuccgcgacaucaugugcauccccuacugcaacuacagcaaguacugguaccucaaccacaccgucacgggcaagaccucccugccccggugcuggcuggugagcaacggguccuaccucaacgagacccacuucagcgacgacaucgagcagcaggccgacaacaugaucaccgagcugcugcagaaggaguacaucgaccgccagggcaagacgccgcugggccucguggaccuguucgucuucuccaccagcuucuaccugaucuccaucuuccuccaccuggugaagauccccacccaccggcacaucaccgggaagcccugccccaagccgcaccgccugaaccacaugggcaucugcagcugcgggcucuacaaccaccccggcgugcccgucaaguggaagcggugaggacuaguuauaagacugacuagcccgaugggccucccaacgggcccuccuccccuccuugcaccgagauuaauaaaaaaaaaaaaaaaaaaaaaaaaaaaaaaaaaaaaaaaaaaaaaaaaaaaaaaaaaaaaaaaaaaaaaaaaaaaaaaaaaaaaaaaaaaaaaaaaaaaa

SEQ ID NO: 29649 - RNA, 1662 nt, Artificial Sequence
  mRNA product Design i-3 (A100) comprising derived and/or modified sequence from LASV(Lassa virus/H.sapiens-wt/NGA/2016/ISTH_0017;Clade II)__AVO03567__GPCmut5 (opt1)
aggagaaagcuuaccaugggccagaucaucaccuucuuccaggaggugccccacgucaucgaggaggugaugaacaucgugcugaucgcccucagccugcuggccauccucaaggggaucuacaacgucgcgaccugcggccuguucgggcugguguccuuccuccugcugugcggccgcagcugcuccacgaccuacaaggggguguacgagcuccagacccuggagcuggacauggccagccucaacaugaccaugccgcuguccugcacgaagaacaacagccaccacuacaucauggucggcaacgagaccggccuggagcucacccugaccaacacguccaucaucaaccacaaguucugcaaccugagcgacgcccacaagaagaaccucuacgaccacgcccugauguccaucaucagcaccuuccaccuguccauccccaacuucaaccaguacgaggccaugagcugcgacuucaacgggggcaagaucuccgugcaguacaaccucagccacaccuacgcgaucgacgccgccaaccacugcgggaccaucgccaacggcgugcugcagacguucaugcggauggcguggggcggguccuacaucgcccuggacagcggcugcggguccugggacugcaucaugaccagcuaccaguaccucaucauccagaacaccaccugggaggaccacugccaguucucccgccccagccccaucggcuaccuggggcugcucagccagcggacgcgcgacaucuacaucucccggcgccugcugggcaccuucaccuggacccucagcgacuccgagggcaacgagacgcccgggggcuacugccugacccgguggaugcugaucgaggccgagcucaagugcuucgggaacaccgccgucgccaagugcaacgagaagcacgacgaggaguucugcgacaugcugcgccuguucgacuucaacaagcaggcgauccggcgccucaagaccccggcccagaugagcauccagcugaucaacaaggccgugaacgcccugaucaacgaccagcucaucaugaagaaccaccuccgggacaucaugugcauccccuacugcaacuacuccaaguacugguaccugaaccacacggugaccggcaagaccagccugccccgcugcuggcuggucuccaacgggagcuaccugaacgagacccacuucuccgacgacaucgagcagcaggccgacaacaugaucacggagcuccugcagaaggaguacauggaccggcagggcaagaccccgcugggccugguggaccucuucguguucagcaccuccuucuaccugaucagcaucuuccugcaccucguccgcauccccacccaccggcacgugaucgggaagcccugccccaagccgcaccgccugaaccacaugggcaucugcuccugcgggcuguacaagcaccccggcgugcccgucaaguggaagcggugaggacuaguuauaagacugacuagcccgaugggccucccaacgggcccuccuccccuccuugcaccgagauuaauaaaaaaaaaaaaaaaaaaaaaaaaaaaaaaaaaaaaaaaaaaaaaaaaaaaaaaaaaaaaaaaaaaaaaaaaaaaaaaaaaaaaaaaaaaaaaaaaaaaa

SEQ ID NO: 29650 - RNA, 1662 nt, Artificial Sequence
  mRNA product Design i-3 (A100) comprising derived and/or modified sequence from LASV(Lassa virus/H.sapiens-wt/NGA/2018/ISTH_0959;Clade II)__AVV65099__GPCmut5 (opt1)
aggagaaagcuuaccaugggccagaucaucaccuucuuccaggaggugccccacgucaucgaggaggugaugaacaucgugcugaucgcccucagccugcuggccauccucaaggggaucuacaacgucgugaccugcggccuguucgggcugguguccuuccuccugcugugcggccgcagcugcuccacgaccuacaagggggucuacgagcuccagacccuggagcuggacauggcgagccucaacaugaccaugccgcuguccugcacgaagaacaacagccaccacuacaucauggugggcaacgagaccggccuggagcucacccugaccaacacguccaucaucaaccacaaguucugcaaccugagcgacgcccacaagaagaaccucuacgaccacgcccugauguccaucaucagcaccuuccaccuguccauccccaacuucaaccaguacgaggccaugagcugcgacuucaacgggggcaagaucuccgugcaguacaaccucagccacgccuacgcgaucgacgccgccaaccacugcgggaccaucgccaacggcguccugcagaccuucaugcggauggcguggggcggguccuacaucgcccuggacagcggcugcggguccugggacugcaucaugacgagcuaccaguaccucaucauccagaacaccaccugggaggaccacugccaguucucccgccccagccccaucggcuaccuggggcugcucagccagcggacccgcgacaucuacaucucccggcgccugcugggcacguucaccuggacccucagcgacuccgagggcaacgagacccccgggggcuacugccugacgcgguggaugcugaucgaggccgagcucaagugcuucgggaacaccgccguggccaagugcaacgagaagcacgacgaggaguucugcgacaugcugcgccuguucgacuucaacaagcaggcgauccggcgccucaagaccccggcccagaugagcauccagcugaucaacaaggccgugaacgcccugaucaacgaccagcucaucaugaagaaccaccuccgggacaucaugugcauccccuacugcaacuacuccaaguacugguaccugaaccacaccgucacgggcaagaccagccugccccgcugcuggcugguguccaacgggagcuaccugaacgagacccacuucuccgacgacaucgagcagcaggccgacaacaugaucaccgagcuccugcagaaggaguacaucgaccggcagggcaagacgccgcugggccugguggaccucuucgucuucagcaccuccuucuaccugaucagcaucuuccugcaccucgugaagauccccacccaccgccacgugaucgggaagcccugccccaagccgcaccggcugaaccacaugggcaucugcuccugcgggcuguacaagcaccccggcguccccgugaaguggaagcgcugaggacuaguuauaagacugacuagcccgaugggccucccaacgggcccuccuccccuccuugcaccgagauuaauaaaaaaaaaaaaaaaaaaaaaaaaaaaaaaaaaaaaaaaaaaaaaaaaaaaaaaaaaaaaaaaaaaaaaaaaaaaaaaaaaaaaaaaaaaaaaaaaaaaa

SEQ ID NO: 29651 - RNA, 1662 nt, Artificial Sequence
  mRNA product Design i-3 (A100) comprising derived and/or modified sequence from LASV(LASV003-NIG-2008;Clade II)__AIT17580__GPCmut5 (opt1)
aggagaaagcuuaccaugggccagaucaucaccuucuuccaggaggugccccacgucaucgaggaggugaugaacaucgugcugaucgcccucagccugcuggccauccucaaggggaucuacaacgucgcgaccugcggccuguucgggcugguguccuuccuccugcugugcggccgcagcugcuccacgaccuacaaggggguguacgagcuccagacccuggagcuggacauggccagccucaacaugaccaugccgcuguccugcacgaagaacaacagccaccacuacaucauggucggcaacgagaccggccuggagcucacccugaccaacacguccaucaucaaccacaaguucugcaaccugagcgacgcccacaagaagaaccucuacgaccacgcccugauguccaucaucagcaccuuccaccuguccauccccaacuucaaccaguacgaggccaugagcugcgacuucaacgggggcaagaucuccgugcaguacaaccucagccacaccuacgcgguggacgccgccaaccacugcgggaccaucgccaacggcguccugcagacguucaugcggauggcguggggcggguccuacaucgcccuggacagcggcugcggguccugggacugcaucaugaccagcuaccaguaccucaucauccagaacaccaccugggaggaccacugccaguucucccgccccagccccaucggcuaccuggggcugcucagccagcggacgcgcgacaucuacaucucccggcgccugcugggcaccuucaccuggacccucagcgacuccgagagcaacgagacgccgggcggguacugccugacccgguggaugcugaucgaggccgagcucaagugcuucggcaacaccgccguggccaagugcaacgagaagcacgacgaggaguucugcgacaugcugcgccuguucgacuucaacaagcaggcgauccggcgccucaaggcccccgcccagauguccauccagcugaucaacaaggccgugaacgcccugaucaacgaccagcucaucaugaagaaccaccuccgggacaucaugugcauccccuacugcaacuacagcaaguacugguaccugaaccacaccgucacggggcgcaccucccugccccggugcuggcuggugagcaacggcuccuaccugaacgagacccacuucagcgacgacaucgagcagcaggcggacaacaugaucaccgagcuccugcagaaggaguacauggaccgccaggggaagacgccgcugggccugguggaccucuucgucuucuccaccagcuucuaccugaucuccaucuuccugcaccucgugaagauccccacccaccggcacgugaucggcaagcccugccccaagccgcaccgccugaaccacauggggaucugcagcugcggccuguacaagcaccccgggguccccgugaaguggaagcggugaggacuaguuauaagacugacuagcccgaugggccucccaacgggcccuccuccccuccuugcaccgagauuaauaaaaaaaaaaaaaaaaaaaaaaaaaaaaaaaaaaaaaaaaaaaaaaaaaaaaaaaaaaaaaaaaaaaaaaaaaaaaaaaaaaaaaaaaaaaaaaaaaaaa

SEQ ID NO: 29652 - RNA, 1662 nt, Artificial Sequence
  mRNA product Design i-3 (A100) comprising derived and/or modified sequence from LASV(LASV035-NIG-2009;Clade II)__AIT17588__GPCmut5 (opt1)
aggagaaagcuuaccaugggccagaucaucaccuucuuccaggaggugccccacgucaucgaggaggugaugaacaucgugcugaucgcccucagccugcuggccauccucaaggggaucuacaacgucgcgaccugcggccuguucgggcugguguccuuccuccugcugugcggccgcagcugcuccacgaccuacaaggggguguacgagcuccagacccuggagcuggacauggccagccucaacaugaccaugccgcuguccugcacgaagaacaacagccaccacuacaucauggucggcaacgagaccggccuggagcucacccugaccaacacguccaucaucaaccacaaguucugcaaccugagcgacgcccacaagaagaaccucuacgaccacgcccugauguccaucaucagcaccuuccaccuguccauccccaacuucaaccaguacgaggccaugagcugcgacuucaacgggggcaagaucuccgugcaguacaaccucagccacgcguacgccguggacgccgccaaccacugcgggaccaucgcgaacggcguccugcagaccuucaugcggauggccuggggcggguccuacaucgcccuggacagcggcugcggguccugggacugcaucaugacgagcuaccaguaccucaucauccagaacaccaccugggaggaccacugccaguucucccgccccagccccaucggcuaccuggggcugcucagccagcggacccgcgacaucuacaucucccggcgccugcugggcacguucaccuggacccucagcgacuccgagggcaacgagacccccgggggcuacugccugacgcgguggaugcugaucgaggccgagcucaagugcuucgggaacaccgccguggcgaagugcaacgagaagcacgacgaggaguucugcgacaugcugcgccuguucgacuucaacaagcaggccauccggcgccucaaggccccggcccagaugagcauccagcugaucaacaaggccgugaacgcgcugaucaacgaccagcucaucaugaagaaccaccuccgggacaucaugugcauccccuacugcaacuacuccaaguacugguaccugaaccacaccgucaccggcaagacgagccugccccgcugcuggcugguguccaacgggagcuaccugaacgagacccacuucuccgacgacaucgagcagcaggccgacaacaugaucaccgagcuccugcagaaggaguacaucgaccggcagggcaagaccccgcugggccugguggaccucuucgucuucagcacguccuucuaccugaucagcaucuuccugcaccucgugaagauccccacccaccgccacgugaucgggaagcccugccccaagccgcaccggcugaaccacaugggcaucugcuccugcgggcuguacaagcaccccggcguccccgugaaguggaagcgcugaggacuaguuauaagacugacuagcccgaugggccucccaacgggcccuccuccccuccuugcaccgagauuaauaaaaaaaaaaaaaaaaaaaaaaaaaaaaaaaaaaaaaaaaaaaaaaaaaaaaaaaaaaaaaaaaaaaaaaaaaaaaaaaaaaaaaaaaaaaaaaaaaaaa

SEQ ID NO: 29653 - RNA, 1662 nt, Artificial Sequence
  mRNA product Design i-3 (A100) comprising derived and/or modified sequence from LASV(LASV1000-NIG-2009;Clade II)__AIT17782__GPCmut5 (opt1)
aggagaaagcuuaccaugggccagaucaucaccuucuuccaggaggugccccacgucaucgaggaggugaugaacaucgugcugaucgcccucagccugcuggccauccucaaggggaucuacaacgucgcgaccugcggccuguucgggcugguguccuuccuccugcugugcggccgcagcugcuccacgaccuacaaggggguguacgagcuccagacccuggagcuggacauggccagccucaacaugaccaugccgcuguccugcacgaagaacaacagccaccacuacaucauggucggcaacgagaccggccuggagcucacccugaccaacacguccaucaucaaccacaaguucugcaaccugagcgacgcccacaagaagaaccucuacgaccacgcccugauguccaucaucagcaccuuccaccuguccauccccaacuucaaccaguacgaggccaugagcugcgacuucaacgggggcaagaucuccgugcaguacaaccucagccacaccuacgcgguggacgccgccaaccacugcgggaccaucgccaacggcguccugcagacguucaugcggauggcguggggcggguccuacaucgcccuggacagcggcugcggguccugggacugcaucaugaccagcuaccaguaccucaucauccagaacaccaccugggaggaccacugccaguucucccgccccagccccaucggcuaccuggggcugcucagccagcggacgcgcgacaucuacaucucccggcgccugcugggcaccuucaccuggacccucagcgacuccgagggcaacgagacgcccgggggcuacugccugacccgguggaugcugaucgaggccgagcucaagugcuucgggaacaccgccguggccaagugcaacgagaagcacgacgaggaguucugcgacaugcugcgccuguucgacuucaacaagcaggcgaucaagcggcucaagaccccggcccagaugagcauccagcugaucaacaaggccgugaacgcccugaucaacgaccagcucaucaugaagaaccaccuccgcgacaucaugugcauccccuacugcaacuacuccaaguacugguaccugaaccacacggucaccggcaagaccagccugccccggugcuggcugguguccaacgggagcuaccugaacgagacccacuucuccgacgacaucgagcagcaggccgacaacaugaucacggagcuccugcagaaggaguacaucgaccgccagggcaagaccccgcugggccugguggaccucuucgucuucagcaccuccuucuaccugaucagcaucuuccugcaccucgugaagauccccacccaccggcacguggucgggaagcccugccccaagccgcaccgccugaaccacaugggcaucugcuccugcgggcuguacaagcaccccggcgugcccgugaaguggaagcggugaggacuaguuauaagacugacuagcccgaugggccucccaacgggcccuccuccccuccuugcaccgagauuaauaaaaaaaaaaaaaaaaaaaaaaaaaaaaaaaaaaaaaaaaaaaaaaaaaaaaaaaaaaaaaaaaaaaaaaaaaaaaaaaaaaaaaaaaaaaaaaaaaaaa

SEQ ID NO: 29654 - RNA, 1662 nt, Artificial Sequence
  mRNA product Design i-3 (A100) comprising derived and/or modified sequence from LASV(LASV221-NIG-2010;Clade II)__AIT17624__GPCmut5 (opt1)
aggagaaagcuuaccaugggccagaucaucaccuucuuccaggaggugccccacgucaucgaggaggugaugaacaucgugcugaucgcccucagccugcuggccauccucaaggggaucuacaacgucgcgaccugcggccuguucgggcugguguccuuccuccugcugugcggccgcagcugcuccacgaccuacaaggggguguacgagcuccagacccuggagcuggacauggccagccucaacaugaccaugccgcuguccugcacgaagaacaacagccaccacuacaucauggucggcaacgagaccggccuggagcucacccugaccaacacguccaucaucaaccacaaguucugcaaccugagcgacgcccacaagaagaaccucuacgaccacgcccugauguccaucaucagcaccuuccaccuguccauccccaacuucaaccaguacgaggccaugagcugcgacuucaacgggggcaagaucuccgugcaguacaaccucagccacaccuacgcgaucgacgccgccaaccacugcgggaccaucgccaacggcgugcugcagacguucaugcggauggcguggggcggguccuacaucgcccuggacagcggcugcggguccugggacugcaucaugaccagcuaccaguaccucaucauccagaacaccaccugggaggaccacugccaguucucccgccccagccccaucggcuaccuggggcugcucagccagcggacgcgcgacaucuacaucucccggcgccugcugggcaccuucaccuggacccucagcgacuccgagggcaacgagacgcccgggggcuacugccugacccgguggaugcugaucgaggccgagcucaagugcuucgggaacaccgccgucgccaagugcaacgagaagcacgacgaggaguucugcgacaugcugcgccuguucgacuucaacaagcaggcgauccggcgccucaagaccccggcccagaugagcauccagcugaucaacaaggccgugaacgcccugaucaacgaccagcucaucaugaagaaccaccuccgggacaucaugugcauccccuacugcaacuacuccaaguacugguaccugaaccacacggugaccggcaagaccagccugccccgcugcuggcuggucuccaacgggagcuaccugaacgagacccacuucuccgacgacaucgagcagcaggccgacaacaugaucacggagaugcuccagaaggaguacauggaccggcagggcaagaccccgcugggccugguggaccuguucguguucagcaccuccuucuaccucaucagcaucuuccugcaccuggucaagauccccacccaccgccacgugaucgggaagcccugccccaagccgcaccggcucaaccacaugggcaucugcuccugcgggcuguacaagcaccccggcgugcccgucaaguggaagcgcugaggacuaguuauaagacugacuagcccgaugggccucccaacgggcccuccuccccuccuugcaccgagauuaauaaaaaaaaaaaaaaaaaaaaaaaaaaaaaaaaaaaaaaaaaaaaaaaaaaaaaaaaaaaaaaaaaaaaaaaaaaaaaaaaaaaaaaaaaaaaaaaaaaaa

SEQ ID NO: 29655 - RNA, 1662 nt, Artificial Sequence
  mRNA product Design i-3 (A100) comprising derived and/or modified sequence from LASV(LASV237-NIG-2010;Clade II)__AIT17638__GPCmut5 (opt1)
aggagaaagcuuaccaugggccagaucaucaccuucuuccaggaggugccccacgucaucgaggaggugaugaacaucgugcugaucgcccucagccugcuggccauccucaaggggaucuacaacgucgcgaccugcggccuguucgggcugguguccuuccuccugcugugcggccgcagcugcuccacgaccuacaaggggguguacgagcuccagacccuggagcuggacauggccagccucaacaugaccaugccgcuguccugcacgaagaacaacagccaccacuacaucauggucggcaacgagaccggccuggagcucacccugaccaacacguccaucaucaaccacaaguucugcaaccugagcgacgcccacaagaaggaccucuacgaccacgcccugauguccaucaucagcaccuuccaccuguccauccccaacuucaaccaguacgaggccaugagcugcgacuucaacgggggcaagaucuccgugcaguacaaccucagccacaccuacgcgguggacgccgccaaccacugcgggaccaucgccaacggcguccugcagacguucaugcggauggcguggggcggguccuacaucgcccuggacagcggcugcggguccugggacugcaucaugaccagcuaccaguaccucaucauccagaacaccaccugggaggaccacugccaguucucccgccccagccccaucggcuaccuggggcugcucagccagcggacgcgcgacaucuacaucucccggcgccugcugggcaccuucaccuggacccucagcgacuccgagggcaacgagacgcccgggggcuacugccugacccgguggaugcugaucgaggccgagcucaagugcuucgggaacaccgccguggccaagugcaacgagaagcacgacgaggaguucugcgacaugcugcgccuguucgacuucaacaagcaggcgauccggcgccucaagaccccggcccagaugagcauccagcugaucaacaaggccgugaacgcccugaucaacgaccagcucaucaugaagaaccaccuccgggacaucaugugcauccccuacugcaacuacuccaaguacugguaccugaaccacacggucaccggcaagaccagccugccccgcugcuggcugguguccaacgggagcuaccugaacgagacccacuucuccgacgacaucgagcagcaggccgacaacaugaucacggagcuccugcagaaggaguacauggaccggcagggcaagaccccgcugggccugguggaccucuucgucuucagcaccuccuucuaccugaucagcaucuuccugcaccucaucaagauccccacccaccgccacaucacggggaagcccugccccaagccgcaccggcugaaccacaugggcaucugcuccugcgggcuguacaagcaccccggcgugcccgugaaguggaagcgcugaggacuaguuauaagacugacuagcccgaugggccucccaacgggcccuccuccccuccuugcaccgagauuaauaaaaaaaaaaaaaaaaaaaaaaaaaaaaaaaaaaaaaaaaaaaaaaaaaaaaaaaaaaaaaaaaaaaaaaaaaaaaaaaaaaaaaaaaaaaaaaaaaaaa

SEQ ID NO: 29656 - RNA, 1662 nt, Artificial Sequence
  mRNA product Design i-3 (A100) comprising derived and/or modified sequence from LASV(LASV253-NIG-2011;Clade II)__AIT17670__GPCmut5 (opt1)
aggagaaagcuuaccaugggccagaucaucaccuucuuccaggaggugccccacgucaucgaggaggugaugaacaucgugcugaucgcccucagccugcuggccauccucaaggggaucuacaacgucgcgaccugcggccuguucgggcugguguccuuccuccugcugugcggccgcagcugcuccacgaccuacaaggggguguacgagcuccagacccuggagcuggacauggccagccucaacaugaccaugccgcuguccugcacgaagaacaacagccaccacuacaucauggucggcaacgagaccggccuggagcucacccugaccaacacguccaucaucaaccacaaguucugcaaccugagcgacgcccacaagaagaaccucuacgaccacgcccugauguccaucaucagcaccuuccaccuguccauccccaacuucaaccaguacgaggccaugagcugcgacuucaacgggggcaagaucuccgugcaguacaaccucagccacaccuacgcgguggacgccgccaaccacugcgggaccaucgccaacggcguccugcagacguucaugcggauggcguggggcggguccuacaucgcccuggacagcggcugcggguccugggacugcaucaugaccagcuaccaguaccucaucauccagaacaccaccugggaggaccacugccaguucucccgccccagccccaucggcuaccuggggcugcucagccagcggacgcgcgacaucuacaucucccggcgccugcugggcaccuucaccuggacccucagcgacuccgagggcaacgagacgcccgggggcuacugccugacccgguggaugcugaucgaggccgagcucaagugcuucgggaacaccgccguggccaagugcaacgagaagcacgacgaggaguucugcgacaugcugcgccuguucgacuucaacaagcaggcgauccggcgccucaaggccccggcccagaugagcauccagcugaucaacaaggccgugaacgcccugaucaacgaccagcucaucaugaagaaccaccuccgggacaucaugugcauccccuacugcaacuacuccaaguacugguaccugaaccacaccgucacgggccgcaccagccugccccggugcuggcugguguccaacgggagcuaccugaacgagacccacuucuccgacgacaucgagcagcaggcggacaacaugaucaccgagcuccugcagaaggaguacaucgaccgccagggcaagacgccgcugggccugguggaccucuucgucuucagcaccuccuucuaccugaucagcaucuuccugcaccucgugaagauccccacccaccggcacaucaucgggaagcccugccccaagccgcaccgccugaaccacaugggcaucugcuccugcgggcuguacaagcaccccggcgugcccgucaaguggaagcggugaggacuaguuauaagacugacuagcccgaugggccucccaacgggcccuccuccccuccuugcaccgagauuaauaaaaaaaaaaaaaaaaaaaaaaaaaaaaaaaaaaaaaaaaaaaaaaaaaaaaaaaaaaaaaaaaaaaaaaaaaaaaaaaaaaaaaaaaaaaaaaaaaaaa

SEQ ID NO: 29657 - RNA, 1662 nt, Artificial Sequence
  mRNA product Design i-3 (A100) comprising derived and/or modified sequence from LASV(LASV254-NIG-2011;Clade II)__AIT17674__GPCmut5 (opt1)
aggagaaagcuuaccaugggccagaucaucaccuucuuccaggaggugccccacgucaucgaggaggugaugaacaucgugcugaucgcccucagccugcuggccauccucaaggggaucuacaacgucgcgaccugcggccuguucgggcugguguccuuccuccugcugugcggccgcagcugcuccacgaccuacaaggggguguacgagcuccagacccuggagcuggacaugaccaaccucaacaugacgaugccgcugagcugcaccaagaacaacucccaccacuacaucauggucggcaacgagaccggccuggagcucacccugacgaacaccagcaucaucaaccacaaguucugcaaccuguccgacgcccacaagaagaaccucuacaaccacgcccugaugagcaucaucuccaccuuccaccugagcauccccaacuucaaccaguacgaggccauguccugcgacuucaacgggggcaagaucagcgugcaguacaaccucucccacagcuacgccguggacgcggccaaccacugcgggaccaucgccaacggcguccugcagacguucaugcggauggccuggggcggguccuacaucgcgcuggacagcggcugcgggaacugggacugcaucaugaccuccuaccaguaccucaucauccagaacaccaccugggaggaccacugccaguucagccgccccucccccaucggcuaccuggggcugcucagccagcggacgcgcgacaucuacaucagccggcgccugcugggcaccuucaccuggacccucuccgacagcgagggcaacgagacgcccgggggcuacugccugacccgguggaugcugaucgaggccgagcucaagugcuucgggaacaccgccguggccaagugcaacgagaagcacgacgaggaguucugcgacaugcugcgccuguucgacuucaacaagcaggccauccggcgccucaagaccccggcgcaggccaacauccagcugaucaacaaggccgugaacgcccugaucaacgaccagcucaucaugaagaaccaccuccgggacaucaugugcauccccuacugcaacuacuccaaguacugguaccugaaccacacggucaccggcaagaccagccugccccgcugcuggcugguguccaacgggagcuaccugaacgagacccacuucuccgacgacaucgagcagcaggccgacaacaugaucacggagcuccugcagaaggaguacauggaccggcagggcaagaccccgcugggccugguggaccucuucgucuucagcaccuccuucuaccugaucagcaucuuccugcaccucgugaagauccccacccaccgccacgugaucgggaagcccugccccaagccgcaccggcugaaccacaugggcaucugcuccugcgggcuguacaagcaccccggcguccccgugaaguggaagcgcugaggacuaguuauaagacugacuagcccgaugggccucccaacgggcccuccuccccuccuugcaccgagauuaauaaaaaaaaaaaaaaaaaaaaaaaaaaaaaaaaaaaaaaaaaaaaaaaaaaaaaaaaaaaaaaaaaaaaaaaaaaaaaaaaaaaaaaaaaaaaaaaaaaaa

SEQ ID NO: 29658 - RNA, 1662 nt, Artificial Sequence
  mRNA product Design i-3 (A100) comprising derived and/or modified sequence from LASV(Nig08-A19;Clade III)__ADU56618__GPCmut5 (opt1)
aggagaaagcuuaccaugggccagaucgugaccuucuuccaggaggucccccacgugaucgaggaggugaugaacaucguccugaucgcccucagcauccuggccauccugaaggggcucuacaacaucgcgaccugcggccugaucgggcuggugacguuccuccugcuguccggccgcagcugcuccaugaccuacaaggggguguacgagcuccagacccuggagcugaacaugaacacccucaacaugacgaugccgcugagcugcaccaagaacaacucccaccacuacaucauggucggcaacgagaccggccuggagcucacccugacgaacaccagccugcuccaccacaaguucugcaaccuguccgacgcccacaagaagaaccuguacgaccacacccucaugagcaucaucuccaccuuccaccugagcauccccaacuucaaccaguacgaggccauguccugcgacuucaacgggggcaagaucacggugcaguacaaccugagccacuccuacgccaucgacgccgcgaaccacugcgggaccguggccaacggcguccuccagaccuucaugcggauggccuggggcgggagcuacaucgcccuggacuccggcugcgggaagugggacugcaucaugaccagcuaccaguaccugaucauccagaacacgaccugggaggaccacugccaguucucccgccccagccccaucggcuaccucgggcugcugucccagcggacccgcgacaucuacaucagccggcgccuccugggcaccuucacguggacccugagcgacuccgagggcaacgagacccccgggggcuacugccucacccgguggaugcugaucgaggcggagcugaagugcuucgggaacacggccguggccaagugcaacgagaagcacgacgaggaguucugcgacaugcuccgccuguucgacuucaacaagcaggccauccggcgccugaaggccccggcgcagaugagcauccagcucaucaacaaggccgugaacgcccugaucaacgaccagcugaucaugaagaaccaccuccgggacaucaugugcauccccuacugcaacuacuccaaguacugguaccugaaccacaccagcaccggccgcaccucccugccccggugcuggcucgucagcaacggguccuaccugaacgagacgcacuucagcgacgacaucgagcagcaggccgacaacaugaucaccgagaugcugcagaaggaguaccuggaccgccagggcaagaccccgcucggccugguggaccuguucguguucuccaccagcuucuaccucaucuccaucuuccugcaccuggucaagauccccacgcaccggcacaucguggggaagcccugccccaagccgcaccgccucaaccacaugggcaucugcagcugcgggcuguacaagcagcccggcgugcccguccgguggaagcgcugaggacuaguuauaagacugacuagcccgaugggccucccaacgggcccuccuccccuccuugcaccgagauuaauaaaaaaaaaaaaaaaaaaaaaaaaaaaaaaaaaaaaaaaaaaaaaaaaaaaaaaaaaaaaaaaaaaaaaaaaaaaaaaaaaaaaaaaaaaaaaaaaaaaa

SEQ ID NO: 29659 - RNA, 1665 nt, Artificial Sequence
  mRNA product Design i-3 (A100) comprising derived and/or modified sequence from LASV(G1180-SLE-2010;Clade IV)__AIT17168__GPCmut5 (opt1)
aggagaaagcuuaccaugggccagaucgugaccuucuuccaggaggucccccacgugaucgaggaggugaugaacaucguccugaucgcccucagcauccuggccgugcugaaggggcucuacaacuucgcgaccugcggccugguggggcugcucacguuccugcugcucugcggccgcuccugcaccgccagccgguacaagggggucuacgagcugcagacccuggagcucaacauggagacccugaacaugacgaugccgcuguccugcaccaagaacaacagccaccacuacaucauggugggcaacgagaccggccucgagcugacccugacgaacaccuccaucaucaaccacaaguucugcaaccucagcgacgcccacaagaagaaccuguacgaccacgcccugauguccaucaucagcaccuuccaccucuccauccccaacuucaaccaguacgaggccaugagcugcgacuucaacgggggcaagaucuccgugcaguacaaccugagccacuccuacgcgggggacgccgccaaccacugcggcaccgucgccaacggggugcugcagacguucaugcgcauggcguggggcggcagcuacaucgcccucgacuccgggugcggcagcugggacugcaucaugaccuccuaccaguaccugaucauccagaacaccaccugggaggaccacugccaguucagccggcccucccccaucggguaccugggccuccugagccagcgcacgcgggacaucuacaucagccgccggcugcucggcaccuucaccuggacccuguccgacagcgaggggaaggacacgccgggcggguacugccugacccgcuggaugcucaucgaggccgagcugaagugcuucggcaacaccgccguggccaagugcaacgagaagcacgacgaggaguucugcgacaugcugcggcuguucgacuucaacaagcaggcgauccagcgccugaaggcccccgcccagauguccauccagcugaucaacaaggccgucaacgcccucaucaacgaccagcugaucaugaagaaccaccuccgggacaucaugugcauccccuacugcaacuacagcaaguacugguaccucaaccacaccacgaccgggaagaccucccugcccaagugcuggcuggugagcaacggcuccuaccucaacgagacccacuucagcgacgacaucgagcagcaggcggacaacaugaucacggagaugcugcagaaggaguacauggagcgccagggcaagaccccgcuggggcugguggaccucuucgucuucuccaccagcuucuaccugaucuccaucuuccugcaccucgugaagauccccacccaccggcacaucgugggcaagagcugccccaagccccaccgccugaaccacauggggaucugcuccugcggccuguacaagcagccggggguccccgugaaguggaagcggugaggacuaguuauaagacugacuagcccgaugggccucccaacgggcccuccuccccuccuugcaccgagauuaauaaaaaaaaaaaaaaaaaaaaaaaaaaaaaaaaaaaaaaaaaaaaaaaaaaaaaaaaaaaaaaaaaaaaaaaaaaaaaaaaaaaaaaaaaaaaaaaaaaaa

SEQ ID NO: 29660 - RNA, 1665 nt, Artificial Sequence
  mRNA product Design i-3 (A100) comprising derived and/or modified sequence from LASV(G1442-SLE-2011;Clade IV)__AIT17180__GPCmut5 (opt1)
aggagaaagcuuaccaugggccagaucgugaccuucuuccaggaggucccccacgugaucgaggaggugaugaacaucguccugaucgcccucagcauccuggccgugcugaaggggcucuacaacguggcgaccugcggccugaucgggcuggucacguuccuccugcugugcggccgcuccugcaccaccacccucuacaaggggguguacgagcugcagacgcuggagcucaacauggagacccugaacaugaccaugccgcugagcugcaccaagaacaacucccaccacuacauccgggugggcaacgagacgggccucgagcugacccugaccaacaccagcaucaucaaccacaaguucugcaaccucuccgacgcccacaagaagaaccuguacgaccacgcccugaugagcaucaucuccacguuccaccucagcauccccaacuucaaccaguacgaggccauguccugcgacuucaacgggggcaagaucagcguccaguacaaccugucccacagcuacgccggggacgcggccaaccacugcggcaccguggccaacggggugcugcagaccuucaugcgcauggccuggggcggcuccuacaucgcgcucgacagcgggugcggcaacugggacugcaucaugaccuccuaccaguaccugaucauccagaacacgaccugggacgaccacugccaguucagccggcccucccccaucggguaccugggccuccugagccagcgcacccgggacgucuacaucucccgccggcugcucggcaccuucacguggacccugagcgacagcgaggggaaggacaccccgggcggguacugccugacccgcuggaugcucaucgaggccgagcugaagugcuucggcaacacggccguggccaagugcaacgagaagcacgacgaggaguucugcgacaugcugcggcuguucgacuucaacaagcaggccauccagcgccugaaggcgcccgcccagauguccauccagcugaucaacaaggccgugaacgcccucaucaacgaccagcugaucaugaagaaccaccuccgggacaucaugugcauccccuacugcaacuacagcaaguacugguaccucaacaacaccgccaccgggaagaccucccugcccaagugcuggcugaucagcaacggcuccuaccucaacgagacgcacuucagcgacgacaucgagcaggaggcggacaacaugaucaccgagaugcugcagaaggaguacauggagcgccagggcaagaccccgcuggggcuggucgaccucuucguguucuccaccagcuucuaccugaucuccaucuuccugcaccucgugaagauccccacgcaccggcacaucgucggcaagagcugccccaagccccaccgccugaaccacauggggaucugcuccugcggccuguacaagcagccgggggugcccgugcgguggaagcgcugaggacuaguuauaagacugacuagcccgaugggccucccaacgggcccuccuccccuccuugcaccgagauuaauaaaaaaaaaaaaaaaaaaaaaaaaaaaaaaaaaaaaaaaaaaaaaaaaaaaaaaaaaaaaaaaaaaaaaaaaaaaaaaaaaaaaaaaaaaaaaaaaaaaa

SEQ ID NO: 29661 - RNA, 1665 nt, Artificial Sequence
  mRNA product Design i-3 (A100) comprising derived and/or modified sequence from LASV(G3010-SLE-2013;Clade IV)__AIT17344__GPCmut5 (opt1)
aggagaaagcuuaccaugggccagaucgugaccuucuuccaggaggucccccacgugaucgaggaggugaugaacaucguccugaucgcccucagcauccuggccgugcugaaggggcucuacaacuucgcgaccugcggccugguggggcuggucacguuccuccugcugugcggccgcuccugcaccaccagccucuacaaggggguguacgagcugcagacccuggagcucaacauggagacgcugaacaugaccaugccgcuguccugcaccaagaacaacagccaccacuacaucauggugggcaacgagaccggccucgagcugacgcugaccaacaccuccaucaucaaccacaaguucugcaaccucagcgacgcccacaagaagaaccuguacaaccacgcccugauguccaucaucagcaccuuccaccucuccauccccaacuucaaccaguacgaggccaugagcugcgacuucaacgggggcaagaucuccguccaguacaaccugagccacuccuacgccggggacgcggccagccacugcggcacgguggccaacggggugcugcagaccuucaugcggauggccuggggcggcuccuacaucgcgcucgacagcgggugcggcaagugggacugcaucaugaccuccuaccaguaccugaucauccagaacaccacgugggaggaccacugccaguucagccgccccucccccaucggguaccugggccuccugagccagcggacccgcgacaucuacaucagccggcgccugcucggcaccuucaccuggacgcuguccgacagcgaggggaaggacaccccgggcggguacugccugacccgguggaugcucaucgaggccgagcugaagugcuucggcaacaccgccgucgccaagugcaacgagaagcacgacgaggaguucugcgacaugcugcgccucuucgacuucaacaagcaggccauccagcggcugaagacgcccgcgcagauguccauccagcugaucaacaaggccgugaacgcccucaucaacgaccagcugaucaugaagaaccaccuccgcgacaucaugugcauccccuacugcaacuacagcaaguacugguaccugaaccacaccaccaccgggaagacgucccugcccaagugcuggcuggugagcaacggcuccuaccucaacgagacccacuucagcgacgacaucgagcagcaggccgacaacaugaucaccgagaugcugcagaaggaguacauggagcggcagggcaagaccccgcuggggcuggucgaccucuucguguucuccacgagcuucuaccugaucuccaucuuccugcaccucgugaagauccccacccaccgccacaucgucggcaagagcugccccaagccccaccggcugaaccacauggggaucugcuccugcggccuguacaagcagccgggggugcccgugcgcuggaagcggugaggacuaguuauaagacugacuagcccgaugggccucccaacgggcccuccuccccuccuugcaccgagauuaauaaaaaaaaaaaaaaaaaaaaaaaaaaaaaaaaaaaaaaaaaaaaaaaaaaaaaaaaaaaaaaaaaaaaaaaaaaaaaaaaaaaaaaaaaaaaaaaaaaaa

SEQ ID NO: 29662 - RNA, 1665 nt, Artificial Sequence
  mRNA product Design i-3 (A100) comprising derived and/or modified sequence from LASV(G502-SLE-2009;Clade IV)__AIT17126__GPCmut5 (opt1)
aggagaaagcuuaccaugggccagaucgugaccuucuuccaggaggucccccacgugaucgaggaggugaugaacaucguccugaucgcccucagcauccuggccgugcugaaggggcucuacaacuucgcgaccugcggccugguggggcugcucacguuccugcugcucugcggccgcuccugcaccaccgggcuguacaagggcgucuacgagcugcagacccucgagcugaacauggagacgcugaacaugaccaugccgcucagcugcaccaagaacaacucccaccacuacaucauggugggcaacgagaccgggcuggagcugacgcucaccaacaccagcaucaucaaccacaaguucugcaaccuguccgacgcccacaagaagaaccuguacgaccacgcccucaugagcaucaucuccaccuuccaccugagcauccccaacuucaaccaguacgaggccauguccugcgacuucaacggcgggaagaucagcgugcaguacaaccugucccacagcuacgccggcgacgcggccgaccacugcgggacggucgccaacggcgugcuccagaccuucaugcggauggccuggggcggguccuacaucgcgcuggacagcggcugcgggcgcugggacugcaucaugaccuccuaccaguaccugaucauccagaacaccacgugggaggaccacugccaguucagccggcccucccccaucggcuaccucggccugcugagccagcgcacccgggacaucuacaucucccgccggcuccuggggaccuucaccuggacgcugagcgacagcgagggcaaggacacccccgggggcuacugccucacccgcuggaugcugaucgaggccgagcugaagugcuucgggaacaccgccguggccaagugcaacgagaagcacgacgaggaguucugcgacaugcuccggcuguucgacuucaacaagcaggccauccagcgccugaaggcgccggcccagauguccauccagcucaucaacaaggccgucaacgcccugaucaacgaccagcuggugaugaagaaccaccuccgggacaucaugugcauccccuacugcaacuacagccgcuacugguaccugaaccacacgaccaccggccggaccucccugcccaagugcuggcucgugagcaacggcuccuaccugaacgagacgcacuucagcgacgacaucgagcagcaggccgacaacaugaucaccgagaugcugcagaaggaguacauggagcgccaggggaagaccccgcugggccucgucgaccuguucguguucuccaccagcuucuaccugaucuccaucuuccuccaccuggugaagauccccacgcaccggcacaucgucggcaagagcugccccaagccccaccgccugaaccacauggggaucugcuccugcgggcucuacaagcagccgggcgugcccgugaaguggaagcggugaggacuaguuauaagacugacuagcccgaugggccucccaacgggcccuccuccccuccuugcaccgagauuaauaaaaaaaaaaaaaaaaaaaaaaaaaaaaaaaaaaaaaaaaaaaaaaaaaaaaaaaaaaaaaaaaaaaaaaaaaaaaaaaaaaaaaaaaaaaaaaaaaaaa

SEQ ID NO: 29663 - RNA, 1665 nt, Artificial Sequence
  mRNA product Design i-3 (A100) comprising derived and/or modified sequence from LASV(G733-SLE-2010;Clade IV)__AIT17154__GPCmut5 (opt1)
aggagaaagcuuaccaugggccagaucgugaccuucuuccaggaggucccccacgugaucgaggaggugaugaacaucguccugaucgcccucagcauccuggccgugcugaaggggcucuacaacuucgcgaccugcggcaucguggggcuggucuccuuccugcuccugugcggccgcagcugcacgaccucccuguacaaggggguguacgagcuccagacccuggagcugaacauggagacccucaacaugacgaugccgcugagcugcaccaagaacaacucccaccacuacaucauggugggcaacgagaccggccuggagcucacccugacgaacaccagcaucaucaaccacaaguucugcaaccuguccgacgcccacaagaagaaccucuacgaccacgcccugaugagcaucaucuccaccuuccaccugagcauccccaacuucaaccaguacgaggccauguccugcgacuucaacgggggcaagaucagcguccaguacaaccucucccacagcuacgccggggacgcggccaaccacugcggcaccaucgccaacggggugcugcagacguucaugcggauggccuggggcggcuccuacaucgcgcuggacagcgggugcgaccgcugggacugcaucaugaccuccuaccaguaccucaucauccagaacaccaccugggaggaccacugccaguucagccggcccucccccaucggcuaccuggggcugcucagccagcgcacgcgggacaucuacaucagccgccggcugcugggcaccuucaccuggacccucuccgacagcgagggcaaggacacgcccgggggcuacugccugacccgcuggaugcugaucgaggccgagcucaagugcuucgggaacaccgccguggccaagugcaacgagaagcacgacgaggaguucugcgacaugcugcggcuguucgacuucaacaagcaggccauccagcgccucaaggcgccggcccagauguccauccagcugaucaacaaggccgucaacgcccugaucaacgaccagcucaucaugaagaaccaccuccgggacaucaugugcauccccuacugcaacuacagcaaguacugguaccugaaccacaccacgaccggcaagaccucccugcccaagugcuggcuggugagcaacggguccuaccugaacgagacccacuucagcgacgacaucgagcagcaggccgacaacaugaucacggagaugcuccagaaggaguacauggagcgccagggcaagaccccgcugggccugguggaccuguucgucuucuccaccagcuucuaccucaucuccaucuuccugcaccuggugaagauccccacccaccggcacguggucggcaagagcugccccaagccccaccgccucaaccacauggggaucugcuccugcgggcuguacggccagccgggggugcccgugaaguggaagcggugaggacuaguuauaagacugacuagcccgaugggccucccaacgggcccuccuccccuccuugcaccgagauuaauaaaaaaaaaaaaaaaaaaaaaaaaaaaaaaaaaaaaaaaaaaaaaaaaaaaaaaaaaaaaaaaaaaaaaaaaaaaaaaaaaaaaaaaaaaaaaaaaaaaa

SEQ ID NO: 29664 - RNA, 1665 nt, Artificial Sequence
  mRNA product Design i-3 (A100) comprising derived and/or modified sequence from MOPV/LASV reassortant(IGS-1;Clade IV)__AFY05576__GPCmut5 (opt1)
aggagaaagcuuaccaugggccagaucgugaccuucuuccaggaggucccccacgugaucgaggaggugaugaacaucguccugaucgcccucagcgugcuggccgugcugaaggggcucuacaacuucgcgaccugcggccuggucgggcuggugacguuccuccugcugugcggccgcuccugcaccaccagccucuacaaggggguguacgagcugcagacccuggagcucaacauggagacgcugaacaugaccaugccgcuguccugcaccaagaacaacagccaccacuacaucauggucggcaacgagaccggccucgagcugacgcugaccaacaccuccaucaucaaccacaaguucugcaaccucagcgacgcccacaagaagaaccuguacgaccacgcccugauguccaucaucagcaccuuccaccucuccauccccaacuucaaccaguacgaggccaugagcugcgacuucaacgggggcaagaucuccgugcaguacaaccugagccacuccuacgccggggacgcggccaaccacugcggcacgguggccaacgggguccugcagaccuucaugcggauggccuggggcggcagcuacaucgcgcucgacuccgggugcggcaacugggacugcaucaugaccagcuaccaguaccugaucauccagaacaccacgugggaggaccacugccaguucucccgccccagccccaucggguaccugggccuccugucccagcggacccgcgacaucuacaucagccggcgccugcucggcaccuucaccuggacgcugagcgacuccgagggggaggacaccccgggcggguacugccugacccgguggaugcucaucgaggccgagcugaagugcuucggcaacaccgccguggccaagugcaacgagaagcacgacgaggaguucugcgacaugcugcgccucuucgacuucaacaagcaggccauccagcggcugaaggcgcccgcccagaugagcauccagcugaucaacaaggccgugaacgcccucaucaacgaccagcugaucaugaagaaccaccuccgcgacaucaugugcauccccuacugcaacuacuccaaguacugguaccugaaccacacgaccaccgggcggaccagccugcccaagugcuggcuggucuccaacggcagcuaccucaacgagacgcacuucuccgacgacaucgagcagcaggccgacaacaugaucaccgagaugcugcagaaggaguacauggagcgccagggcaagaccccgcuggggcugguggaccucuucguguucagcaccuccuucuaccugaucagcaucuuccugcaccucgucaagauccccacgcaccggcacaucgugggcaaguccugccccaagccccaccgccugaaccacauggggaucugcagcugcggccuguacaagcagccgggggugcccgucaaguggaagcggugaggacuaguuauaagacugacuagcccgaugggccucccaacgggcccuccuccccuccuugcaccgagauuaauaaaaaaaaaaaaaaaaaaaaaaaaaaaaaaaaaaaaaaaaaaaaaaaaaaaaaaaaaaaaaaaaaaaaaaaaaaaaaaaaaaaaaaaaaaaaaaaaaaaa

SEQ ID NO: 29665 - RNA, 1665 nt, Artificial Sequence
  mRNA product Design i-3 (A100) comprising derived and/or modified sequence from LASV(LM765-SLE-2012;Clade IV)__AIT17814__GPCmut5 (opt1)
aggagaaagcuuaccaugggccagaucgugaccuucuuccaggaggucccccacgugaucgaggaggugaugaacaucguccugaucgcccucagcauccuggccgugcugaaggggcucuacaacuucgcgaccugcggccugguggggcuggucacguuccuccugcugugcggccgcuccugcaccaccagccucuacaaggggguguacgagcugcagacccuggagcucaacauggagacgcugaacaugaccaugccgcuguccugcaccaagaacaacagccaccacuacaucauggugggcaacgagaccggccucgagcugacgcugaccaacaccuccaucaucgaccacaaguucugcaaccucagcgacgcccaccggaagaaccuguacgaccacgcccugauguccaucaucagcaccuuccaccucuccauccccaacuucaaccaguacgaggccaugagcugcgacuucaacgggggcaagaucuccguccaguacaaccugagccacuccuacgccaaggacgcggccgaccacugcgggacgguggccaacggcgugcugcagaccuucaugcgcauggccuggggcgggagcuacaucgcgcucgacuccggcugcgggcggugggacugcaucaugaccagcuaccaguaccugaucauccagaacaccacgugggaggaccacugccaguucucccgccccagccccaucggcuaccuggggcuccugucccagcggacccgcgacaucuacaucagccggcgccugcucggcaccuucaccuggacgcugagcgacuccgagggcaaggacacccccgggggcuacugccugacccgguggaugcucaucgaggccgagcugaagugcuucgggaacaccgccgucgccaagugcaacgagaagcacgacgaggaguucugcgacaugcugcgccucuucgacuucaacaagcaggccauccagcggcugaaggcgccggcccagaugagcauccagcugaucaacaaggccgugaacgcccucaucaacgaccagcugaucaugaagaaccaccuccgcgacaucaugugcauccccuacugcaacuacuccaaguacugguaccugaaccacacgaccaccggcaagaccagccugcccaagugcuggcugguguccaacgggagcuaccucaacgagacgcacuucuccgacgacaucgagcagcaggccgacaacaugaucaccgagaugcugcagaaggaguacauggagcggcagggcaagaccccgcugggccuggucgaccucuucguguucagcaccuccuucuaccugaucagcaucuuccugcaccucgugaagauccccacgcaccgccacaucgucgggaagcccugccccaagccgcaccggcugaaccacaugggcaucugcuccugcgggcuguacaagcagcccggcgugcccgugaaguggaagcgcugaggacuaguuauaagacugacuagcccgaugggccucccaacgggcccuccuccccuccuugcaccgagauuaauaaaaaaaaaaaaaaaaaaaaaaaaaaaaaaaaaaaaaaaaaaaaaaaaaaaaaaaaaaaaaaaaaaaaaaaaaaaaaaaaaaaaaaaaaaaaaaaaaaaa

SEQ ID NO: 29666 - RNA, 1665 nt, Artificial Sequence
  mRNA product Design i-3 (A100) comprising derived and/or modified sequence from LASV(LM776-SLE-2012;Clade IV)__AIT17824__GPCmut5 (opt1)
aggagaaagcuuaccaugggccagaucgugaccuucuuccaggaggucccccacgugaucgaggaggugaugaacaucguccugaucgcccucagcauccuggccgugcugaaggggcucuacaacuucgcgaccugcggccugguggggcuggucacguuccuccugcugugcggccgcuccugcaccaccagcguguacaaggggguguacgagcuccagacccuggagcugaacauggagacgcucaacaugaccaugccgcuguccugcaccaagaacaacagccaccacuacaucauggucggcaacgagaccggccuggagcucacgcugaccaacaccuccaucaucaaccacaaguucugcaaccugagcgacgcccacaagaagaaccucuacgaccacgcccugauguccaucaucagcaccuuccaccuguccauccccaacuucaaccaguacgaggccaugagcugcgacuucaacgggggcaagaucuccgugcaguacaaccucagccacuccuacgccggggacgcggccaaccacugcggcacgguggccaacgggguccugcagaccuucaugcggauggccuggggcggcagcuacaucgcgcuggacuccgggugcggcaagugggacugcaucaugaccagcuaccaguaccucaucauccagaacaccacgugggaggaccacugccaguucucccgccccagccccaucggguaccugggccugcucucccagcggacccgcgacaucuacaucagccggcgccugcugggcaccuucaccuggacgcucagcgacuccgaggggaaggacaccccgggcggguacugccugacccgguggaugcugaucgaggccgagcucaagugcuucggcaacaccgccguggccaagugcaacgagaagcacgacgaggaguucugcgacaugcugcgccuguucgacuucaacaagcaggccauccagcggcucaaggcgcccgcccagaugagcauccagcugaucaacaaggccgugaacgcccugaucaacgaccagcucaucaugaagaaccaccuccgcgacaucaugugcauccccuacugcaacuacuccaaguacugguaccugaaccacacgaccaccgggaagaccagccugcccaagugcuggcuggucuccaacggcagcuaccugaacgagacgcacuucuccgacgacaucgagcagcaggccgacaacaugaucaccgagaugcuccagaaggaguacauggagcggcagggcaagaccccgcuggggcugguggaccuguucguguucagcaccuccuucuaccucaucagcaucuuccugcaccuggucaagauccccacgcaccgccacaucgugggcaaguccugccccaagccccaccggcucaaccacauggggaucugcagcugcggccuguacaagcagccgggggugcccguccgcuggaagcggugaggacuaguuauaagacugacuagcccgaugggccucccaacgggcccuccuccccuccuugcaccgagauuaauaaaaaaaaaaaaaaaaaaaaaaaaaaaaaaaaaaaaaaaaaaaaaaaaaaaaaaaaaaaaaaaaaaaaaaaaaaaaaaaaaaaaaaaaaaaaaaaaaaaa

SEQ ID NO: 29667 - RNA, 1665 nt, Artificial Sequence
  mRNA product Design i-3 (A100) comprising derived and/or modified sequence from LASV(Mad39;Clade IV)__ANH09722__GPCmut5 (opt1)
aggagaaagcuuaccaugggccagaucgugaccuucuuccaggaggucccccacgugaucgaggaggugaugaacaucguccugaucgcccucagcauccuggccgugcugaaggggcucuacaacguggcgaccugcggccugaucgggcuggucacguuccuccugcugugcggccgcuccugcaccaccacccucuacaaggggguguacgagcugcaggcccuggagcucaacauggagacgcugaacaugaccaugccgcugagcugcaccaagaacaacucccaccacuacauccgggugggcaacgagaccggccucgagcugacgcugaccaacaccagccucaucaaccacaaguucugcaaccuguccgacgcccacaagaagaaccuguacgaccacgcccucaugagcaucaucuccaccuuccaccugagcauccccaacuucaaccaguacgaggccauguccugcgacuucaacgacgggaagaucagcguccaguacaaccugucccacacguacgcgggcgacaccgccaaccacugcgggaccguggccaacggcgugcuccagaccuucaugcgcauggccuggggcgggagcuacaucgcgcuggacuccggcugcgggggcugggacugcaucaugacgagcuaccaguaccugaucauccagaacaccaccugggaggaccacugccaguucucccggcccagccccaucggguaccucggccugcugucccagcgcacccgggacaucuacaucagccgccggcuccugggcacguucaccuggacccuguccgacagcgaggggaaggacaccccgggcggguacugccucacgcgcuggaugcugaucgaggccgagcugaagugcuucggcaacaccgccgucgccaagugcaacgagaagcacgacgaggaguucugcgacaugcuccggcuguucgacuucaacaagcaggccauccagcgccugaaggcgcccgcccagaugagcauccagcucaucaacaaggccgugaacgcccugaucaacgaccagcugaucaugaagaaccaccuccgggacaucaugugcauccccuacugcaacuacuccaaguacugguaccugaaccacaccgugaccgggaagacgagccugcccaagugcuggcucgucuccaacggcagcuaccugaacgagacccacuucuccgacgacaucgagcagcaggccgacaacaugaucaccgagaugcugcagaaggaguacauggagcgccagggcaagaccccgcuggggcucguggaccuguucguguucagcacguccuucuaccugaucagcaucuuccuccaccuggucaagauccccacccaccggcacguggugggcaagcccugccccaagccgcaccgccugaaccacauggggaucugcuccugcggcuucuacaagcagcccgggguccccgugcgguggaagcgcugaggacuaguuauaagacugacuagcccgaugggccucccaacgggcccuccuccccuccuugcaccgagauuaauaaaaaaaaaaaaaaaaaaaaaaaaaaaaaaaaaaaaaaaaaaaaaaaaaaaaaaaaaaaaaaaaaaaaaaaaaaaaaaaaaaaaaaaaaaaaaaaaaaaa

SEQ ID NO: 29668 - RNA, 1665 nt, Artificial Sequence
  mRNA product Design i-3 (A100) comprising derived and/or modified sequence from LASV(Z0947-SLE-2011;Clade IV)__AIT17840__GPCmut5 (opt1)
aggagaaagcuuaccaugggccagaucgugaccuucuuccaggaggucccccacgugaucgaggaggugaugaacaucguccugaucgcccucagcauccuggccgugcugaaggggcucuacaacuucgcgaccugcggccugguggggcuggucacguuccuccugcugugcggccgcuccugcaccaucagccucuacaaggggguguacgagcugcagacccuggagcucaacauggagacccugaacaugacgaugccgcuguccugcaccaagaacaacagccaccacuacaucauggugggcaacgagaccggccucgagcugacccugacgaacaccuccaucaucaaccacaaguucugcaaccucagcgacgcccacaagaagaaccuguacgaccacgcccugauguccaucaucagcaccuuccaccucuccauccccaacuucaaccaguacgaggccaugagcugcgacuucaacgggggcaagaucuccguccaguacaaccugagccacuccuacgccggggacgcggccaaccacugcggcaccguggccaacggggugcugcagacguucaugcggauggccuggggcggcagcuacaucgcgcucgacuccgggugcgaccgcugggacugcaucaugaccagcuaccaguaccugaucauccagaacaccaccugggaggaccacugccaguucucccggcccagccccaucggcuaccuggggcuccugucccagcgcacgcgggacaucuacaucagccgccggcugcucggcaccuucaccuggacccugagcgacuccgagggcaaggacacgcccgggggcuacugccugacccgcuggaugcucaucgaggccgagcugaagugcuucgggaacaccgccgucgccaagugcaacgagaagcacgacgaggaguucugcgacaugcugcggcuguucgacuucaacaagcaggccauccagcgccugaaggcgccggcccagaugagcauccagcugaucaacaaggccgugaacgcccucaucaacgaccagcugaucaugaagaaccaccuccgggacaucaugugcauccccuacugcaacuacuccaaguacugguaccucaaccacaccacgaccggcaagaccagccugcccaagugcuggcugguguccaacgggagcuaccucaacgagacccacuucuccgacgacaucgagcagcaggccgacaacaugaucacggagaugcugcagaaggaguacauggagcgccagggcaagaccccgcugggccuggucgaccucuucguguucagcaccuccuucuaccugaucagcaucuuccugcaccucgugaagauccccacccaccggcacaucgucgggaagcccugccccaagccgcaccgccugaaccacaugggcaucugcuccugcgggcuguacaagcagcccggcgugcccgugaaguggaagcggugaggacuaguuauaagacugacuagcccgaugggccucccaacgggcccuccuccccuccuugcaccgagauuaauaaaaaaaaaaaaaaaaaaaaaaaaaaaaaaaaaaaaaaaaaaaaaaaaaaaaaaaaaaaaaaaaaaaaaaaaaaaaaaaaaaaaaaaaaaaaaaaaaaaa

SEQ ID NO: 29669 - RNA, 1665 nt, Artificial Sequence
  mRNA product Design i-3 (A100) comprising derived and/or modified sequence from LASV(Josiah;Clade IV)__NP_694870__GPCmut5 (opt4)
aggagaaagcuuaccaugggccagaucgugaccuucuuccaggaggugccccacgugaucgaggaggugaugaacaucgugcugaucgcccugagcgugcuggccgugcugaagggccuguacaacuucgccaccugcggccuggugggccuggugaccuuccugcugcugugcggcagaagcugcaccaccagccuguacaagggcguguacgagcugcagacccuggagcugaacauggagacccugaacaugaccaugccccugagcugcaccaagaacaacagccaccacuacaucauggugggcaacgagaccggccuggagcugacccugaccaacaccagcaucaucaaccacaaguucugcaaccugagcgacgcccacaagaagaaccuguacgaccacgcccugaugagcaucaucagcaccuuccaccugagcauccccaacuucaaccaguacgaggccaugagcugcgacuucaacggcggcaagaucagcgugcaguacaaccugagccacagcuacgccggcgacgccgccaaccacugcggcaccguggccaacggcgugcugcagaccuucaugagaauggccuggggcggcagcuacaucgcccuggacagcggcugcggcaacugggacugcaucaugaccagcuaccaguaccugaucauccagaacaccaccugggaggaccacugccaguucagcagacccagccccaucggcuaccugggccugcugagccagagaaccagagacaucuacaucagcagaagacugcugggcaccuucaccuggacccugagcgacagcgagggcaaggacacccccggcggcuacugccugaccagauggaugcugaucgaggccgagcugaagugcuucggcaacaccgccguggccaagugcaacgagaagcacgacgaggaguucugcgacaugcugagacuguucgacuucaacaagcaggccauccagagacugaaggcccccgcccagaugagcauccagcugaucaacaaggccgugaacgcccugaucaacgaccagcugaucaugaagaaccaccugagagacaucaugugcauccccuacugcaacuacagcaaguacugguaccugaaccacaccaccaccggcagaaccagccugcccaagugcuggcuggugagcaacggcagcuaccugaacgagacccacuucagcgacgacaucgagcagcaggccgacaacaugaucaccgagaugcugcagaaggaguacauggagagacagggcaagaccccccugggccugguggaccuguucguguucagcaccagcuucuaccugaucagcaucuuccugcaccuggugaagauccccacccacagacacaucgugggcaagagcugccccaagccccacagacugaaccacaugggcaucugcagcugcggccuguacaagcagcccggcgugcccgugaaguggaagagaugaggacuaguuauaagacugacuagcccgaugggccucccaacgggcccuccuccccuccuugcaccgagauuaauaaaaaaaaaaaaaaaaaaaaaaaaaaaaaaaaaaaaaaaaaaaaaaaaaaaaaaaaaaaaaaaaaaaaaaaaaaaaaaaaaaaaaaaaaaaaaaaaaaaa

SEQ ID NO: 29670 - RNA, 1662 nt, Artificial Sequence
  mRNA product Design i-3 (A100) comprising derived and/or modified sequence from LASV(LP;Clade I)__AAF86701__GPCmut5 (opt4)
aggagaaagcuuaccaugggccagaucaucaccuucuuccaggaggugccccacgugaucgaggaggugaugaacaucgugcugaucgcccugagccugcuggccauccugaagggccuguacaacaucgccaccugcggcaucaucggccugguggccuuccuguuccugugcggcaagagcugcagccugacccugaagggcggcuacgagcugcagacccuggagcugaacauggagacccugaacaugaccaugccccugagcugcaccaagaacagcagccaccacuacaucagagugggcaacgagaccggccuggagcugacccugaccaacaccagcaucaucaaccacaaguucugcaaccugagcgacgcccacaagaagaaccuguacgaccacgcccugaugagcaucaucagcaccuuccaccugagcauccccaacuucaaccaguacgaggccaugagcugcgacuucaacggcggcaagaucagcgugcaguacaaccugagccacagcuacgccggcgacgccgccgagcacugcggcaccguggccaacggcgugcugcagaccuucaugagaauggccuggggcggcagauacaucgcccuggacagcggcugcggcaacugggacugcaucaugaccagcuaccaguaccugaucauccagaacaccaccugggaggaccacugccaguucagcagacccagccccaucggcuaccugggccugcugagccagagaaccagagacaucuacaucagcagaagacugcugggcaccuucaccuggacccugagcgacagcgagggcaacgagacccccggcggcuacugccugaccagauggaugcugaucgaggccgagcugaagugcuucggcaacaccgccguggccaagugcaacgagaagcacgacgaggaguucugcgacaugcugagacuguucgacuucaacaagcaggccaucagaagacugaaggcccccgcccagaugagcauccagcugaucaacaaggccgugaacgcccugaucaacgaccagcugaucaugaagaaccaccugagagacaucaugugcauccccuacugcaacuacagcaaguacugguaccugaaccacaccagcagcggcagaaccagccugcccaagugcuggcugaucagcaacggcagcuaccugaacgagacccaguucagcgacgacaucgagcagcaggccgacaacaugaucaccgagaugcugcagaaggaguacaucgagagacagggcaagaccccccugggccugguggacaucuucaucuucagcaccagcuucuaccugaucagcaucuuccugcaccugaucaagauccccacccacagacacaucgugggcaagcccugccccaagccccacagacugaaccacaugggcgugugcagcugcggccuguacaagcaccccggcgugcccaccaaguggaagagaugaggacuaguuauaagacugacuagcccgaugggccucccaacgggcccuccuccccuccuugcaccgagauuaauaaaaaaaaaaaaaaaaaaaaaaaaaaaaaaaaaaaaaaaaaaaaaaaaaaaaaaaaaaaaaaaaaaaaaaaaaaaaaaaaaaaaaaaaaaaaaaaaaaaa

SEQ ID NO: 29671 - RNA, 1662 nt, Artificial Sequence
  mRNA product Design i-3 (A100) comprising derived and/or modified sequence from LASV(803213;Clade II)__AAF86703__GPCmut5 (opt4)
aggagaaagcuuaccaugggccagaucaucaccuucuuccaggaggugccccacgugaucgaggaggugaugaacaucgugcugaucgcccugagccugcuggccauccugaagggcaucuacaacguggccaccugcggccuguucggccugaucagcuuccugcugcugugcggcagaagcugcagcgugaccuacaagggcguguacgagcugcagacccuggagcugaacauggccaaccugaacaugaccaugccccugagcugcaccaagaacaacagccaccacuacaucauggugggcaacgagaccggccuggagcugacccugaccaacaccagcaucaucaaccacaaguucugcaaccugagcgacgcccacaagaagaaccuguacgaccacgcccugaugagcaucaucagcaccuuccaccugagcauccccaacuucaaccaguacgaggccaugagcugcgacuucaacggcggcaagaucagcgugcaguacaaccugagccacagcuucgccguggacgccgccaaccacugcggcaccaucgccaacggcgugcugcagaccuucaugagaauggccuggggcggcagcuacaucgcccuggacagcggcugcggcaacugggacugcaucaugaccagcuaccaguaccugaucauccagaacaccaccugggaggaccacugccaguucagcagacccagccccaucggcuaccugggccugcugagccagagaaccagagacaucuacaucagcagaagacugcugggcaccuucaccuggacccugagcgacagcgagggcaacgaggcccccggcggcuacugccugaccagauggaugcugaucgaggccgagcugaagugcuucggcaacaccgccguggccaagugcaacgagaagcacgacgaggaguucugcgacaugcugagacuguucgacuucaacaagcaggccaucaagagacugaagacccccgcccagaugagcauccagcugaucaacaaggccgugaacgcccugaucaacgaccagcugaucaugaagaaccaccugagagacaucaugugcauccccuacugcaacuacagcagauacugguaccugaaccacaccgugaccggcaagaccagccugcccagaugcuggcuggugagcaacggcagcuaccugaacgagacccacuucagcgacgacaucgagcagcaggccgacaacaugaucaccgagaugcugcagaaggaguacauggacagacagggcaagaccccccugggccugguggaccuguucguguucagcaccagcuucuaccugaucagcaucuuccugcaccuggugaagauccccacccacagacacaucgugggcaagcccugccccaagccccacagacugaaccacaugggcaucugcagcugcggccuguacaagcaccccggcgugcccgugaaguggaagagaugaggacuaguuauaagacugacuagcccgaugggccucccaacgggcccuccuccccuccuugcaccgagauuaauaaaaaaaaaaaaaaaaaaaaaaaaaaaaaaaaaaaaaaaaaaaaaaaaaaaaaaaaaaaaaaaaaaaaaaaaaaaaaaaaaaaaaaaaaaaaaaaaaaaa

SEQ ID NO: 29672 - RNA, 1662 nt, Artificial Sequence
  mRNA product Design i-3 (A100) comprising derived and/or modified sequence from LASV(GA391;Clade III)__CAA36645__GPCmut5 (opt4)
aggagaaagcuuaccaugggccagaucgugaccuucuuccaggaggugccccacgugaucgaggaggugaugaacaucgugcugaucgcccugagcauccuggccauccugaagggccuguacaacguggccaccugcggccugaucggccuggugaccuuccugcugcugagcggcagaagcugcagccugaucuacaagggcaccuacgagcugcagacccuggagcugaacauggagacccugaacaugaccaugccccugagcugcaccaagaacaacagccaccacuacaucagagugggcaacgagaccggccuggagcugacccugaccaacaccagcauccugaaccacaaguucugcaaccugagcgacgcccacaagagaaaccuguacgaccacagccugaugagcaucaucagcaccuuccaccugagcauccccaacuucaaccaguacgaggccaugagcugcgacuucaacggcggcaagaucaccgugcaguacaaccugagccacagcuucgccguggacgccgccggccacugcggcacccuggccaacggcgugcugcagaccuucaugagaauggccuggggcggcagcuacaucgcccuggacagcggcugcggcaacugggacugcaucaugaccagcuaccaguaccugaucauccagaacaccaccugggacgaccacugccaguucagcagacccagccccaucggcuaccugggccugcugagccagagaaccagagacaucuacaucagcagaagacugcugggcaccuucaccuggacccugagcgacagcgagggcaacgagacccccggcggcuacugccugaccagauggaugcugaucgaggccgagcugaagugcuucggcaacaccgccguggccaagugcaacgagaagcacgacgaggaguucugcgacaugcugagacuguucgacuucaacaagcaggccaucagaagacugaagacccccgcccagaugagcauccagcugaucaacaaggccgugaacgcccugaucaacgaccagcugaucaugaagaaccaccugagagacaucaugugcauccccuacugcaacuacagcagauacugguaccugaaccacaccagcaccggcaagaccagccugcccagaugcuggcugaucagcaacggcagcuaccugaacgagaccaaguucagcgacgacaucgagcagcaggccgacaacaugaucaccgagaugcugcagaaggaguacaucgacagacagggcaagaccccccugggccugguggaccuguucguguucagcaccagcuucuaccugaucagcaucuuccugcaccuggugaagauccccacccacagacacaucgugggcaagcccugccccaagccccacagacugaaccacaugggcaucugcagcugcggccuguacaagcagcccggcgugcccgugagauggaagagaugaggacuaguuauaagacugacuagcccgaugggccucccaacgggcccuccuccccuccuugcaccgagauuaauaaaaaaaaaaaaaaaaaaaaaaaaaaaaaaaaaaaaaaaaaaaaaaaaaaaaaaaaaaaaaaaaaaaaaaaaaaaaaaaaaaaaaaaaaaaaaaaaaaaa

SEQ ID NO: 29673 - RNA, 1665 nt, Artificial Sequence
  mRNA product Design i-3 (A100) comprising derived and/or modified sequence from LASV(AV;Clade V)__CCA30314__GPCmut5 (opt4)
aggagaaagcuuaccaugggccagaucgugaccuucuuccaggaggugccccacgugaucgaggaggugaugaacaucgugcugaucgcccugagcauccuggccgugcugaagggccuguacaacaucgccaccugcggccugaucggccugaucaccuuccugcugcugugcggcagaagcugcagcagcaaccuguacaagggcguguacgagcugcagagccuggaccugaacauggagacccugaacaugaccaugccccugagcugcaccaagaacaacagccaccacuacaucagagugggcaacgacaccggccuggagcugacccugaccaacaccagcauccugaaccacaaguucugcaaccugagcgacgcccacaagaaggaccuguacgaccacgcccugaugagcaucaucagcaccuuccaccugagcauccccaacuucaaccaguacgaggccaugagcugcgacuucaacggcggcaagaucagcgugcaguacaaccugagccacagcuacgccaucgacgccgccaaccacugcggcaccguggccaacggcauccugcagaccuucaugagaauggccuggggcggcagcuacaucgcccuggacagcggcugcggcaacugggacugcaucaugaccagcuaccaguaccugaucauccagaacaccaccugggagaaccacugccaguucagcagacccagccccaucggcuaccugggccugcugagccagagaaccagagacaucuacaucagcagaagacugcugggcaccuucaccuggacccugagcgacagcgagggcaacgccacccccggcggcuacugccugaccagauggaugcugaucgaggccgagcugaagugcuucggcaacaccgccguggccaagugcaacgagaagcacgacgaggaguucugcgacaugcugagacuguucgacuucaacaagcaggccaucagcagacugaagagccccgcccagaugagcauccagcugaucaacaaggccgugaacgcccugaucaacgaccagcugaucaugaagaaccaccugagagacaucaugugcauccccuacugcaacuacagcaaguacugguaccugaaccacaccaucaccggcaagaccagccugcccaagugcuggcuggugagcaacggcagcuaccugaacgagacccacuucagcgacgacaucgagcagcaggccgacaacaugaucaccgagaugcugcagaaggaguacauggagagacagggcaagaccccccugggccugguggaccuguucguguucagcaccagcuucuaccugaucagcaucuuccugagacuggugaagauccccacccacagacacaucgugggcaagcccugccccaagccccacagacugaaccacaugggcaucugcagcugcggccuguacaagcagcccggcgugcccgugagauggaagagaugaggacuaguuauaagacugacuagcccgaugggccucccaacgggcccuccuccccuccuugcaccgagauuaauaaaaaaaaaaaaaaaaaaaaaaaaaaaaaaaaaaaaaaaaaaaaaaaaaaaaaaaaaaaaaaaaaaaaaaaaaaaaaaaaaaaaaaaaaaaaaaaaaaaa

SEQ ID NO: 29674 - RNA, 1662 nt, Artificial Sequence
  mRNA product Design i-3 (A100) comprising derived and/or modified sequence from LASV(Togo/2016/7082;Clade VI)__AMR44577__GPCmut5 (opt4)
aggagaaagcuuaccaugggccagaucaucaccuucuuccaggaggugccccacgugaucgaggaggugaugaacaucgugcugaucgcccugagccugcuggccauccugaagggcguguacaacguggccaccugcggcaucaucggccuggugaccuuccuguuccugugcggcagaagcugcagccugaucuacaagggcagcuacgagcugcagacccuggagcugaacauggagacccugaacaugaccaugccccugagcugcaccaagaacagcagccaccacuacaucagagugggcaacgagaccggccuggagcugacccugaccaacaccagcaucaucaaccacaaguucugcaaccugagcgacgcccacaagagaaaccuguacgaccacgcccugaugagcauccugagcaccuuccaccugagcauccccaacuucaaccaguacgaggccaugagcugcgacuucaacggcggcaagaucagcgugcaguacaaccugagccacgccuacgccguggacgccgccgagcacugcggcaccguggccaacggcgugcugcagaccuucaugagaauggccuggggcggcagcuacaucgcccuggacagcggcugcggcaacugggacugcaucaugaccagcuaccaguaccugaucauccagaacaccaccugggaggaccacugccaguucagcagacccagccccaucggcuaccugggccugcugagccagagaaccagagacaucuacaucagcagaagacugcugggcaccuucaccuggacccugagcgacagcgagggcaacgagacccccggcggcuacugccugaccagauggaugcugaucgaggccgagcugaagugcuucggcaacaccgccguggccaagugcaacgagaagcacgacgaggaguucugcgacaugcugagacuguucgacuucaacaagcaggccauccagagacugaagagccccgcccagaugagcauccagcugaucaacaaggccgugaacgcccugaucaacgaccagcugaucaugaagaaccaccugagagacaugaugugcauccccuacugcaacuacagcaaguacugguaccugaaccacaccagcagcggcagaaccagccugcccaagugcuggcuggugagcaacggcagcuaccugaacgagacccacuucagcgacgacaucgagcagcaggccgacaacaugaucaccgagaugcugcagaaggaguacaucgacagacagggcaagaccccccugggccugguggaccuguucguguucagcaccagcuucuaccugaucagcaucuuccugcaccugaucaagauccccacccacagacacaucgugggcaagcccugccccaagccccacagacugaaccacaugggcaucugcagcugcggccuguacaagcagcccggcgugcccaccagauggaagagaugaggacuaguuauaagacugacuagcccgaugggccucccaacgggcccuccuccccuccuugcaccgagauuaauaaaaaaaaaaaaaaaaaaaaaaaaaaaaaaaaaaaaaaaaaaaaaaaaaaaaaaaaaaaaaaaaaaaaaaaaaaaaaaaaaaaaaaaaaaaaaaaaaaaa

SEQ ID NO: 29675 - RNA, 1662 nt, Artificial Sequence
  mRNA product Design i-3 (A100) comprising derived and/or modified sequence from LASV(KAK-428;Clade n.d. (VII))__ANH09740__GPCmut5 (opt4)
aggagaaagcuuaccaugggccagaucgugaccuucuuccaggaggugccccacgugaucgaggaggugaugaacaucgugcugaucgcccugagccugcuggccauccugaagggccuguacaacuucgccaccugcggcgugaucggccugaucaccuuccugcugcugugcggcagaagcugcagcgccaccuacaagggccaguacgagcugcagacccuggagcugaacauggagagccugaacaugaccaugccccugagcugcaccaagaacaacagccaccacuacaucagagccggcaacaacaccggccuggagcugacccugaccaacaccagcaucaucagccacaaguucugcaaccugagcgacgcccacaagaagaaccuguacgaccacacccugaugagcaucaucaccaccuuccaccugagcauccccaacuucaaccaguacgaggccaugagcugcgacuucaacggcggcaagaucagcauccaguacaaccugagccacagcuacgccggcgacgccgcccagcacugcggcaccguggccaacggcgugcugcagaccuucaugagaauggccuggggcggcagcuaccuggcccuggacagcggcugcagaggcugggacugcaucaucagcagcuaccaguaccugaucauccagaacaccaccugggacgaccacugccaguucagcagacccagccccaucggcuaccugggcuucgugagccagaagaccagagacaucuacaucagcagaagacugcugggcaccuucaccuggacccugagcgacagcgagggccacgacaugcccggcggcuacugccugaccagauggaugcugaucgaggccgaccugaagugcuucggcaacaccgccguggccaagugcaacgagaagcacgacgaggaguucugcgacauguggagacuguucgacuucaacaagcaggccauccagagacugaaggcccccgcccagaugaacauccagcugaucaacaaggccgugaacgcccugaucaacgaccagcugaugaugaagaaccaccugagagacaucaugugcauccccuacugcaacuacagcaaguucugguaccugaacaacaccaccaccggcagaaccagccugcccagaugcuggcugaucagcaacggcagcuaccugaacgagacccacuucagcgacgacaucgagcagcaggccgacaacaugaucaccgagaugcugcagaaggaguacauggacagacagggcaagaccccccugggccugguggaccuguucguguucagcaccagcuucuaccugaucaccaucuuccugcaccuggugaagauccccacccacagacacaucgugggcaagcccugccccaagccccacagacugaaccacaugggcaucugcagcugcggccuguacaagcagcccggcgugcccgugagauggaagagaugaggacuaguuauaagacugacuagcccgaugggccucccaacgggcccuccuccccuccuugcaccgagauuaauaaaaaaaaaaaaaaaaaaaaaaaaaaaaaaaaaaaaaaaaaaaaaaaaaaaaaaaaaaaaaaaaaaaaaaaaaaaaaaaaaaaaaaaaaaaaaaaaaaaa

SEQ ID NO: 29676 - RNA, 1662 nt, Artificial Sequence; identical to SEQ ID NO: 29670
  mRNA product Design i-3 (A100) comprising derived and/or modified sequence from LASV(Pinneo-NIG-1969;Clade I)__AIT17836__GPCmut5 (opt4)

SEQ ID NO: 29677 - RNA, 1662 nt, Artificial Sequence
  mRNA product Design i-3 (A100) comprising derived and/or modified sequence from LASV(ISTH0009-NIG-2011;Clade II)__AIT17404__GPCmut5 (opt4)
aggagaaagcuuaccaugggccagaucaucaccuucuuccaggaggugccccacgugaucgaggaggugaugaacaucgugcugaucgcccugagccugcuggccauccugaagggcaucuacaacguggccaccugcggccuguucggccuggugagcuuccugcugcugugcggcagaagcugcagcaccaccuacaagggcguguacgagcugcagacccuggagcuggacauggccagccugaacaugaccaugccccugagcugcaccaagaacaacagccaccacuacaucauggugggcaacgagaccggccuggagcugacccugaccaacaccagcaucaucaaccacaaguucugcaaccugagcgacgcccacaagaagaaccuguacgaccacgcccugaugagcaucaucagcaccuuccaccugagcauccccaacuucaaccaguacgaggccaugagcugcgacuucaacggcggcaagaucagcgugcaguacaaccugagccacgccuacgccguggacgccgccaaccacugcggcaccaucgccaacggcgugcugcagaccuucaugagaauggccuggggcggcagcuacaucgcccuggacagcggcugcggcagcugggacugcaucaugaccagcuaccaguaccugaucauccagaacaccaccugggaggaccacugccaguucagcagacccagccccaucggcuaccugggccugcugagccagagaaccagagacaucuacaucagcagaagacugcugggcaccuucaccuggacccugagcgacagcgagggcaacgagacccccggcggcuacugccugaccagauggaugcugaucgaggccgagcugaagugcuucggcaacaccgccguggccaagugcaacgagaagcacgacgaggaguucugcgacaugcugagacuguucgacuucaacaagcaggccaucagaagacugaagacccccgcccagaugagcauccagcugaucaacaaggccgugaacgcccugaucaacgaccagcugaucaugaagaaccaccugagagacaucaugugcauccccuacugcaacuacagcaaguacugguaccugaaccacaccgugaccggcaagaccagccugcccagaugcuggcuggugagcaacggcagcuaccugaacgagacccacuucagcgacgacaucgagcagcaggccgacaacaugaucaccgagcugcugcagaaggaguacauggacagacagggcaagaccccccugggccugguggaccuguucguguucagcaccagcuucuaccugaucagcaucuuccugcaccugaucaagauccccacccacagacacaucaccggcaagcccugccccaagccccacagacugaaccacaugggcaucugcagcugcggccuguacaagcaccccggcgugcccgugaaguggaagagaugaggacuaguuauaagacugacuagcccgaugggccucccaacgggcccuccuccccuccuugcaccgagauuaauaaaaaaaaaaaaaaaaaaaaaaaaaaaaaaaaaaaaaaaaaaaaaaaaaaaaaaaaaaaaaaaaaaaaaaaaaaaaaaaaaaaaaaaaaaaaaaaaaaaa

SEQ ID NO: 29678 - RNA, 1662 nt, Artificial Sequence
  mRNA product Design i-3 (A100) comprising derived and/or modified sequence from LASV(ISTH2010-NIG-2012;Clade II)__AIT17482__GPCmut5 (opt4)
aggagaaagcuuaccaugggccagaucaucaccuucuuccaggaggugccccacgugaucgaggaggugaugaacaucgugcugaucgcccugagccugcuggccauccugaagggcaucuacaacguggccaccugcggccuguucggccuggugagcuuccugcugcugugcggcagaagcugcagcaccaccuacaagggcguguacgagcugcagacccuggagcuggacauggccagccugaacaugaccaugccccugagcugcaccaagaacaacagccaccacuacaucauggugggcaacgagaccggccuggagcugacccugaccaacaccagcaucaucaaccacaaguucugcaaccugagcgacgcccacaagaagaaccuguacgaccacgcccugaugagcaucaucagcaccuuccaccugagcauccccaacuucaaccaguacgaggccaugagcugcgacuucaacggcggcaagaucagcgugcaguacaaccugagccacgccuacgccguggacgccgccaaccacugcggcaccaucgccaacggcgugcugcagaccuucaugagaauggccuggggcggcagcuacaucgcccuggacagcggcugcggcagcugggacugcaucaugaccagcuaccaguaccugaucauccagaacaucaccugggaggaccacugccaguucagcagacccagccccaucggcuaccugggccugcugagccagagaaccagagacaucuacaucagcagaagacugcugggcaccuucaccuggacccugagcgacagcgagggcaacgagacccccggcggcuacugccugaccagauggaugcugaucgaggccgagcugaagugcuucggcaacaccgccguggccaagugcaacgagaagcacgacgaggaguucugcgacaugcugagacuguucgacuucaacaagcaggccaucagaagacugaagacccccgcccagaugagcauccagcugaucaacaaggccgugaacgcccugaucaacgaccagcugaucaugaagaaccaccugagagacaucaugugcauccccuacugcaacuacagcaaguacugguaccugaaccacaccgugaccggcaagaccagccugcccagaugcuggcuggugagcaacggcagcuaccugaacgagacccacuucagcgacgacaucgagcagcaggccgacaacaugaucaccgagcugcugcagaaggaguacaucgacagacagggcaagaccccccugggccugguggaccuguucguguucagcaccagcuucuaccugaucagcaucuuccugcaccuggugaagauccccacccacagacacguggugggcaagcccugccccaagccccacagacugaaccacaugggcaucugcagcugcggccuguacaagcaccccggcgugcccgugaaguggaagagaugaggacuaguuauaagacugacuagcccgaugggccucccaacgggcccuccuccccuccuugcaccgagauuaauaaaaaaaaaaaaaaaaaaaaaaaaaaaaaaaaaaaaaaaaaaaaaaaaaaaaaaaaaaaaaaaaaaaaaaaaaaaaaaaaaaaaaaaaaaaaaaaaaaaa

SEQ ID NO: 29679 - RNA, 1662 nt, Artificial Sequence
  mRNA product Design i-3 (A100) comprising derived and/or modified sequence from LASV(Lassa virus/H.sapiens-wt/NGA/2015/ISTH_0543;Clade II)__AVO03639__GPCmut5 (opt4)
aggagaaagcuuaccaugggccagaucaucaccuucuuccaggaggugccccacgugaucgaggaggugaugaacaucgugcugaucgcccugagccugcuggccauccugaagggcaucuacaacguggccaccugcggccuguucggccuggugagcuuccugcugcugugcggcagaagcugcagcaccaccuacaagggcguguacgagcugcagacccuggagcuggacauggccaaccugaacaugaccaugccccugagcugcaccaagaacaacagccaccacuacaucauggugggcaacgagaccggccuggagcugacccugaccaacaccagcaucaucaaccacaaguucugcaaccugagcgacgcccacaagaagaaccuguacgaccacgcccugaugagcaucaucagcaccuuccaccugagcauccccaacuucaaccaguacgaggccaugagcugcgacuucaacggcggcaagaucagcgugcaguacaaccugagccacaccuacgccguggacgccgccaaccacugcggcaccaucgccaacggcgugcugcagaccuucaugagaauggccuggggcggcagcuacaucgcccuggacagcggcugcggcagcugggacugcaucaugaccagcuaccaguaccuggugauccagaacaccaccugggaggaccacugccaguucagcagacccagccccaucggcuaccugggccugcugagccagagaaccagagacaucuacaucagcagaagacugcugggcaccuucaccuggacccugagcgacagcgagggcaacgagacccccggcggcuacugccugaccagauggaugcugaucgaggccgagcugaagugcuucggcaacaccgccguggccaagugcaacgagaagcacgacgaggaguucugcgacaugcugagacuguucgacuucaacaagcaggccaucagaagacugaagacccccgcccagaugagcauccagcugaucaacaaggccgugaacgcccugaucaacgaccagcugaucaugaagaaccaccugagagacaucaugugcauccccuacugcaacuacagcaaguacugguaccugaaccacaccgugaccggcaagaccagccugcccagaugcuggcuggugagcaacggcagcuaccugaacgagacccacuucagcgacgacaucgagcagcaggccgacaacaugaucaccgagcugcugcagaaggaguacaucgacagacagggcaagaccccccugggccugguggaccuguucguguucagcaccagcuucuaccugaucagcaucuuccugcaccuggugaagauccccacccacagacacaucaccggcaagcccugccccaagccccacagacugaaccacaugggcaucugcagcugcggccuguacaagcaccccggcgugcccgugaaguggaagagaugaggacuaguuauaagacugacuagcccgaugggccucccaacgggcccuccuccccuccuugcaccgagauuaauaaaaaaaaaaaaaaaaaaaaaaaaaaaaaaaaaaaaaaaaaaaaaaaaaaaaaaaaaaaaaaaaaaaaaaaaaaaaaaaaaaaaaaaaaaaaaaaaaaaa

SEQ ID NO: 29680 - RNA, 1662 nt, Artificial Sequence
  mRNA product Design i-3 (A100) comprising derived and/or modified sequence from LASV(Lassa virus/H.sapiens-wt/NGA/2016/ISTH_0009;Clade II)__AVO03571__GPCmut5 (opt4)
aggagaaagcuuaccaugggccagaucaucaccuucuuccaggaggugccccacgugaucgaggaggugaugaacaucgugcugaucgcccugagccugcuggccauccugaagggcaucuacaacguggccaccugcggccugcugggccuggugagcuuccugcugcugugcggcagaagcugcagcaccaccuacaagggcguguacgagcugcagacccuggagcuggacauggccagccugaacaugaccaugccccugagcugcaccaagaacaacagccaccacuacaucauggugggcaacgagaccggccuggagcugacccugaccaacaccagcaucaucaaccacaaguucugcaaccugagcgacgcccacaagaagaaccuguacgaccacgcccugaugagcaucaucagcaccuuccaccugagcauccccaacuucaaccaguacgaggccaugagcugcgacuucaacggcggcagaaucagcgugcaguacaaccugagccacagcuacgccguggacgccgccaaccacugcggcaccaucgccaacggcgugcugcagaccuucaugagaauggccuggggcggcagcuacaucgcccuggacagcggcugcggcagcugggacugcaucaugaccagcuaccaguaccugaucauccagaacaccaccugggaggaccacugccaguucagcagacccagccccaucggcuaccugggccugcugagccagagaaccagagacaucuacaucagcagaagacugcugggcaccuucaccuggacccugagcgacagcgagggcaacgagacccccggcggcuacugccugaccagauggaugcugaucgaggccgagcugaagugcuucggcaacaccgccguggccaagugcaacgagaagcacgacgaggaguucugcgacaugcugagacuguucgacuucaacaagcaggccaucagaagacugaagacccccgcccagaugagcauccagcugaucaacaaggccgugaacgcccugaucaacgaccagcugaucaugaagaaccaccugagagacaucaugugcauccccuacugcaacuacagcaaguacugguaccugaaccacaccgugaccggcaagaccagccugcccagaugcuggcuggugagcaacggcagcuaccugaacgagacccacuucagcgacgacaucgagcagcaggccgacaacaugaucaccgagcugcugcagaaggaguacaucgacagacagggcaagaccccccugggccugguggaccuguucguguucagcaccagcuucuaccugaucagcaucuuccugcaccuggugaagauccccacccacagacacaucaccggcaagcccugccccaagccccacagacugaaccacaugggcaucugcagcugcggccuguacaaccaccccggcgugcccgugaaguggaagagaugaggacuaguuauaagacugacuagcccgaugggccucccaacgggcccuccuccccuccuugcaccgagauuaauaaaaaaaaaaaaaaaaaaaaaaaaaaaaaaaaaaaaaaaaaaaaaaaaaaaaaaaaaaaaaaaaaaaaaaaaaaaaaaaaaaaaaaaaaaaaaaaaaaaa

SEQ ID NO: 29681 - RNA, 1662 nt, Artificial Sequence
  mRNA product Design i-3 (A100) comprising derived and/or modified sequence from LASV(Lassa virus/H.sapiens-wt/NGA/2016/ISTH_0017;Clade II)__AVO03567__GPCmut5 (opt4)
aggagaaagcuuaccaugggccagaucaucaccuucuuccaggaggugccccacgugaucgaggaggugaugaacaucgugcugaucgcccugagccugcuggccauccugaagggcaucuacaacguggccaccugcggccuguucggccuggugagcuuccugcugcugugcggcagaagcugcagcaccaccuacaagggcguguacgagcugcagacccuggagcuggacauggccagccugaacaugaccaugccccugagcugcaccaagaacaacagccaccacuacaucauggugggcaacgagaccggccuggagcugacccugaccaacaccagcaucaucaaccacaaguucugcaaccugagcgacgcccacaagaagaaccuguacgaccacgcccugaugagcaucaucagcaccuuccaccugagcauccccaacuucaaccaguacgaggccaugagcugcgacuucaacggcggcaagaucagcgugcaguacaaccugagccacaccuacgccaucgacgccgccaaccacugcggcaccaucgccaacggcgugcugcagaccuucaugagaauggccuggggcggcagcuacaucgcccuggacagcggcugcggcagcugggacugcaucaugaccagcuaccaguaccugaucauccagaacaccaccugggaggaccacugccaguucagcagacccagccccaucggcuaccugggccugcugagccagagaaccagagacaucuacaucagcagaagacugcugggcaccuucaccuggacccugagcgacagcgagggcaacgagacccccggcggcuacugccugaccagauggaugcugaucgaggccgagcugaagugcuucggcaacaccgccguggccaagugcaacgagaagcacgacgaggaguucugcgacaugcugagacuguucgacuucaacaagcaggccaucagaagacugaagacccccgcccagaugagcauccagcugaucaacaaggccgugaacgcccugaucaacgaccagcugaucaugaagaaccaccugagagacaucaugugcauccccuacugcaacuacagcaaguacugguaccugaaccacaccgugaccggcaagaccagccugcccagaugcuggcuggugagcaacggcagcuaccugaacgagacccacuucagcgacgacaucgagcagcaggccgacaacaugaucaccgagcugcugcagaaggaguacauggacagacagggcaagaccccccugggccugguggaccuguucguguucagcaccagcuucuaccugaucagcaucuuccugcaccuggugagaauccccacccacagacacgugaucggcaagcccugccccaagccccacagacugaaccacaugggcaucugcagcugcggccuguacaagcaccccggcgugcccgugaaguggaagagaugaggacuaguuauaagacugacuagcccgaugggccucccaacgggcccuccuccccuccuugcaccgagauuaauaaaaaaaaaaaaaaaaaaaaaaaaaaaaaaaaaaaaaaaaaaaaaaaaaaaaaaaaaaaaaaaaaaaaaaaaaaaaaaaaaaaaaaaaaaaaaaaaaaaa

SEQ ID NO: 29682 - RNA, 1662 nt, Artificial Sequence
  mRNA product Design i-3 (A100) comprising derived and/or modified sequence from LASV(Lassa virus/H.sapiens-wt/NGA/2018/ISTH_0959;Clade II)__AVV65099__GPCmut5 (opt4)
aggagaaagcuuaccaugggccagaucaucaccuucuuccaggaggugccccacgugaucgaggaggugaugaacaucgugcugaucgcccugagccugcuggccauccugaagggcaucuacaacguggugaccugcggccuguucggccuggugagcuuccugcugcugugcggcagaagcugcagcaccaccuacaagggcguguacgagcugcagacccuggagcuggacauggccagccugaacaugaccaugccccugagcugcaccaagaacaacagccaccacuacaucauggugggcaacgagaccggccuggagcugacccugaccaacaccagcaucaucaaccacaaguucugcaaccugagcgacgcccacaagaagaaccuguacgaccacgcccugaugagcaucaucagcaccuuccaccugagcauccccaacuucaaccaguacgaggccaugagcugcgacuucaacggcggcaagaucagcgugcaguacaaccugagccacgccuacgccaucgacgccgccaaccacugcggcaccaucgccaacggcgugcugcagaccuucaugagaauggccuggggcggcagcuacaucgcccuggacagcggcugcggcagcugggacugcaucaugaccagcuaccaguaccugaucauccagaacaccaccugggaggaccacugccaguucagcagacccagccccaucggcuaccugggccugcugagccagagaaccagagacaucuacaucagcagaagacugcugggcaccuucaccuggacccugagcgacagcgagggcaacgagacccccggcggcuacugccugaccagauggaugcugaucgaggccgagcugaagugcuucggcaacaccgccguggccaagugcaacgagaagcacgacgaggaguucugcgacaugcugagacuguucgacuucaacaagcaggccaucagaagacugaagacccccgcccagaugagcauccagcugaucaacaaggccgugaacgcccugaucaacgaccagcugaucaugaagaaccaccugagagacaucaugugcauccccuacugcaacuacagcaaguacugguaccugaaccacaccgugaccggcaagaccagccugcccagaugcuggcuggugagcaacggcagcuaccugaacgagacccacuucagcgacgacaucgagcagcaggccgacaacaugaucaccgagcugcugcagaaggaguacaucgacagacagggcaagaccccccugggccugguggaccuguucguguucagcaccagcuucuaccugaucagcaucuuccugcaccuggugaagauccccacccacagacacgugaucggcaagcccugccccaagccccacagacugaaccacaugggcaucugcagcugcggccuguacaagcaccccggcgugcccgugaaguggaagagaugaggacuaguuauaagacugacuagcccgaugggccucccaacgggcccuccuccccuccuugcaccgagauuaauaaaaaaaaaaaaaaaaaaaaaaaaaaaaaaaaaaaaaaaaaaaaaaaaaaaaaaaaaaaaaaaaaaaaaaaaaaaaaaaaaaaaaaaaaaaaaaaaaaaa

SEQ ID NO: 29683 - RNA, 1662 nt, Artificial Sequence
  mRNA product Design i-3 (A100) comprising derived and/or modified sequence from LASV(LASV003-NIG-2008;Clade II)__AIT17580__GPCmut5 (opt4)
aggagaaagcuuaccaugggccagaucaucaccuucuuccaggaggugccccacgugaucgaggaggugaugaacaucgugcugaucgcccugagccugcuggccauccugaagggcaucuacaacguggccaccugcggccuguucggccuggugagcuuccugcugcugugcggcagaagcugcagcaccaccuacaagggcguguacgagcugcagacccuggagcuggacauggccagccugaacaugaccaugccccugagcugcaccaagaacaacagccaccacuacaucauggugggcaacgagaccggccuggagcugacccugaccaacaccagcaucaucaaccacaaguucugcaaccugagcgacgcccacaagaagaaccuguacgaccacgcccugaugagcaucaucagcaccuuccaccugagcauccccaacuucaaccaguacgaggccaugagcugcgacuucaacggcggcaagaucagcgugcaguacaaccugagccacaccuacgccguggacgccgccaaccacugcggcaccaucgccaacggcgugcugcagaccuucaugagaauggccuggggcggcagcuacaucgcccuggacagcggcugcggcagcugggacugcaucaugaccagcuaccaguaccugaucauccagaacaccaccugggaggaccacugccaguucagcagacccagccccaucggcuaccugggccugcugagccagagaaccagagacaucuacaucagcagaagacugcugggcaccuucaccuggacccugagcgacagcgagagcaacgagacccccggcggcuacugccugaccagauggaugcugaucgaggccgagcugaagugcuucggcaacaccgccguggccaagugcaacgagaagcacgacgaggaguucugcgacaugcugagacuguucgacuucaacaagcaggccaucagaagacugaaggcccccgcccagaugagcauccagcugaucaacaaggccgugaacgcccugaucaacgaccagcugaucaugaagaaccaccugagagacaucaugugcauccccuacugcaacuacagcaaguacugguaccugaaccacaccgugaccggcagaaccagccugcccagaugcuggcuggugagcaacggcagcuaccugaacgagacccacuucagcgacgacaucgagcagcaggccgacaacaugaucaccgagcugcugcagaaggaguacauggacagacagggcaagaccccccugggccugguggaccuguucguguucagcaccagcuucuaccugaucagcaucuuccugcaccuggugaagauccccacccacagacacgugaucggcaagcccugccccaagccccacagacugaaccacaugggcaucugcagcugcggccuguacaagcaccccggcgugcccgugaaguggaagagaugaggacuaguuauaagacugacuagcccgaugggccucccaacgggcccuccuccccuccuugcaccgagauuaauaaaaaaaaaaaaaaaaaaaaaaaaaaaaaaaaaaaaaaaaaaaaaaaaaaaaaaaaaaaaaaaaaaaaaaaaaaaaaaaaaaaaaaaaaaaaaaaaaaaa

SEQ ID NO: 29684 - RNA, 1662 nt, Artificial Sequence
  mRNA product Design i-3 (A100) comprising derived and/or modified sequence from LASV(LASV035-NIG-2009;Clade II)__AIT17588__GPCmut5 (opt4)
aggagaaagcuuaccaugggccagaucaucaccuucuuccaggaggugccccacgugaucgaggaggugaugaacaucgugcugaucgcccugagccugcuggccauccugaagggcaucuacaacguggccaccugcggccuguucggccuggugagcuuccugcugcugugcggcagaagcugcagcaccaccuacaagggcguguacgagcugcagacccuggagcuggacauggccagccugaacaugaccaugccccugagcugcaccaagaacaacagccaccacuacaucauggugggcaacgagaccggccuggagcugacccugaccaacaccagcaucaucaaccacaaguucugcaaccugagcgacgcccacaagaagaaccuguacgaccacgcccugaugagcaucaucagcaccuuccaccugagcauccccaacuucaaccaguacgaggccaugagcugcgacuucaacggcggcaagaucagcgugcaguacaaccugagccacgccuacgccguggacgccgccaaccacugcggcaccaucgccaacggcgugcugcagaccuucaugagaauggccuggggcggcagcuacaucgcccuggacagcggcugcggcagcugggacugcaucaugaccagcuaccaguaccugaucauccagaacaccaccugggaggaccacugccaguucagcagacccagccccaucggcuaccugggccugcugagccagagaaccagagacaucuacaucagcagaagacugcugggcaccuucaccuggacccugagcgacagcgagggcaacgagacccccggcggcuacugccugaccagauggaugcugaucgaggccgagcugaagugcuucggcaacaccgccguggccaagugcaacgagaagcacgacgaggaguucugcgacaugcugagacuguucgacuucaacaagcaggccaucagaagacugaaggcccccgcccagaugagcauccagcugaucaacaaggccgugaacgcccugaucaacgaccagcugaucaugaagaaccaccugagagacaucaugugcauccccuacugcaacuacagcaaguacugguaccugaaccacaccgugaccggcaagaccagccugcccagaugcuggcuggugagcaacggcagcuaccugaacgagacccacuucagcgacgacaucgagcagcaggccgacaacaugaucaccgagcugcugcagaaggaguacaucgacagacagggcaagaccccccugggccugguggaccuguucguguucagcaccagcuucuaccugaucagcaucuuccugcaccuggugaagauccccacccacagacacgugaucggcaagcccugccccaagccccacagacugaaccacaugggcaucugcagcugcggccuguacaagcaccccggcgugcccgugaaguggaagagaugaggacuaguuauaagacugacuagcccgaugggccucccaacgggcccuccuccccuccuugcaccgagauuaauaaaaaaaaaaaaaaaaaaaaaaaaaaaaaaaaaaaaaaaaaaaaaaaaaaaaaaaaaaaaaaaaaaaaaaaaaaaaaaaaaaaaaaaaaaaaaaaaaaaa

SEQ ID NO: 29685 - RNA, 1662 nt, Artificial Sequence
  mRNA product Design i-3 (A100) comprising derived and/or modified sequence from LASV(LASV1000-NIG-2009;Clade II)__AIT17782__GPCmut5 (opt4)
aggagaaagcuuaccaugggccagaucaucaccuucuuccaggaggugccccacgugaucgaggaggugaugaacaucgugcugaucgcccugagccugcuggccauccugaagggcaucuacaacguggccaccugcggccuguucggccuggugagcuuccugcugcugugcggcagaagcugcagcaccaccuacaagggcguguacgagcugcagacccuggagcuggacauggccagccugaacaugaccaugccccugagcugcaccaagaacaacagccaccacuacaucauggugggcaacgagaccggccuggagcugacccugaccaacaccagcaucaucaaccacaaguucugcaaccugagcgacgcccacaagaagaaccuguacgaccacgcccugaugagcaucaucagcaccuuccaccugagcauccccaacuucaaccaguacgaggccaugagcugcgacuucaacggcggcaagaucagcgugcaguacaaccugagccacaccuacgccguggacgccgccaaccacugcggcaccaucgccaacggcgugcugcagaccuucaugagaauggccuggggcggcagcuacaucgcccuggacagcggcugcggcagcugggacugcaucaugaccagcuaccaguaccugaucauccagaacaccaccugggaggaccacugccaguucagcagacccagccccaucggcuaccugggccugcugagccagagaaccagagacaucuacaucagcagaagacugcugggcaccuucaccuggacccugagcgacagcgagggcaacgagacccccggcggcuacugccugaccagauggaugcugaucgaggccgagcugaagugcuucggcaacaccgccguggccaagugcaacgagaagcacgacgaggaguucugcgacaugcugagacuguucgacuucaacaagcaggccaucaagagacugaagacccccgcccagaugagcauccagcugaucaacaaggccgugaacgcccugaucaacgaccagcugaucaugaagaaccaccugagagacaucaugugcauccccuacugcaacuacagcaaguacugguaccugaaccacaccgugaccggcaagaccagccugcccagaugcuggcuggugagcaacggcagcuaccugaacgagacccacuucagcgacgacaucgagcagcaggccgacaacaugaucaccgagcugcugcagaaggaguacaucgacagacagggcaagaccccccugggccugguggaccuguucguguucagcaccagcuucuaccugaucagcaucuuccugcaccuggugaagauccccacccacagacacguggugggcaagcccugccccaagccccacagacugaaccacaugggcaucugcagcugcggccuguacaagcaccccggcgugcccgugaaguggaagagaugaggacuaguuauaagacugacuagcccgaugggccucccaacgggcccuccuccccuccuugcaccgagauuaauaaaaaaaaaaaaaaaaaaaaaaaaaaaaaaaaaaaaaaaaaaaaaaaaaaaaaaaaaaaaaaaaaaaaaaaaaaaaaaaaaaaaaaaaaaaaaaaaaaaa

SEQ ID NO: 29686 - RNA, 1662 nt, Artificial Sequence
  mRNA product Design i-3 (A100) comprising derived and/or modified sequence from LASV(LASV221-NIG-2010;Clade II)__AIT17624__GPCmut5 (opt4)
aggagaaagcuuaccaugggccagaucaucaccuucuuccaggaggugccccacgugaucgaggaggugaugaacaucgugcugaucgcccugagccugcuggccauccugaagggcaucuacaacguggccaccugcggccuguucggccuggugagcuuccugcugcugugcggcagaagcugcagcaccaccuacaagggcguguacgagcugcagacccuggagcuggacauggccagccugaacaugaccaugccccugagcugcaccaagaacaacagccaccacuacaucauggugggcaacgagaccggccuggagcugacccugaccaacaccagcaucaucaaccacaaguucugcaaccugagcgacgcccacaagaagaaccuguacgaccacgcccugaugagcaucaucagcaccuuccaccugagcauccccaacuucaaccaguacgaggccaugagcugcgacuucaacggcggcaagaucagcgugcaguacaaccugagccacaccuacgccaucgacgccgccaaccacugcggcaccaucgccaacggcgugcugcagaccuucaugagaauggccuggggcggcagcuacaucgcccuggacagcggcugcggcagcugggacugcaucaugaccagcuaccaguaccugaucauccagaacaccaccugggaggaccacugccaguucagcagacccagccccaucggcuaccugggccugcugagccagagaaccagagacaucuacaucagcagaagacugcugggcaccuucaccuggacccugagcgacagcgagggcaacgagacccccggcggcuacugccugaccagauggaugcugaucgaggccgagcugaagugcuucggcaacaccgccguggccaagugcaacgagaagcacgacgaggaguucugcgacaugcugagacuguucgacuucaacaagcaggccaucagaagacugaagacccccgcccagaugagcauccagcugaucaacaaggccgugaacgcccugaucaacgaccagcugaucaugaagaaccaccugagagacaucaugugcauccccuacugcaacuacagcaaguacugguaccugaaccacaccgugaccggcaagaccagccugcccagaugcuggcuggugagcaacggcagcuaccugaacgagacccacuucagcgacgacaucgagcagcaggccgacaacaugaucaccgagaugcugcagaaggaguacauggacagacagggcaagaccccccugggccugguggaccuguucguguucagcaccagcuucuaccugaucagcaucuuccugcaccuggugaagauccccacccacagacacgugaucggcaagcccugccccaagccccacagacugaaccacaugggcaucugcagcugcggccuguacaagcaccccggcgugcccgugaaguggaagagaugaggacuaguuauaagacugacuagcccgaugggccucccaacgggcccuccuccccuccuugcaccgagauuaauaaaaaaaaaaaaaaaaaaaaaaaaaaaaaaaaaaaaaaaaaaaaaaaaaaaaaaaaaaaaaaaaaaaaaaaaaaaaaaaaaaaaaaaaaaaaaaaaaaaa

SEQ ID NO: 29687 - RNA, 1662 nt, Artificial Sequence
  mRNA product Design i-3 (A100) comprising derived and/or modified sequence from LASV(LASV237-NIG-2010;Clade II)__AIT17638__GPCmut5 (opt4)
aggagaaagcuuaccaugggccagaucaucaccuucuuccaggaggugccccacgugaucgaggaggugaugaacaucgugcugaucgcccugagccugcuggccauccugaagggcaucuacaacguggccaccugcggccuguucggccuggugagcuuccugcugcugugcggcagaagcugcagcaccaccuacaagggcguguacgagcugcagacccuggagcuggacauggccagccugaacaugaccaugccccugagcugcaccaagaacaacagccaccacuacaucauggugggcaacgagaccggccuggagcugacccugaccaacaccagcaucaucaaccacaaguucugcaaccugagcgacgcccacaagaaggaccuguacgaccacgcccugaugagcaucaucagcaccuuccaccugagcauccccaacuucaaccaguacgaggccaugagcugcgacuucaacggcggcaagaucagcgugcaguacaaccugagccacaccuacgccguggacgccgccaaccacugcggcaccaucgccaacggcgugcugcagaccuucaugagaauggccuggggcggcagcuacaucgcccuggacagcggcugcggcagcugggacugcaucaugaccagcuaccaguaccugaucauccagaacaccaccugggaggaccacugccaguucagcagacccagccccaucggcuaccugggccugcugagccagagaaccagagacaucuacaucagcagaagacugcugggcaccuucaccuggacccugagcgacagcgagggcaacgagacccccggcggcuacugccugaccagauggaugcugaucgaggccgagcugaagugcuucggcaacaccgccguggccaagugcaacgagaagcacgacgaggaguucugcgacaugcugagacuguucgacuucaacaagcaggccaucagaagacugaagacccccgcccagaugagcauccagcugaucaacaaggccgugaacgcccugaucaacgaccagcugaucaugaagaaccaccugagagacaucaugugcauccccuacugcaacuacagcaaguacugguaccugaaccacaccgugaccggcaagaccagccugcccagaugcuggcuggugagcaacggcagcuaccugaacgagacccacuucagcgacgacaucgagcagcaggccgacaacaugaucaccgagcugcugcagaaggaguacauggacagacagggcaagaccccccugggccugguggaccuguucguguucagcaccagcuucuaccugaucagcaucuuccugcaccugaucaagauccccacccacagacacaucaccggcaagcccugccccaagccccacagacugaaccacaugggcaucugcagcugcggccuguacaagcaccccggcgugcccgugaaguggaagagaugaggacuaguuauaagacugacuagcccgaugggccucccaacgggcccuccuccccuccuugcaccgagauuaauaaaaaaaaaaaaaaaaaaaaaaaaaaaaaaaaaaaaaaaaaaaaaaaaaaaaaaaaaaaaaaaaaaaaaaaaaaaaaaaaaaaaaaaaaaaaaaaaaaaa

SEQ ID NO: 29688 - RNA, 1662 nt, Artificial Sequence
  mRNA product Design i-3 (A100) comprising derived and/or modified sequence from LASV(LASV253-NIG-2011;Clade II)__AIT17670__GPCmut5 (opt4)
aggagaaagcuuaccaugggccagaucaucaccuucuuccaggaggugccccacgugaucgaggaggugaugaacaucgugcugaucgcccugagccugcuggccauccugaagggcaucuacaacguggccaccugcggccuguucggccuggugagcuuccugcugcugugcggcagaagcugcagcaccaccuacaagggcguguacgagcugcagacccuggagcuggacauggccagccugaacaugaccaugccccugagcugcaccaagaacaacagccaccacuacaucauggugggcaacgagaccggccuggagcugacccugaccaacaccagcaucaucaaccacaaguucugcaaccugagcgacgcccacaagaagaaccuguacgaccacgcccugaugagcaucaucagcaccuuccaccugagcauccccaacuucaaccaguacgaggccaugagcugcgacuucaacggcggcaagaucagcgugcaguacaaccugagccacaccuacgccguggacgccgccaaccacugcggcaccaucgccaacggcgugcugcagaccuucaugagaauggccuggggcggcagcuacaucgcccuggacagcggcugcggcagcugggacugcaucaugaccagcuaccaguaccugaucauccagaacaccaccugggaggaccacugccaguucagcagacccagccccaucggcuaccugggccugcugagccagagaaccagagacaucuacaucagcagaagacugcugggcaccuucaccuggacccugagcgacagcgagggcaacgagacccccggcggcuacugccugaccagauggaugcugaucgaggccgagcugaagugcuucggcaacaccgccguggccaagugcaacgagaagcacgacgaggaguucugcgacaugcugagacuguucgacuucaacaagcaggccaucagaagacugaaggcccccgcccagaugagcauccagcugaucaacaaggccgugaacgcccugaucaacgaccagcugaucaugaagaaccaccugagagacaucaugugcauccccuacugcaacuacagcaaguacugguaccugaaccacaccgugaccggcagaaccagccugcccagaugcuggcuggugagcaacggcagcuaccugaacgagacccacuucagcgacgacaucgagcagcaggccgacaacaugaucaccgagcugcugcagaaggaguacaucgacagacagggcaagaccccccugggccugguggaccuguucguguucagcaccagcuucuaccugaucagcaucuuccugcaccuggugaagauccccacccacagacacaucaucggcaagcccugccccaagccccacagacugaaccacaugggcaucugcagcugcggccuguacaagcaccccggcgugcccgugaaguggaagagaugaggacuaguuauaagacugacuagcccgaugggccucccaacgggcccuccuccccuccuugcaccgagauuaauaaaaaaaaaaaaaaaaaaaaaaaaaaaaaaaaaaaaaaaaaaaaaaaaaaaaaaaaaaaaaaaaaaaaaaaaaaaaaaaaaaaaaaaaaaaaaaaaaaaa

SEQ ID NO: 29689 - RNA, 1662 nt, Artificial Sequence
  mRNA product Design i-3 (A100) comprising derived and/or modified sequence from LASV(LASV254-NIG-2011;Clade II)__AIT17674__GPCmut5 (opt4)
aggagaaagcuuaccaugggccagaucaucaccuucuuccaggaggugccccacgugaucgaggaggugaugaacaucgugcugaucgcccugagccugcuggccauccugaagggcaucuacaacguggccaccugcggccuguucggccuggugagcuuccugcugcugugcggcagaagcugcagcaccaccuacaagggcguguacgagcugcagacccuggagcuggacaugaccaaccugaacaugaccaugccccugagcugcaccaagaacaacagccaccacuacaucauggugggcaacgagaccggccuggagcugacccugaccaacaccagcaucaucaaccacaaguucugcaaccugagcgacgcccacaagaagaaccuguacaaccacgcccugaugagcaucaucagcaccuuccaccugagcauccccaacuucaaccaguacgaggccaugagcugcgacuucaacggcggcaagaucagcgugcaguacaaccugagccacagcuacgccguggacgccgccaaccacugcggcaccaucgccaacggcgugcugcagaccuucaugagaauggccuggggcggcagcuacaucgcccuggacagcggcugcggcaacugggacugcaucaugaccagcuaccaguaccugaucauccagaacaccaccugggaggaccacugccaguucagcagacccagccccaucggcuaccugggccugcugagccagagaaccagagacaucuacaucagcagaagacugcugggcaccuucaccuggacccugagcgacagcgagggcaacgagacccccggcggcuacugccugaccagauggaugcugaucgaggccgagcugaagugcuucggcaacaccgccguggccaagugcaacgagaagcacgacgaggaguucugcgacaugcugagacuguucgacuucaacaagcaggccaucagaagacugaagacccccgcccaggccaacauccagcugaucaacaaggccgugaacgcccugaucaacgaccagcugaucaugaagaaccaccugagagacaucaugugcauccccuacugcaacuacagcaaguacugguaccugaaccacaccgugaccggcaagaccagccugcccagaugcuggcuggugagcaacggcagcuaccugaacgagacccacuucagcgacgacaucgagcagcaggccgacaacaugaucaccgagcugcugcagaaggaguacauggacagacagggcaagaccccccugggccugguggaccuguucguguucagcaccagcuucuaccugaucagcaucuuccugcaccuggugaagauccccacccacagacacgugaucggcaagcccugccccaagccccacagacugaaccacaugggcaucugcagcugcggccuguacaagcaccccggcgugcccgugaaguggaagagaugaggacuaguuauaagacugacuagcccgaugggccucccaacgggcccuccuccccuccuugcaccgagauuaauaaaaaaaaaaaaaaaaaaaaaaaaaaaaaaaaaaaaaaaaaaaaaaaaaaaaaaaaaaaaaaaaaaaaaaaaaaaaaaaaaaaaaaaaaaaaaaaaaaaa

SEQ ID NO: 29690 - RNA, 1662 nt, Artificial Sequence
  mRNA product Design i-3 (A100) comprising derived and/or modified sequence from LASV(Nig08-A19;Clade III)__ADU56618__GPCmut5 (opt4)
aggagaaagcuuaccaugggccagaucgugaccuucuuccaggaggugccccacgugaucgaggaggugaugaacaucgugcugaucgcccugagcauccuggccauccugaagggccuguacaacaucgccaccugcggccugaucggccuggugaccuuccugcugcugagcggcagaagcugcagcaugaccuacaagggcguguacgagcugcagacccuggagcugaacaugaacacccugaacaugaccaugccccugagcugcaccaagaacaacagccaccacuacaucauggugggcaacgagaccggccuggagcugacccugaccaacaccagccugcugcaccacaaguucugcaaccugagcgacgcccacaagaagaaccuguacgaccacacccugaugagcaucaucagcaccuuccaccugagcauccccaacuucaaccaguacgaggccaugagcugcgacuucaacggcggcaagaucaccgugcaguacaaccugagccacagcuacgccaucgacgccgccaaccacugcggcaccguggccaacggcgugcugcagaccuucaugagaauggccuggggcggcagcuacaucgcccuggacagcggcugcggcaagugggacugcaucaugaccagcuaccaguaccugaucauccagaacaccaccugggaggaccacugccaguucagcagacccagccccaucggcuaccugggccugcugagccagagaaccagagacaucuacaucagcagaagacugcugggcaccuucaccuggacccugagcgacagcgagggcaacgagacccccggcggcuacugccugaccagauggaugcugaucgaggccgagcugaagugcuucggcaacaccgccguggccaagugcaacgagaagcacgacgaggaguucugcgacaugcugagacuguucgacuucaacaagcaggccaucagaagacugaaggcccccgcccagaugagcauccagcugaucaacaaggccgugaacgcccugaucaacgaccagcugaucaugaagaaccaccugagagacaucaugugcauccccuacugcaacuacagcaaguacugguaccugaaccacaccagcaccggcagaaccagccugcccagaugcuggcuggugagcaacggcagcuaccugaacgagacccacuucagcgacgacaucgagcagcaggccgacaacaugaucaccgagaugcugcagaaggaguaccuggacagacagggcaagaccccccugggccugguggaccuguucguguucagcaccagcuucuaccugaucagcaucuuccugcaccuggugaagauccccacccacagacacaucgugggcaagcccugccccaagccccacagacugaaccacaugggcaucugcagcugcggccuguacaagcagcccggcgugcccgugagauggaagagaugaggacuaguuauaagacugacuagcccgaugggccucccaacgggcccuccuccccuccuugcaccgagauuaauaaaaaaaaaaaaaaaaaaaaaaaaaaaaaaaaaaaaaaaaaaaaaaaaaaaaaaaaaaaaaaaaaaaaaaaaaaaaaaaaaaaaaaaaaaaaaaaaaaaa

SEQ ID NO: 29691 - RNA, 1665 nt, Artificial Sequence
  mRNA product Design i-3 (A100) comprising derived and/or modified sequence from LASV(G1180-SLE-2010;Clade IV)__AIT17168__GPCmut5 (opt4)
aggagaaagcuuaccaugggccagaucgugaccuucuuccaggaggugccccacgugaucgaggaggugaugaacaucgugcugaucgcccugagcauccuggccgugcugaagggccuguacaacuucgccaccugcggccuggugggccugcugaccuuccugcugcugugcggcagaagcugcaccgccagcagauacaagggcguguacgagcugcagacccuggagcugaacauggagacccugaacaugaccaugccccugagcugcaccaagaacaacagccaccacuacaucauggugggcaacgagaccggccuggagcugacccugaccaacaccagcaucaucaaccacaaguucugcaaccugagcgacgcccacaagaagaaccuguacgaccacgcccugaugagcaucaucagcaccuuccaccugagcauccccaacuucaaccaguacgaggccaugagcugcgacuucaacggcggcaagaucagcgugcaguacaaccugagccacagcuacgccggcgacgccgccaaccacugcggcaccguggccaacggcgugcugcagaccuucaugagaauggccuggggcggcagcuacaucgcccuggacagcggcugcggcagcugggacugcaucaugaccagcuaccaguaccugaucauccagaacaccaccugggaggaccacugccaguucagcagacccagccccaucggcuaccugggccugcugagccagagaaccagagacaucuacaucagcagaagacugcugggcaccuucaccuggacccugagcgacagcgagggcaaggacacccccggcggcuacugccugaccagauggaugcugaucgaggccgagcugaagugcuucggcaacaccgccguggccaagugcaacgagaagcacgacgaggaguucugcgacaugcugagacuguucgacuucaacaagcaggccauccagagacugaaggcccccgcccagaugagcauccagcugaucaacaaggccgugaacgcccugaucaacgaccagcugaucaugaagaaccaccugagagacaucaugugcauccccuacugcaacuacagcaaguacugguaccugaaccacaccaccaccggcaagaccagccugcccaagugcuggcuggugagcaacggcagcuaccugaacgagacccacuucagcgacgacaucgagcagcaggccgacaacaugaucaccgagaugcugcagaaggaguacauggagagacagggcaagaccccccugggccugguggaccuguucguguucagcaccagcuucuaccugaucagcaucuuccugcaccuggugaagauccccacccacagacacaucgugggcaagagcugccccaagccccacagacugaaccacaugggcaucugcagcugcggccuguacaagcagcccggcgugcccgugaaguggaagagaugaggacuaguuauaagacugacuagcccgaugggccucccaacgggcccuccuccccuccuugcaccgagauuaauaaaaaaaaaaaaaaaaaaaaaaaaaaaaaaaaaaaaaaaaaaaaaaaaaaaaaaaaaaaaaaaaaaaaaaaaaaaaaaaaaaaaaaaaaaaaaaaaaaaa

SEQ ID NO: 29692 - RNA, 1665 nt, Artificial Sequence
  mRNA product Design i-3 (A100) comprising derived and/or modified sequence from LASV(G1442-SLE-2011;Clade IV)__AIT17180__GPCmut5 (opt4)
aggagaaagcuuaccaugggccagaucgugaccuucuuccaggaggugccccacgugaucgaggaggugaugaacaucgugcugaucgcccugagcauccuggccgugcugaagggccuguacaacguggccaccugcggccugaucggccuggugaccuuccugcugcugugcggcagaagcugcaccaccacccuguacaagggcguguacgagcugcagacccuggagcugaacauggagacccugaacaugaccaugccccugagcugcaccaagaacaacagccaccacuacaucagagugggcaacgagaccggccuggagcugacccugaccaacaccagcaucaucaaccacaaguucugcaaccugagcgacgcccacaagaagaaccuguacgaccacgcccugaugagcaucaucagcaccuuccaccugagcauccccaacuucaaccaguacgaggccaugagcugcgacuucaacggcggcaagaucagcgugcaguacaaccugagccacagcuacgccggcgacgccgccaaccacugcggcaccguggccaacggcgugcugcagaccuucaugagaauggccuggggcggcagcuacaucgcccuggacagcggcugcggcaacugggacugcaucaugaccagcuaccaguaccugaucauccagaacaccaccugggacgaccacugccaguucagcagacccagccccaucggcuaccugggccugcugagccagagaaccagagacguguacaucagcagaagacugcugggcaccuucaccuggacccugagcgacagcgagggcaaggacacccccggcggcuacugccugaccagauggaugcugaucgaggccgagcugaagugcuucggcaacaccgccguggccaagugcaacgagaagcacgacgaggaguucugcgacaugcugagacuguucgacuucaacaagcaggccauccagagacugaaggcccccgcccagaugagcauccagcugaucaacaaggccgugaacgcccugaucaacgaccagcugaucaugaagaaccaccugagagacaucaugugcauccccuacugcaacuacagcaaguacugguaccugaacaacaccgccaccggcaagaccagccugcccaagugcuggcugaucagcaacggcagcuaccugaacgagacccacuucagcgacgacaucgagcaggaggccgacaacaugaucaccgagaugcugcagaaggaguacauggagagacagggcaagaccccccugggccugguggaccuguucguguucagcaccagcuucuaccugaucagcaucuuccugcaccuggugaagauccccacccacagacacaucgugggcaagagcugccccaagccccacagacugaaccacaugggcaucugcagcugcggccuguacaagcagcccggcgugcccgugagauggaagagaugaggacuaguuauaagacugacuagcccgaugggccucccaacgggcccuccuccccuccuugcaccgagauuaauaaaaaaaaaaaaaaaaaaaaaaaaaaaaaaaaaaaaaaaaaaaaaaaaaaaaaaaaaaaaaaaaaaaaaaaaaaaaaaaaaaaaaaaaaaaaaaaaaaaa

SEQ ID NO: 29693 - RNA, 1665 nt, Artificial Sequence
  mRNA product Design i-3 (A100) comprising derived and/or modified sequence from LASV(G3010-SLE-2013;Clade IV)__AIT17344__GPCmut5 (opt4)
aggagaaagcuuaccaugggccagaucgugaccuucuuccaggaggugccccacgugaucgaggaggugaugaacaucgugcugaucgcccugagcauccuggccgugcugaagggccuguacaacuucgccaccugcggccuggugggccuggugaccuuccugcugcugugcggcagaagcugcaccaccagccuguacaagggcguguacgagcugcagacccuggagcugaacauggagacccugaacaugaccaugccccugagcugcaccaagaacaacagccaccacuacaucauggugggcaacgagaccggccuggagcugacccugaccaacaccagcaucaucaaccacaaguucugcaaccugagcgacgcccacaagaagaaccuguacaaccacgcccugaugagcaucaucagcaccuuccaccugagcauccccaacuucaaccaguacgaggccaugagcugcgacuucaacggcggcaagaucagcgugcaguacaaccugagccacagcuacgccggcgacgccgccagccacugcggcaccguggccaacggcgugcugcagaccuucaugagaauggccuggggcggcagcuacaucgcccuggacagcggcugcggcaagugggacugcaucaugaccagcuaccaguaccugaucauccagaacaccaccugggaggaccacugccaguucagcagacccagccccaucggcuaccugggccugcugagccagagaaccagagacaucuacaucagcagaagacugcugggcaccuucaccuggacccugagcgacagcgagggcaaggacacccccggcggcuacugccugaccagauggaugcugaucgaggccgagcugaagugcuucggcaacaccgccguggccaagugcaacgagaagcacgacgaggaguucugcgacaugcugagacuguucgacuucaacaagcaggccauccagagacugaagacccccgcccagaugagcauccagcugaucaacaaggccgugaacgcccugaucaacgaccagcugaucaugaagaaccaccugagagacaucaugugcauccccuacugcaacuacagcaaguacugguaccugaaccacaccaccaccggcaagaccagccugcccaagugcuggcuggugagcaacggcagcuaccugaacgagacccacuucagcgacgacaucgagcagcaggccgacaacaugaucaccgagaugcugcagaaggaguacauggagagacagggcaagaccccccugggccugguggaccuguucguguucagcaccagcuucuaccugaucagcaucuuccugcaccuggugaagauccccacccacagacacaucgugggcaagagcugccccaagccccacagacugaaccacaugggcaucugcagcugcggccuguacaagcagcccggcgugcccgugagauggaagagaugaggacuaguuauaagacugacuagcccgaugggccucccaacgggcccuccuccccuccuugcaccgagauuaauaaaaaaaaaaaaaaaaaaaaaaaaaaaaaaaaaaaaaaaaaaaaaaaaaaaaaaaaaaaaaaaaaaaaaaaaaaaaaaaaaaaaaaaaaaaaaaaaaaaa

SEQ ID NO: 29694 - RNA, 1665 nt, Artificial Sequence
  mRNA product Design i-3 (A100) comprising derived and/or modified sequence from LASV(G502-SLE-2009;Clade IV)__AIT17126__GPCmut5 (opt4)
aggagaaagcuuaccaugggccagaucgugaccuucuuccaggaggugccccacgugaucgaggaggugaugaacaucgugcugaucgcccugagcauccuggccgugcugaagggccuguacaacuucgccaccugcggccuggugggccugcugaccuuccugcugcugugcggcagaagcugcaccaccggccuguacaagggcguguacgagcugcagacccuggagcugaacauggagacccugaacaugaccaugccccugagcugcaccaagaacaacagccaccacuacaucauggugggcaacgagaccggccuggagcugacccugaccaacaccagcaucaucaaccacaaguucugcaaccugagcgacgcccacaagaagaaccuguacgaccacgcccugaugagcaucaucagcaccuuccaccugagcauccccaacuucaaccaguacgaggccaugagcugcgacuucaacggcggcaagaucagcgugcaguacaaccugagccacagcuacgccggcgacgccgccgaccacugcggcaccguggccaacggcgugcugcagaccuucaugagaauggccuggggcggcagcuacaucgcccuggacagcggcugcggcagaugggacugcaucaugaccagcuaccaguaccugaucauccagaacaccaccugggaggaccacugccaguucagcagacccagccccaucggcuaccugggccugcugagccagagaaccagagacaucuacaucagcagaagacugcugggcaccuucaccuggacccugagcgacagcgagggcaaggacacccccggcggcuacugccugaccagauggaugcugaucgaggccgagcugaagugcuucggcaacaccgccguggccaagugcaacgagaagcacgacgaggaguucugcgacaugcugagacuguucgacuucaacaagcaggccauccagagacugaaggcccccgcccagaugagcauccagcugaucaacaaggccgugaacgcccugaucaacgaccagcuggugaugaagaaccaccugagagacaucaugugcauccccuacugcaacuacagcagauacugguaccugaaccacaccaccaccggcagaaccagccugcccaagugcuggcuggugagcaacggcagcuaccugaacgagacccacuucagcgacgacaucgagcagcaggccgacaacaugaucaccgagaugcugcagaaggaguacauggagagacagggcaagaccccccugggccugguggaccuguucguguucagcaccagcuucuaccugaucagcaucuuccugcaccuggugaagauccccacccacagacacaucgugggcaagagcugccccaagccccacagacugaaccacaugggcaucugcagcugcggccuguacaagcagcccggcgugcccgugaaguggaagagaugaggacuaguuauaagacugacuagcccgaugggccucccaacgggcccuccuccccuccuugcaccgagauuaauaaaaaaaaaaaaaaaaaaaaaaaaaaaaaaaaaaaaaaaaaaaaaaaaaaaaaaaaaaaaaaaaaaaaaaaaaaaaaaaaaaaaaaaaaaaaaaaaaaaa

SEQ ID NO: 29695 - RNA, 1665 nt, Artificial Sequence
  mRNA product Design i-3 (A100) comprising derived and/or modified sequence from LASV(G733-SLE-2010;Clade IV)__AIT17154__GPCmut5 (opt4)
aggagaaagcuuaccaugggccagaucgugaccuucuuccaggaggugccccacgugaucgaggaggugaugaacaucgugcugaucgcccugagcauccuggccgugcugaagggccuguacaacuucgccaccugcggcaucgugggccuggugagcuuccugcugcugugcggcagaagcugcaccaccagccuguacaagggcguguacgagcugcagacccuggagcugaacauggagacccugaacaugaccaugccccugagcugcaccaagaacaacagccaccacuacaucauggugggcaacgagaccggccuggagcugacccugaccaacaccagcaucaucaaccacaaguucugcaaccugagcgacgcccacaagaagaaccuguacgaccacgcccugaugagcaucaucagcaccuuccaccugagcauccccaacuucaaccaguacgaggccaugagcugcgacuucaacggcggcaagaucagcgugcaguacaaccugagccacagcuacgccggcgacgccgccaaccacugcggcaccaucgccaacggcgugcugcagaccuucaugagaauggccuggggcggcagcuacaucgcccuggacagcggcugcgacagaugggacugcaucaugaccagcuaccaguaccugaucauccagaacaccaccugggaggaccacugccaguucagcagacccagccccaucggcuaccugggccugcugagccagagaaccagagacaucuacaucagcagaagacugcugggcaccuucaccuggacccugagcgacagcgagggcaaggacacccccggcggcuacugccugaccagauggaugcugaucgaggccgagcugaagugcuucggcaacaccgccguggccaagugcaacgagaagcacgacgaggaguucugcgacaugcugagacuguucgacuucaacaagcaggccauccagagacugaaggcccccgcccagaugagcauccagcugaucaacaaggccgugaacgcccugaucaacgaccagcugaucaugaagaaccaccugagagacaucaugugcauccccuacugcaacuacagcaaguacugguaccugaaccacaccaccaccggcaagaccagccugcccaagugcuggcuggugagcaacggcagcuaccugaacgagacccacuucagcgacgacaucgagcagcaggccgacaacaugaucaccgagaugcugcagaaggaguacauggagagacagggcaagaccccccugggccugguggaccuguucguguucagcaccagcuucuaccugaucagcaucuuccugcaccuggugaagauccccacccacagacacguggugggcaagagcugccccaagccccacagacugaaccacaugggcaucugcagcugcggccuguacggccagcccggcgugcccgugaaguggaagagaugaggacuaguuauaagacugacuagcccgaugggccucccaacgggcccuccuccccuccuugcaccgagauuaauaaaaaaaaaaaaaaaaaaaaaaaaaaaaaaaaaaaaaaaaaaaaaaaaaaaaaaaaaaaaaaaaaaaaaaaaaaaaaaaaaaaaaaaaaaaaaaaaaaaa

SEQ ID NO: 29696 - RNA, 1665 nt, Artificial Sequence
  mRNA product Design i-3 (A100) comprising derived and/or modified sequence from MOPV/LASV reassortant(IGS-1;Clade IV)__AFY05576__GPCmut5 (opt4)
aggagaaagcuuaccaugggccagaucgugaccuucuuccaggaggugccccacgugaucgaggaggugaugaacaucgugcugaucgcccugagcgugcuggccgugcugaagggccuguacaacuucgccaccugcggccuggugggccuggugaccuuccugcugcugugcggcagaagcugcaccaccagccuguacaagggcguguacgagcugcagacccuggagcugaacauggagacccugaacaugaccaugccccugagcugcaccaagaacaacagccaccacuacaucauggugggcaacgagaccggccuggagcugacccugaccaacaccagcaucaucaaccacaaguucugcaaccugagcgacgcccacaagaagaaccuguacgaccacgcccugaugagcaucaucagcaccuuccaccugagcauccccaacuucaaccaguacgaggccaugagcugcgacuucaacggcggcaagaucagcgugcaguacaaccugagccacagcuacgccggcgacgccgccaaccacugcggcaccguggccaacggcgugcugcagaccuucaugagaauggccuggggcggcagcuacaucgcccuggacagcggcugcggcaacugggacugcaucaugaccagcuaccaguaccugaucauccagaacaccaccugggaggaccacugccaguucagcagacccagccccaucggcuaccugggccugcugagccagagaaccagagacaucuacaucagcagaagacugcugggcaccuucaccuggacccugagcgacagcgagggcgaggacacccccggcggcuacugccugaccagauggaugcugaucgaggccgagcugaagugcuucggcaacaccgccguggccaagugcaacgagaagcacgacgaggaguucugcgacaugcugagacuguucgacuucaacaagcaggccauccagagacugaaggcccccgcccagaugagcauccagcugaucaacaaggccgugaacgcccugaucaacgaccagcugaucaugaagaaccaccugagagacaucaugugcauccccuacugcaacuacagcaaguacugguaccugaaccacaccaccaccggcagaaccagccugcccaagugcuggcuggugagcaacggcagcuaccugaacgagacccacuucagcgacgacaucgagcagcaggccgacaacaugaucaccgagaugcugcagaaggaguacauggagagacagggcaagaccccccugggccugguggaccuguucguguucagcaccagcuucuaccugaucagcaucuuccugcaccuggugaagauccccacccacagacacaucgugggcaagagcugccccaagccccacagacugaaccacaugggcaucugcagcugcggccuguacaagcagcccggcgugcccgugaaguggaagagaugaggacuaguuauaagacugacuagcccgaugggccucccaacgggcccuccuccccuccuugcaccgagauuaauaaaaaaaaaaaaaaaaaaaaaaaaaaaaaaaaaaaaaaaaaaaaaaaaaaaaaaaaaaaaaaaaaaaaaaaaaaaaaaaaaaaaaaaaaaaaaaaaaaaa

SEQ ID NO: 29697 - RNA, 1665 nt, Artificial Sequence
  mRNA product Design i-3 (A100) comprising derived and/or modified sequence from LASV(LM765-SLE-2012;Clade IV)__AIT17814__GPCmut5 (opt4)
aggagaaagcuuaccaugggccagaucgugaccuucuuccaggaggugccccacgugaucgaggaggugaugaacaucgugcugaucgcccugagcauccuggccgugcugaagggccuguacaacuucgccaccugcggccuggugggccuggugaccuuccugcugcugugcggcagaagcugcaccaccagccuguacaagggcguguacgagcugcagacccuggagcugaacauggagacccugaacaugaccaugccccugagcugcaccaagaacaacagccaccacuacaucauggugggcaacgagaccggccuggagcugacccugaccaacaccagcaucaucgaccacaaguucugcaaccugagcgacgcccacagaaagaaccuguacgaccacgcccugaugagcaucaucagcaccuuccaccugagcauccccaacuucaaccaguacgaggccaugagcugcgacuucaacggcggcaagaucagcgugcaguacaaccugagccacagcuacgccaaggacgccgccgaccacugcggcaccguggccaacggcgugcugcagaccuucaugagaauggccuggggcggcagcuacaucgcccuggacagcggcugcggcagaugggacugcaucaugaccagcuaccaguaccugaucauccagaacaccaccugggaggaccacugccaguucagcagacccagccccaucggcuaccugggccugcugagccagagaaccagagacaucuacaucagcagaagacugcugggcaccuucaccuggacccugagcgacagcgagggcaaggacacccccggcggcuacugccugaccagauggaugcugaucgaggccgagcugaagugcuucggcaacaccgccguggccaagugcaacgagaagcacgacgaggaguucugcgacaugcugagacuguucgacuucaacaagcaggccauccagagacugaaggcccccgcccagaugagcauccagcugaucaacaaggccgugaacgcccugaucaacgaccagcugaucaugaagaaccaccugagagacaucaugugcauccccuacugcaacuacagcaaguacugguaccugaaccacaccaccaccggcaagaccagccugcccaagugcuggcuggugagcaacggcagcuaccugaacgagacccacuucagcgacgacaucgagcagcaggccgacaacaugaucaccgagaugcugcagaaggaguacauggagagacagggcaagaccccccugggccugguggaccuguucguguucagcaccagcuucuaccugaucagcaucuuccugcaccuggugaagauccccacccacagacacaucgugggcaagcccugccccaagccccacagacugaaccacaugggcaucugcagcugcggccuguacaagcagcccggcgugcccgugaaguggaagagaugaggacuaguuauaagacugacuagcccgaugggccucccaacgggcccuccuccccuccuugcaccgagauuaauaaaaaaaaaaaaaaaaaaaaaaaaaaaaaaaaaaaaaaaaaaaaaaaaaaaaaaaaaaaaaaaaaaaaaaaaaaaaaaaaaaaaaaaaaaaaaaaaaaaa

SEQ ID NO: 29698 - RNA, 1665 nt, Artificial Sequence
  mRNA product Design i-3 (A100) comprising derived and/or modified sequence from LASV(LM776-SLE-2012;Clade IV)__AIT17824__GPCmut5 (opt4)
aggagaaagcuuaccaugggccagaucgugaccuucuuccaggaggugccccacgugaucgaggaggugaugaacaucgugcugaucgcccugagcauccuggccgugcugaagggccuguacaacuucgccaccugcggccuggugggccuggugaccuuccugcugcugugcggcagaagcugcaccaccagcguguacaagggcguguacgagcugcagacccuggagcugaacauggagacccugaacaugaccaugccccugagcugcaccaagaacaacagccaccacuacaucauggugggcaacgagaccggccuggagcugacccugaccaacaccagcaucaucaaccacaaguucugcaaccugagcgacgcccacaagaagaaccuguacgaccacgcccugaugagcaucaucagcaccuuccaccugagcauccccaacuucaaccaguacgaggccaugagcugcgacuucaacggcggcaagaucagcgugcaguacaaccugagccacagcuacgccggcgacgccgccaaccacugcggcaccguggccaacggcgugcugcagaccuucaugagaauggccuggggcggcagcuacaucgcccuggacagcggcugcggcaagugggacugcaucaugaccagcuaccaguaccugaucauccagaacaccaccugggaggaccacugccaguucagcagacccagccccaucggcuaccugggccugcugagccagagaaccagagacaucuacaucagcagaagacugcugggcaccuucaccuggacccugagcgacagcgagggcaaggacacccccggcggcuacugccugaccagauggaugcugaucgaggccgagcugaagugcuucggcaacaccgccguggccaagugcaacgagaagcacgacgaggaguucugcgacaugcugagacuguucgacuucaacaagcaggccauccagagacugaaggcccccgcccagaugagcauccagcugaucaacaaggccgugaacgcccugaucaacgaccagcugaucaugaagaaccaccugagagacaucaugugcauccccuacugcaacuacagcaaguacugguaccugaaccacaccaccaccggcaagaccagccugcccaagugcuggcuggugagcaacggcagcuaccugaacgagacccacuucagcgacgacaucgagcagcaggccgacaacaugaucaccgagaugcugcagaaggaguacauggagagacagggcaagaccccccugggccugguggaccuguucguguucagcaccagcuucuaccugaucagcaucuuccugcaccuggugaagauccccacccacagacacaucgugggcaagagcugccccaagccccacagacugaaccacaugggcaucugcagcugcggccuguacaagcagcccggcgugcccgugagauggaagagaugaggacuaguuauaagacugacuagcccgaugggccucccaacgggcccuccuccccuccuugcaccgagauuaauaaaaaaaaaaaaaaaaaaaaaaaaaaaaaaaaaaaaaaaaaaaaaaaaaaaaaaaaaaaaaaaaaaaaaaaaaaaaaaaaaaaaaaaaaaaaaaaaaaaa

SEQ ID NO: 29699 - RNA, 1665 nt, Artificial Sequence
  mRNA product Design i-3 (A100) comprising derived and/or modified sequence from LASV(Mad39;Clade IV)__ANH09722__GPCmut5 (opt4)
aggagaaagcuuaccaugggccagaucgugaccuucuuccaggaggugccccacgugaucgaggaggugaugaacaucgugcugaucgcccugagcauccuggccgugcugaagggccuguacaacguggccaccugcggccugaucggccuggugaccuuccugcugcugugcggcagaagcugcaccaccacccuguacaagggcguguacgagcugcaggcccuggagcugaacauggagacccugaacaugaccaugccccugagcugcaccaagaacaacagccaccacuacaucagagugggcaacgagaccggccuggagcugacccugaccaacaccagccugaucaaccacaaguucugcaaccugagcgacgcccacaagaagaaccuguacgaccacgcccugaugagcaucaucagcaccuuccaccugagcauccccaacuucaaccaguacgaggccaugagcugcgacuucaacgacggcaagaucagcgugcaguacaaccugagccacaccuacgccggcgacaccgccaaccacugcggcaccguggccaacggcgugcugcagaccuucaugagaauggccuggggcggcagcuacaucgcccuggacagcggcugcggcggcugggacugcaucaugaccagcuaccaguaccugaucauccagaacaccaccugggaggaccacugccaguucagcagacccagccccaucggcuaccugggccugcugagccagagaaccagagacaucuacaucagcagaagacugcugggcaccuucaccuggacccugagcgacagcgagggcaaggacacccccggcggcuacugccugaccagauggaugcugaucgaggccgagcugaagugcuucggcaacaccgccguggccaagugcaacgagaagcacgacgaggaguucugcgacaugcugagacuguucgacuucaacaagcaggccauccagagacugaaggcccccgcccagaugagcauccagcugaucaacaaggccgugaacgcccugaucaacgaccagcugaucaugaagaaccaccugagagacaucaugugcauccccuacugcaacuacagcaaguacugguaccugaaccacaccgugaccggcaagaccagccugcccaagugcuggcuggugagcaacggcagcuaccugaacgagacccacuucagcgacgacaucgagcagcaggccgacaacaugaucaccgagaugcugcagaaggaguacauggagagacagggcaagaccccccugggccugguggaccuguucguguucagcaccagcuucuaccugaucagcaucuuccugcaccuggugaagauccccacccacagacacguggugggcaagcccugccccaagccccacagacugaaccacaugggcaucugcagcugcggcuucuacaagcagcccggcgugcccgugagauggaagagaugaggacuaguuauaagacugacuagcccgaugggccucccaacgggcccuccuccccuccuugcaccgagauuaauaaaaaaaaaaaaaaaaaaaaaaaaaaaaaaaaaaaaaaaaaaaaaaaaaaaaaaaaaaaaaaaaaaaaaaaaaaaaaaaaaaaaaaaaaaaaaaaaaaaa

SEQ ID NO: 29700 - RNA, 1665 nt, Artificial Sequence
  mRNA product Design i-3 (A100) comprising derived and/or modified sequence from LASV(Z0947-SLE-2011;Clade IV)__AIT17840__GPCmut5 (opt4)
aggagaaagcuuaccaugggccagaucgugaccuucuuccaggaggugccccacgugaucgaggaggugaugaacaucgugcugaucgcccugagcauccuggccgugcugaagggccuguacaacuucgccaccugcggccuggugggccuggugaccuuccugcugcugugcggcagaagcugcaccaucagccuguacaagggcguguacgagcugcagacccuggagcugaacauggagacccugaacaugaccaugccccugagcugcaccaagaacaacagccaccacuacaucauggugggcaacgagaccggccuggagcugacccugaccaacaccagcaucaucaaccacaaguucugcaaccugagcgacgcccacaagaagaaccuguacgaccacgcccugaugagcaucaucagcaccuuccaccugagcauccccaacuucaaccaguacgaggccaugagcugcgacuucaacggcggcaagaucagcgugcaguacaaccugagccacagcuacgccggcgacgccgccaaccacugcggcaccguggccaacggcgugcugcagaccuucaugagaauggccuggggcggcagcuacaucgcccuggacagcggcugcgacagaugggacugcaucaugaccagcuaccaguaccugaucauccagaacaccaccugggaggaccacugccaguucagcagacccagccccaucggcuaccugggccugcugagccagagaaccagagacaucuacaucagcagaagacugcugggcaccuucaccuggacccugagcgacagcgagggcaaggacacccccggcggcuacugccugaccagauggaugcugaucgaggccgagcugaagugcuucggcaacaccgccguggccaagugcaacgagaagcacgacgaggaguucugcgacaugcugagacuguucgacuucaacaagcaggccauccagagacugaaggcccccgcccagaugagcauccagcugaucaacaaggccgugaacgcccugaucaacgaccagcugaucaugaagaaccaccugagagacaucaugugcauccccuacugcaacuacagcaaguacugguaccugaaccacaccaccaccggcaagaccagccugcccaagugcuggcuggugagcaacggcagcuaccugaacgagacccacuucagcgacgacaucgagcagcaggccgacaacaugaucaccgagaugcugcagaaggaguacauggagagacagggcaagaccccccugggccugguggaccuguucguguucagcaccagcuucuaccugaucagcaucuuccugcaccuggugaagauccccacccacagacacaucgugggcaagcccugccccaagccccacagacugaaccacaugggcaucugcagcugcggccuguacaagcagcccggcgugcccgugaaguggaagagaugaggacuaguuauaagacugacuagcccgaugggccucccaacgggcccuccuccccuccuugcaccgagauuaauaaaaaaaaaaaaaaaaaaaaaaaaaaaaaaaaaaaaaaaaaaaaaaaaaaaaaaaaaaaaaaaaaaaaaaaaaaaaaaaaaaaaaaaaaaaaaaaaaaaa

SEQ ID NO: 29701 - RNA, 1665 nt, Artificial Sequence
  mRNA product Design i-3 (A100) comprising derived and/or modified sequence from LASV(Josiah;Clade IV)__NP_694870__GPCmut5 (opt5)
aggagaaagcuuaccaugggccagaucgugaccuucuuucaagaggucccccacguuauugaagaggugaugaacaucgugcugauugcccucagcguccuggcugugcuuaaggggcuguacaauuucgccacaugcggacucguuggccuggugacguuucuucugcucugugggagauccugcaccacaucucuguauaaaggagucuacgaacugcagacccucgagcugaacauggaaacacuuaauaugaccaugccucugagcuguacaaagaacaauucccaucacuauaucauggugggcaacgagaccgggcucgagcugacgcuuaccaauacaucuauuaucaaccauaaauucugcaaucugagcgacgcgcacaagaaaaaccucuacgaucaugcucugauguccaucauuucuaccuuucaccugagcaucccgaauuucaaccaguaugaagccauguccugugacuuuaauggaggcaagauuagcguucaguacaaccucucucacuccuaugccggcgaugcugccaaucauugcgggacaguggcuaacggaguccugcaaaccuucaugcggauggccuggggcgggagcuacaucgcgcuugacucuggauguggcaacugggauugcauuaugacguccuaccaguaucugaucauucagaauacaaccugggaggaccacugucaguuuagccgccccucuccuaucggguaccucggacugcuuucccaaagaacacgggauaucuauauuagccgcagacugcucggcaccuucaccuggacacuguccgacucugaaggcaaggauacgcccgggggauacugccugacccgguggaugcucaucgaggccgagcugaaauguuuuggcaacacagcuguggccaagugcaaugaaaaacaugacgaggaguucugcgauaugcuucgccuguuugacuucaacaagcaggcuauucagagacucaaagccccugcgcagaugagcauccaacugauuaauaaggccgugaacgcucuuaucaaugaucagcugaucaugaagaaccaccuccgggacauuauguguauccccuauugcaauuacuccaaauauugguaccugaaccacaccacaaccgggcgcacgagccugccuaaguguuggcucgucucuaauggauccuaccugaacgaaacacauuucagcgacgauauugaacagcaagccgacaauaugaucaccgagaugcuucagaaagaguauauggaaagacagggcaagaccccgcuggggcucguugaucuguuuguguucucuaccagcuuuuaccugauuuccaucuuccuucaccucgugaaaauccccacacaucggcacauugucggaaagucuugcccuaaaccccaucgccugaaccacaugggcaucuguagcugcggccuguauaagcagccuggggugcccguuaaguggaaaagaugaggacuaguuauaagacugacuagcccgaugggccucccaacgggcccuccuccccuccuugcaccgagauuaauaaaaaaaaaaaaaaaaaaaaaaaaaaaaaaaaaaaaaaaaaaaaaaaaaaaaaaaaaaaaaaaaaaaaaaaaaaaaaaaaaaaaaaaaaaaaaaaaaaaa

SEQ ID NO: 29702 - RNA, 1662 nt, Artificial Sequence
  mRNA product Design i-3 (A100) comprising derived and/or modified sequence from LASV(LP;Clade I)__AAF86701__GPCmut5 (opt5)
aggagaaagcuuaccaugggccagaucauuaccuucuuucaagaggugccccacgucaucgaagagguuaugaacauugugcugaucgcccucagccugcuugcuauucugaaggggcucuacaauaucgccacaugcggaaucauuggccugguggcguuccuuuuucugugugggaaauccugcucucucacgcugaagggaggcuaugaacugcagacccucgagcugaacauggaaacacuuaauaugaccaugccucugagcuguaccaaaaacuccucucaucacuacaucagagucgggaaugagacaggacucgagcugacacuuaccaacacgagcauuaucaaucauaaguucugcaaccuguccgacgcucacaaaaagaaucucuaugaucaugcccugaugucuauuaucagcaccuuucaccuguccauuccgaacuucaaucaguacgaagccaugagcugugacuuuaacggcggcaagaucucugugcaguauaaucucucccacagcuacgcuggggaugccgcugagcauugcggaacaguugccaacggcgugcugcaaaccuucaugcggauggcguggggagggcgcuauaucgcccuugacucuggcugugggaauugggauugcauuaugacauccuaccaguaccugaucauucagaacaccacgugggaagaccacugucaguuuagcagacccucuccuaucggauaucucggccugcuuucccaacggacacgcgauauuuacaucagcagacggcugcucggcaccuucacauggacccuguccgacucugaggggaacgagacccccggaggcuauugccugacacgcuggaugcucaucgaagcugagcugaaauguuuugggaauacggccgucgcuaagugcaacgaaaaacaugaugaggaguucugcgacaugcuuagacuguuugauuucaauaagcaggccauucggcgccucaaagcgccugcccagaugagcauccagcugauuaacaaggcugugaaugcccuuaucaacgaccaacugauuaugaagaaucaccucagagauaucauguguauccccuacugcaacuauuccaaauacugguaucugaaucacaccagcucuggacggacaucccugccuaaguguuggcucauuagcaacggcucuuaccugaaugaaacccaguucagcgacgacaucgagcagcaagcugauaacaugauuacagaaaugcuucagaaagaguacaucgaacgccaggggaagaccccgcugggacucguugacauuuuuaucuucuccacgucuuuuuaucugauuagcaucuuccugcaucuuaucaaaauucccacacacagacauaucgugggcaagccuugccccaaaccucaccggcucaaucauaugggcgucuguuccugcgggcuguacaagcaccccggagugccgaccaaguggaaacgcugaggacuaguuauaagacugacuagcccgaugggccucccaacgggcccuccuccccuccuugcaccgagauuaauaaaaaaaaaaaaaaaaaaaaaaaaaaaaaaaaaaaaaaaaaaaaaaaaaaaaaaaaaaaaaaaaaaaaaaaaaaaaaaaaaaaaaaaaaaaaaaaaaaaa

SEQ ID NO: 29703 - RNA, 1662 nt, Artificial Sequence
  mRNA product Design i-3 (A100) comprising derived and/or modified sequence from LASV(803213;Clade II)__AAF86703__GPCmut5 (opt5)
aggagaaagcuuaccaugggccagaucauuaccuucuuucaagaggugccccacgucaucgaagagguuaugaacauugugcugaucgcccucagccugcuugcuauucugaaggggaucuacaauguggccacaugcggacucuucggccugaucuccuuucuucugcucugugggagaucuugcagcgucacguauaaaggaguguacgaacugcagacccuggagcucaacauggcgaaucugaacaugacaaugccucuuuccuguaccaagaauaacucucaucacuauauuaugguuggcaaugaaacagggcuggagcucacccugacaaacaccagcaucauuaaucauaaauucugcaaccuuuccgacgcucacaagaaaaaucuguacgaucaugcccucaugucuaucauuagcacguuucaccuguccaucccgaacuucaaucaguaugaggccaugagcugugacuuuaacggaggcaagauuucugugcaguacaaucugucccacagcuucgcugucgaugccgcuaaccauugcggcaccaucgccaacggggugcuccaaacauuuaugcggauggcguggggaggcucuuauaucgcccuggacuccggguguggaaauugggauugcauuaugaccagcuaccaguaccuuaucauucagaacacaaccugggaagaccacugucaguucucucgccccuccccuaucggcuaucuggggcuccugagccaaagaacgcgggauauuuacaucucccgcagacuucugggaacauuuaccuggacacucucugacagcgagggcaaugaagcucccggcggguauugccugacccgguggaugcugaucgaggccgagcucaaguguuucggaaacaccgcuguugccaaaugcaaugaaaagcaugaugaggaauuuugcgacaugcugcgccuuuucgauuucaacaaacaggcgauuaagagacugaaaacgccugcccagauguccauccagcucauuaauaaggcugugaacgcccugaucaaugaccaacuuauuaugaagaaccaucugcgggauaucauguguauccccuacugcaauuauagccgcuacugguaucucaaccacacagucaccggcaaaacaucucugccuagauguuggcugguguccaaugggagcuaccucaacgagacccacuuuucugacgacauugaacagcaggcugauaauaugaucacagagaugcugcaaaaggaguacauggaccggcagggaaaaaccccgcuuggccugguggaucucuucgucuuuagcacguccuucuaucugauuucuaucuuucugcaccuuguuaagauucccacacaucgccacaucguggggaaaccuugccccaagccucauagacucaaccacaugggaauuuguagcugcggccuguacaaacaccccggcgugccggucaaguggaagcggugaggacuaguuauaagacugacuagcccgaugggccucccaacgggcccuccuccccuccuugcaccgagauuaauaaaaaaaaaaaaaaaaaaaaaaaaaaaaaaaaaaaaaaaaaaaaaaaaaaaaaaaaaaaaaaaaaaaaaaaaaaaaaaaaaaaaaaaaaaaaaaaaaaaa

SEQ ID NO: 29704 - RNA, 1662 nt, Artificial Sequence
  mRNA product Design i-3 (A100) comprising derived and/or modified sequence from LASV(GA391;Clade III)__CAA36645__GPCmut5 (opt5)
aggagaaagcuuaccaugggccagaucgugaccuucuuucaagaggucccccacguuauugaagaggugaugaacaucgugcugauugcccucagcauccuggcuauucuuaaggggcuguacaaugucgccacaugcggacucaucggccuggugacguuccuucugcucuccgggagaucuuguagccugaucuauaaaggaaccuacgaacugcagacacucgagcugaacauggaaacccuuaauaugacaaugccucuguccugcaccaagaacaauucucaucacuauauucggguuggcaacgagacagggcucgagcugacccuuacgaauaccagcauccugaaccauaaauuuuguaaucucuccgacgcgcacaagcgcaaccuguacgaucauucucugaugagcauuaucuccacauuccaccucagcauuccgaauuuuaaccaguaugaagcuaugucuugcgacuucaauggaggcaaaaucaccgugcaguacaaccugucccacagcuuugccgucgaugccgcuggccauugugggacacuugccaauggagugcugcaaaccuucaugagaauggcuuggggcgggucuuauauugcccucgacuccggaugcggcaacugggauuguaucaugacgagcuaccaguaccugaucauucagaacacaaccugggacgaucacugccaguuuucucggcccuccccuaucggguaucuuggacugcucagccaacgcacaagagacauuuacaucucccggcgccugcugggcaccuucaccuggacacucucugauagcgagggcaaugaaacgcccgggggauauugucugaccagauggaugcuuauugaggcggagcugaagugcuuuggcaacacagccguugcuaaguguaaugaaaaacaugacgaggaguucugcgauaugcuccggcuguuugacuucaacaagcaggccauccgcagacuuaaaaccccugcucagauguccauccagcugauuaauaaggccgugaacgcgcucaucaaugaucaacugauuaugaaaaaccaucugcgggacaucaugugcauucccuacuguaauuauagccgcuacugguaucucaaccacacaucuaccgggaagacgucccugccuagaugcuggcuuaucagcaauggaucuuaccugaacgaaacaaaguucagcgacgauaucgaacagcaggccgacaauaugauuaccgagaugcuccaaaaagaguacaucgaucggcagggcaagaccccgcuggggcuggucgaccuuuuuguguucuccacaucuuuuuaucucauuagcaucuuccugcaccuggugaaaauucccacccaccgccauaucgucggaaagccuugucccaaaccucacagacucaaccauaugggcauuugcuccuguggccuguacaagcagcccgggguuccggugcgguggaaaagaugaggacuaguuauaagacugacuagcccgaugggccucccaacgggcccuccuccccuccuugcaccgagauuaauaaaaaaaaaaaaaaaaaaaaaaaaaaaaaaaaaaaaaaaaaaaaaaaaaaaaaaaaaaaaaaaaaaaaaaaaaaaaaaaaaaaaaaaaaaaaaaaaaaaa

SEQ ID NO: 29705 - RNA, 1665 nt, Artificial Sequence
  mRNA product Design i-3 (A100) comprising derived and/or modified sequence from LASV(AV;Clade V)__CCA30314__GPCmut5 (opt5)
aggagaaagcuuaccaugggccagaucgugaccuucuuucaagaggucccccacguuauugaagaggugaugaacaucgugcugauugcccucagcauccuggcuguccuuaaggggcuguacaauauugccacaugcggacucaucggccugaucacguuccuucugcucugugggagauccugcucuagcaaccuguauaaaggaguguacgaacugcagucccucgaccugaauauggagacccuuaacaugacaaugccucugucuuguaccaagaauaacagccaucacuauauucggguuggcaaugauacagggcucgaacugacccuuacaaacaccuccauccugaaucauaaauuuugcaaccucucugacgcgcacaagaaagaucuguacgaccaugcucugaugagcauuaucuccacguuccaccucagcauuccgaauuuuaaccaguaugaggccaugucuugugauuucaauggaggcaagaucuccgugcaguacaaccugagccacucuuaugccauugacgcugccaaucauugcggcaccgucgcuaacgggauccuucaaacauuuaugcgcauggccuggggaggcuccuacaucgcgcuggauagcggguguggaaacugggacugcauuaugaccucuuaccaguaucucaucauucagaauacaaccugggagaaccacugucaguucuccagacccagcccuaucggcuaccuggggcuucugucccaacggacgcgcgauauuuauaucucuagacggcuccugggaacauuuaccuggacacugagcgacuccgaaggcaaugccacccccggcggguacugccucacccgcuggaugcugaucgaggcugaacuuaaguguuucggaaacacagccguggcuaaaugcaaugagaagcaugaugaggaauuuugcgacaugcugagacucuucgauuuuaacaaacaggccauuagccggcugaagucuccugcgcagauguccauccagcuuauuaauaaagccguuaacgcucugaucaaugaccaacucauuaugaagaaccaucugcgcgacaucauguguauccccuauugcaauuacagcaaguauugguaccugaaccacacgauuaccggcaaaacaucucucccuaaguguuggcuggugagcaauggguccuaccuuaacgagacccacuucucugaugacaucgaacagcaggccgauaauaugauuacagagaugcugcaaaaagaauauauggagagacagggaaagaccccgcucggccuggucgaccuguucguguuuagcacguccuucuaccuuaucagcauuuuucuccggcuggugaaaauccccacacaccgccauauugucgggaagccuugccccaaaccucacagacugaaccauaugggaaucuguucuugcggccucuauaagcagcccggcguuccggugcgguggaagcgcugaggacuaguuauaagacugacuagcccgaugggccucccaacgggcccuccuccccuccuugcaccgagauuaauaaaaaaaaaaaaaaaaaaaaaaaaaaaaaaaaaaaaaaaaaaaaaaaaaaaaaaaaaaaaaaaaaaaaaaaaaaaaaaaaaaaaaaaaaaaaaaaaaaaa

SEQ ID NO: 29706 - RNA, 1662 nt, Artificial Sequence
  mRNA product Design i-3 (A100) comprising derived and/or modified sequence from LASV(Togo/2016/7082;Clade VI)__AMR44577__GPCmut5 (opt5)
aggagaaagcuuaccaugggccagaucauuaccuucuuucaagaggugccccacgucaucgaagagguuaugaacauugugcugaucgcccucagccugcuugcuauucugaaggggguguacaaugucgccacaugcggaaucaucggccucgugacguuccuguuucuuugugggagauccugcucucugauuuauaaaggaagcuacgaacuccagacccuggagcugaacauggaaacacucaauaugaccaugccucuguccuguacaaagaacucuagccaucacuauauccggguuggcaaugagaccgggcuugagcugacacucaccaacacguccauuaucaaucauaaauucugcaaccugucugacgcgcacaagcgcaaucuuuacgaucaugcucugaugagcauucucuccaccuuucaccugagcaucccgaacuucaaucaguaugaagccaugucuugugacuuuaacggaggcaaaauuuccgugcaguacaaucugagccacgccuaugcugucgaugccgcugagcauugcggcacaguggccaacgggguucuccaaaccuucaugagaauggcguggggaggcucuuacaucgcccuggacuccggguguggaaauugggauugcaucaugacaagcuaccaguaucuuauuauccagaacaccacgugggaagaccacugucaguuuucucggcccuccccuauuggcuaccuggggcuccugagccaacgcacaagagauaucuauauuucccggcgccuucugggaaccuucacauggacccucucugacagcgagggcaacgagacccccggcggguacugccugacaagauggaugcugaucgaagcugagcucaaguguuuuggaaauacggccguggcuaagugcaacgaaaaacaugaugaggaguucugcgacaugcugcggcuuuuugauuucaauaagcaggccauccagcgccugaaauccccugcgcagaugagcauucaacucaucaacaaggccgucaaugcucugauuaacgaccagcuuaucaugaaaaaucaccugagagauaugauguguauucccuauugcaacuacucuaaguauugguaccucaaucacaccuccagcggccggacaucucugccuaaguguuggcuggugagcaacggguccuaccucaaugaaacccauuucucugacgacaucgagcagcaagccgauaacaugaucacagaaaugcugcagaaagaguauauugaccgccagggaaagaccccgcuuggccugguggaucucuuugucuucagcacguccuuuuaccugaucagcauuuuccugcaccuuaucaaaauucccacacauagacacaucguugggaagccuugccccaaaccucaucggcucaaucacaugggaauuuguucuugcggccuguauaagcagcccggcgugccgacccgcuggaaaagaugaggacuaguuauaagacugacuagcccgaugggccucccaacgggcccuccuccccuccuugcaccgagauuaauaaaaaaaaaaaaaaaaaaaaaaaaaaaaaaaaaaaaaaaaaaaaaaaaaaaaaaaaaaaaaaaaaaaaaaaaaaaaaaaaaaaaaaaaaaaaaaaaaaaa

SEQ ID NO: 29707 - RNA, 1662 nt, Artificial Sequence
  mRNA product Design i-3 (A100) comprising derived and/or modified sequence from LASV(KAK-428;Clade n.d. (VII))__ANH09740__GPCmut5 (opt5)
aggagaaagcuuaccaugggccagaucgugaccuucuuucaagaggucccccacguuauugaagaggugaugaacaucgugcugauugcccucagccugcuugcuauccugaaggggcucuacaauuucgccacaugcggagucauuggccugaucacguuucuucugcucugugggagauccugcucugcgaccuauaaaggacaguacgaacugcagacacuggagcucaacauggaaagccugaauaugaccaugccucuuuccuguacaaagaacaauucucaucacuauauccgggcuggcaacaauaccgggcuggagcucacacugaccaacacgagcauuaucucccauaaauucugcaaucuuucugacgcccacaagaaaaaccuguacgaucauacccucaugagcauuaucacaaccuuucaccuguccauuccgaauuucaaccaguaugaggccaugagcugugacuuuaauggaggcaagaucucuauucaauacaaccugucccacagcuaugcuggcgaugccgcucagcauugcgggacaguggccaauggaguucuccagaccuucaugcgcauggcguggggcgggucuuaccuggcccuugacuccggauguagaggcugggauugcaucaucagcucuuaccaguaucugauuauccaaaacacgacaugggacgaucacugucaguuuucccggcccagcccuauuggguaccucggauucgugucccagaagacccgcgacaucuauauuucuagacggcugcuuggcacauuuaccuggacccugagcgauuccgaaggccaugacaugcccgggggauacugccucacacgcuggaugcugaucgaggcugaucugaaauguuucggcaacacggccgucgcuaagugcaaugaaaaacacgacgaggaguuuugcgauauguggagacucuucgacuucaacaagcaggccauccaacggcugaaagcgccugcccagaugaauauucagcuuaucaacaaggcugugaaugcccugauuaacgaccaacucaugaugaagaaucaucugcgcgauaucauguguauucccuauugcaacuacagcaaauuuugguaucuuaauaacaccacaaccgggagaacaucucugccucgguguuggcucaucuccaauggaagcuaccugaacgaaacccacuucucugacgauaucgagcagcaggcugacaauaugauuacggaaaugcugcagaaggaguacauggaucgccaaggcaaaacaccgcucgggcugguugaccuuuuuguguucagcaccuccuuuuaucugaucaccauuuuccuccaccuggucaagauccccacacauagacacauugugggaaaaccuugccccaagccucaucggcugaaccacaugggcaucuguucuugcggccuuuacaaacagcccggggugccgguccgcuggaagagaugaggacuaguuauaagacugacuagcccgaugggccucccaacgggcccuccuccccuccuugcaccgagauuaauaaaaaaaaaaaaaaaaaaaaaaaaaaaaaaaaaaaaaaaaaaaaaaaaaaaaaaaaaaaaaaaaaaaaaaaaaaaaaaaaaaaaaaaaaaaaaaaaaaaa

SEQ ID NO: 29708 - RNA, 1662 nt, Artificial Sequence; identical to SEQ ID NO: 29702
  mRNA product Design i-3 (A100) comprising derived and/or modified sequence from LASV(Pinneo-NIG-1969;Clade I)__AIT17836__GPCmut5 (opt5)

SEQ ID NO: 29709 - RNA, 1662 nt, Artificial Sequence
  mRNA product Design i-3 (A100) comprising derived and/or modified sequence from LASV(ISTH0009-NIG-2011;Clade II)__AIT17404__GPCmut5 (opt5)
aggagaaagcuuaccaugggccagaucauuaccuucuuucaagaggugccccacgucaucgaagagguuaugaacauugugcugaucgcccucagccugcuugcuauucugaaggggaucuacaauguggccacaugcggacucuucggccuggucuccuuucuucugcucugugggagaucuugcagcacgaccuauaaaggaguguacgaacugcagacacuggagcucgacauggcgucccugaacaugaccaugccucuuucuuguacaaagaauaacagccaucacuauaucaugguuggcaaugaaaccgggcuggagcucacacugaccaacacguccauuaucaaucauaaauucugcaaccuuucugaugcucacaagaaaaaucuguacgaccaugcccucaugagcauuaucuccaccuuucaccugagcauuccgaacuucaaucaguaugaggccaugucuugugauuuuaacggaggcaagaucuccgugcaguacaaucugagccacgcuuaugccgucgacgcugccaaccauugcggcacaauugcgaauggggugcuccaaaccuucaugcggauggccuggggaggcucuuacaucgcucuggauuccggguguggaagcugggacugcaucaugacaucuuaccaguaucuuauuauccagaacaccacgugggaagaucacugucaguuuucccgccccagcccuauuggcuaccuggggcuccugucccaaagaacacgggacaucuauauuucucgcagacuucugggaaccuucacauggacccucagcgauuccgagggcaacgaaacccccggcggguacugccugacacgguggaugcugaucgaggccgagcucaaguguuuuggaaauacggcuguugccaaaugcaacgaaaagcaugacgaggaguucugcgauaugcugcgccuuuuugacuucaauaaacaggcgaucagacggcugaagaccccugcccagaugagcauucagcucaucaacaaagcugugaaugcccugauuaacgaucaacuuaucaugaagaaucaucugcgcgacauuauguguauccccuauugcaacuacucuaaguauugguaccucaaucacacagucaccggcaaaacaucccugccuagauguuggcuggugagcaacgggucuuaccucaaugaaacccacuucagcgacgauaucgaacagcaggcugacaacaugauuacggagcugcuucaaaaggaguauauggaucggcagggaaaaacaccgcugggccucguggaccuguuugucuucuccaccucuuuuuaccugaucagcauuuuccuucaccucaucaagauucccacccaucgccacaucacagggaaaccuugccccaagccucauagacugaaucacaugggaauuuguuccugcggccuguauaaacaccccggcguuccggugaaguggaagcggugaggacuaguuauaagacugacuagcccgaugggccucccaacgggcccuccuccccuccuugcaccgagauuaauaaaaaaaaaaaaaaaaaaaaaaaaaaaaaaaaaaaaaaaaaaaaaaaaaaaaaaaaaaaaaaaaaaaaaaaaaaaaaaaaaaaaaaaaaaaaaaaaaaaa

SEQ ID NO: 29710 - RNA, 1662 nt, Artificial Sequence
  mRNA product Design i-3 (A100) comprising derived and/or modified sequence from LASV(ISTH2010-NIG-2012;Clade II)__AIT17482__GPCmut5 (opt5)
aggagaaagcuuaccaugggccagaucauuaccuucuuucaagaggugccccacgucaucgaagagguuaugaacauugugcugaucgcccucagccugcuugcuauucugaaggggaucuacaauguggccacaugcggacucuucggccuggucuccuuucuucugcucugugggagaucuugcagcacgaccuauaaaggaguguacgaacugcagacacuggagcucgacauggcgucccugaacaugaccaugccucuuucuuguacaaagaauaacagccaucacuauaucaugguuggcaaugaaaccgggcuggagcucacacugaccaacacguccauuaucaaucauaaauucugcaaccuuucugaugcucacaagaaaaaucuguacgaccaugcccucaugagcauuaucuccaccuuucaccugagcauuccgaacuucaaucaguaugaggccaugucuugugauuuuaacggaggcaagaucuccgugcaguacaaucugagccacgcuuaugccgucgacgcugccaaccauugcggcacaauugcgaauggggugcuccaaaccuucaugcggauggccuggggaggcucuuacaucgcucuggauuccggguguggaagcugggacugcaucaugacaucuuaccaguaucuuauuauccagaacauuaccugggaagaucacugucaguuuucccgccccagcccuaucggcuaccuggggcuccugucccaaagaacgcgggacauuuauaucucucgcagacuucugggaacauucaccuggacacucagcgauuccgagggcaacgaaacccccggcggguacugccugacccgguggaugcugaucgaggccgagcucaaguguuuuggaaauacagcuguugccaaaugcaacgaaaagcaugacgaggaguucugcgauaugcugcgccuuuuugacuucaauaaacaggcgauuagacggcugaagacgccugcccagaugagcauccagcucauuaacaaagcugugaaugcccugaucaacgaucaacuuauuaugaagaaucaucugcgcgacaucauguguauccccuauugcaacuacucuaaguauugguaccucaaucacaccgucacaggcaaaaccucccugccuagauguuggcuggugagcaacgggucuuaccucaaugaaacacacuucagcgacgauauugaacagcaggcugacaacaugaucaccgagcugcuucaaaaggaguauauugaucggcagggaaaaacgccgcugggccucguggaccuguuugucuucuccacaucuuuuuaccugaucagcauuuuccuucaccucguuaagauccccacccaucgccacgugguggggaaaccuugccccaagccucauagacugaaucacaugggaauuuguuccugcggccuguauaaacaccccggcgucccggugaaguggaagcggugaggacuaguuauaagacugacuagcccgaugggccucccaacgggcccuccuccccuccuugcaccgagauuaauaaaaaaaaaaaaaaaaaaaaaaaaaaaaaaaaaaaaaaaaaaaaaaaaaaaaaaaaaaaaaaaaaaaaaaaaaaaaaaaaaaaaaaaaaaaaaaaaaaaa

SEQ ID NO: 29711 - RNA, 1662 nt, Artificial Sequence
  mRNA product Design i-3 (A100) comprising derived and/or modified sequence from LASV(Lassa virus/H.sapiens-wt/NGA/2015/ISTH_0543;Clade II)__AVO03639__GPCmut5 (opt5)
aggagaaagcuuaccaugggccagaucauuaccuucuuucaagaggugccccacgucaucgaagagguuaugaacauugugcugaucgcccucagccugcuugcuauucugaaggggaucuacaauguggccacaugcggacucuucggccuggucuccuuucuucugcucugugggagaucuugcagcacgaccuauaaaggaguguacgaacugcagacacuggagcucgacauggcgaaccugaauaugaccaugccucuuuccuguacaaagaacaauucucaucacuauaucaugguuggcaacgaaaccgggcuggagcucacacugaccaauacgagcauuaucaaccauaaauucugcaaucuuuccgaugcucacaagaaaaaccuguacgaccaugcccucaugucuauuaucagcaccuuucaccuguccauuccgaauuucaaccaguaugaggccaugagcugugauuuuaauggaggcaagaucucugugcaguacaaccugucccacacauaugcugucgacgccgcuaaucauugcggcaccauugccaacggggugcuccaaacauucaugcggauggcguggggaggcagcuacaucgcccuggauucuggguguggauccugggacugcaucaugaccagcuaccaguaucuuguuauucagaacacgacaugggaagaucacugucaguuuucucgccccuccccuaucggcuaccuggggcuccugagccaaagaacccgggacauuuauaucucccgcagacuucugggaacauucaccuggacccucucugauagcgagggcaaugaaacacccggcggguacugccugacgcgguggaugcugauugaggcugagcucaaguguuuuggaaacaccgccguggcuaaaugcaaugaaaagcaugacgaggaguucugcgauaugcugcgccuuuuugacuucaacaaacaggccaucagacggcugaagaccccugcgcagauguccauccagcucauuaauaaagccgucaacgcucugaucaaugaucaacuuauuaugaagaaccaucugcgcgacaucauguguauucccuauugcaauuacagcaaguauugguaccucaaccacacagugacaggcaaaaccucucugccuagauguuggcugguguccaaugggagcuaccucaacgaaacgcacuucucugacgauaucgaacagcaggccgacaauaugaucacagagcugcuucaaaaggaguauauugaucggcagggaaaaaccccgcugggccucgucgaccuguuuguuuucagcaccuccuuuuaccugaucucuauuuuccuucaccucgugaagauccccacacaucgccacauuaccgggaaaccuugccccaagccucauagacugaaccacaugggaaucuguagcugcggccuguauaaacaccccggcgugccggucaaguggaagcggugaggacuaguuauaagacugacuagcccgaugggccucccaacgggcccuccuccccuccuugcaccgagauuaauaaaaaaaaaaaaaaaaaaaaaaaaaaaaaaaaaaaaaaaaaaaaaaaaaaaaaaaaaaaaaaaaaaaaaaaaaaaaaaaaaaaaaaaaaaaaaaaaaaaa

SEQ ID NO: 29712 - RNA, 1662 nt, Artificial Sequence
  mRNA product Design i-3 (A100) comprising derived and/or modified sequence from LASV(Lassa virus/H.sapiens-wt/NGA/2016/ISTH_0009;Clade II)__AVO03571__GPCmut5 (opt5)
aggagaaagcuuaccaugggccagaucauuaccuucuuucaagaggugccccacgucaucgaagagguuaugaacauugugcugaucgcccucagccugcuugcuauucugaaggggaucuacaauguggccacaugcggacuccugggccuugucuccuuccugcuccugugugggagaucuugcagcacgaccuauaaaggaguguacgaacugcagacacucgagcuggacauggcgucccuuaacaugaccaugccucugucuuguacaaagaauaacagccaucacuauaucaugguuggcaaugaaaccgggcucgagcugacacuuaccaacacguccauuaucaaucauaaauuuugcaaccugucugaugcucacaagaaaaaucucuacgaccaugcccugaugagcauuaucuccaccuuccaccugagcauuccgaacuuuaaucaguaugaggccaugucuugugauuucaacggaggccggaucuccgugcaguacaaucucagccacucuuaugcugucgacgccgcuaaccauugcggcacaauugccaauggggugcugcaaaccuuuaugcgcauggcguggggaggcuccuacaucgcccuugauagcggguguggaucuugggacugcaucaugacauccuaccaguaucugauuauccagaacaccacgugggaagaucacugucaguucagcagacccuccccuauuggcuaccucgggcugcuuucucaacggacacgcgacaucuauauuagcagacggcugcucggaaccuuuacauggacccuguccgauagcgagggcaacgaaacccccggcggguacugccugacacgcuggaugcucaucgaggcugagcugaaguguuucggaaauacggccguugcuaagugcaacgaaaaacaugacgaggaauuuugcgauaugcuuagacuguucgacuuuaauaagcaggccauccggcgccucaaaaccccugcgcagaugucuauucagcugaucaacaaggccgugaaugcucuuauuaacgaucaacugaucaugaaaaaucaccucagagacauuauguguauccccuauugcaacuacuccaaguauugguaccugaaucacacagucaccggcaagacaagccugccucgguguuggcucgugucuaacgggagcuaccugaaugagacccauuucuccgacgauaucgaacagcaggccgacaacaugauuacggagcuucugcaaaaagaguauaucgaucgccagggaaagacaccgcucggccugguggaccuguucgucuuuucuaccagcuucuaccuuauuuccaucuuucuccaccugguuaaaauucccacccauagacacaucacagggaagccuugccccaaaccucaucggcugaaucacaugggaauuuguagcugcggccucuauaaccaccccggcgugccggugaaguggaaacgcugaggacuaguuauaagacugacuagcccgaugggccucccaacgggcccuccuccccuccuugcaccgagauuaauaaaaaaaaaaaaaaaaaaaaaaaaaaaaaaaaaaaaaaaaaaaaaaaaaaaaaaaaaaaaaaaaaaaaaaaaaaaaaaaaaaaaaaaaaaaaaaaaaaaa

SEQ ID NO: 29713 - RNA, 1662 nt, Artificial Sequence
  mRNA product Design i-3 (A100) comprising derived and/or modified sequence from LASV(Lassa virus/H.sapiens-wt/NGA/2016/ISTH_0017;Clade II)__AVO03567__GPCmut5 (opt5)
aggagaaagcuuaccaugggccagaucauuaccuucuuucaagaggugccccacgucaucgaagagguuaugaacauugugcugaucgcccucagccugcuugcuauucugaaggggaucuacaauguggccacaugcggacucuucggccuggucuccuuucuucugcucugugggagaucuugcagcacgaccuauaaaggaguguacgaacugcagacacuggagcucgacauggcgucccugaacaugaccaugccucuuucuuguacaaagaauaacagccaucacuauaucaugguuggcaaugaaaccgggcuggagcucacacugaccaacacguccauuaucaaucauaaauucugcaaccuuucugaugcucacaagaaaaaucuguacgaccaugcccucaugagcauuaucuccaccuuucaccugagcauuccgaacuucaaucaguaugaggccaugucuugugauuuuaacggaggcaagaucuccgugcaguacaaucugagccacacauaugcuauugacgccgcuaaccauugcggcaccaucgccaaugggguccuccaaacauucaugcggauggcguggggaggcucuuacaucgcccuggauuccggguguggaagcugggacugcauuaugaccucuuaccaguaucuuaucauucagaacacgacaugggaagaucacugucaguuuucccgccccagcccuaucggcuaccuggggcuccugucccaaagaacccgggacauuuauaucucucgcagacuucugggaacauucaccuggacccucagcgauuccgagggcaacgaaacacccggcggguacugccugacgcgguggaugcugaucgaggcugagcucaaguguuuuggaaauaccgccguggcuaaaugcaacgaaaagcaugacgaggaguucugcgauaugcugcgccuuuuugacuucaauaaacaggccauuagacggcugaagaccccugcgcagaugagcauccagcucauuaacaaagccguuaaugcucugaucaacgaucaacuuauuaugaagaaucaucugcgcgacaucauguguauccccuauugcaacuacucuaaguauugguaccucaaucacacagugacaggcaaaaccucccugccuagauguuggcuggucagcaacgggucuuaccucaaugaaacgcacuucagcgacgauauugaacagcaggccgacaacaugaucacagagcugcuucaaaaggaguauauggaucggcagggaaaaaccccgcugggccucguggaccuguuuguguucuccaccucuuuuuaccugauuagcaucuuccuucaccucguccgcauucccacacauagacacguuaucgggaagccuugccccaaaccucaucggcugaaucacaugggaauuuguuccugcggccuguauaagcaccccggcgugccggugaaauggaagcgcugaggacuaguuauaagacugacuagcccgaugggccucccaacgggcccuccuccccuccuugcaccgagauuaauaaaaaaaaaaaaaaaaaaaaaaaaaaaaaaaaaaaaaaaaaaaaaaaaaaaaaaaaaaaaaaaaaaaaaaaaaaaaaaaaaaaaaaaaaaaaaaaaaaaa

SEQ ID NO: 29714 - RNA, 1662 nt, Artificial Sequence
  mRNA product Design i-3 (A100) comprising derived and/or modified sequence from LASV(Lassa virus/H.sapiens-wt/NGA/2018/ISTH_0959;Clade II)__AVV65099__GPCmut5 (opt5)
aggagaaagcuuaccaugggccagaucauuaccuucuuucaagaggugccccacgucaucgaagagguuaugaacauugugcugaucgcccucagccugcuugcuauucugaaggggaucuacaauguggucacaugcggacucuucggccugguguccuuucuucugcucugugggagaucuugcagcacgaccuauaaaggaguuuacgaacugcagacacuggagcucgacauggccucccugaacaugaccaugccucuuucuuguacaaagaauaacagccaucacuauaucauggugggcaaugaaaccgggcuggagcucacacugaccaacacguccauuaucaaucauaaauucugcaaccuuucugaugcgcacaagaaaaaucuguacgaccaugcucucaugagcauuaucuccaccuuucaccugagcauuccgaacuucaaucaguaugaggccaugucuugugauuuuaacggaggcaagaucuccguccaguacaaucugagccacgccuaugcuauugacgccgcuaaccauugcggcacaaucgccaauggggugcuccaaaccuucaugcggauggcguggggaggcucuuacaucgcccuggauuccggguguggaagcugggacugcauuaugacaucuuaccaguaucuuaucauucagaacaccacgugggaagaucacugucaguuuucccgccccagcccuaucggcuaccuggggcuccugucccaaagaacacgggacauuuauaucucucgcagacuucugggaaccuucacauggacccucagcgauuccgagggcaacgaaacccccggcggguacugccugacacgguggaugcugaucgaggcugagcucaaguguuuuggaaauacggccguugcuaaaugcaacgaaaagcaugacgaggaguucugcgauaugcugcgccuuuuugacuucaauaaacaggccauuagacggcugaagaccccugcgcagaugagcauccagcucauuaacaaagccgugaaugcucugaucaacgaucaacuuauuaugaagaaucaucugcgcgacaucauguguauccccuauugcaacuacucuaaguauugguaccucaaucacacagucaccggcaaaacaucccugccuagauguuggcuggugagcaacgggucuuaccucaaugaaacccacuucagcgacgauauugaacagcaggccgacaacaugaucacggagcugcuucaaaaggaguauauugaucggcagggaaaaacaccgcugggccucguggaccuguuugucuucuccaccucuuuuuaccugaucagcauuuuccuucaccucguuaagauccccacccaucgccacgugauugggaaaccuugccccaagccucauagacugaaucacaugggaaucuguuccugcggccuguauaaacaccccggcgugccggucaaguggaagcggugaggacuaguuauaagacugacuagcccgaugggccucccaacgggcccuccuccccuccuugcaccgagauuaauaaaaaaaaaaaaaaaaaaaaaaaaaaaaaaaaaaaaaaaaaaaaaaaaaaaaaaaaaaaaaaaaaaaaaaaaaaaaaaaaaaaaaaaaaaaaaaaaaaaa

SEQ ID NO: 29715 - RNA, 1662 nt, Artificial Sequence
  mRNA product Design i-3 (A100) comprising derived and/or modified sequence from LASV(LASV003-NIG-2008;Clade II)__AIT17580__GPCmut5 (opt5)
aggagaaagcuuaccaugggccagaucauuaccuucuuucaagaggugccccacgucaucgaagagguuaugaacauugugcugaucgcccucagccugcuugcuauucugaaggggaucuacaauguggccacaugcggacucuucggccuggucuccuuucuucugcucugugggagaucuugcagcacgaccuauaaaggaguguacgaacugcagacacuggagcucgacauggcgucccugaacaugaccaugccucuuucuuguacaaagaauaacagccaucacuauaucaugguuggcaaugaaaccgggcuggagcucacacugaccaacacguccauuaucaaucauaaauucugcaaccuuucugaugcucacaagaaaaaucuguacgaccaugcccucaugagcauuaucuccaccuuucaccugagcauuccgaacuucaaucaguaugaggccaugucuugugauuuuaacggaggcaagaucuccgugcaguacaaucugagccacacauaugcugucgacgccgcuaaccauugcggcaccauugccaauggggugcuccaaacauucaugcggauggcguggggaggcucuuacaucgcccuggauuccggguguggaagcugggacugcaucaugaccucuuaccaguaucuuauuauccagaacacgacaugggaagaucacugucaguuuucccgccccagcccuauuggcuaccuggggcuccugucccaaagaacccgggacaucuauauuucucgcagacuucugggaacauucaccuggacccucagcgauuccgagagcaacgaaacacccggcggcuacugccugacgcgguggaugcugaucgaggcugagcucaaguguuuugggaauaccgccguugcuaaaugcaacgaaaagcaugacgaggaguucugcgauaugcugcgccuuuuugacuucaauaaacaggccaucagacggcugaaggcgccugcccagaugucuauucagcucaucaacaaagcugugaaugcccugauuaacgaucaacuuaucaugaagaaucaucugcgcgacauuauguguauccccuauugcaacuacuccaaguauugguaccucaaucacacagucaccggaagaacaagccugccucgguguuggcuggugucuaacggcagcuaccucaaugaaacccacuucuccgacgauaucgaacagcaggcugacaacaugauuacggagcugcuucaaaaagaguauauggaucgccaggggaagacaccgcugggacucguggaccuguuugucuucucuaccagcuuuuaccugaucuccauuuuccuucaccucguuaaaauccccacccauagacacgugauuggcaagccuugccccaaaccucaucggcugaaucacauggggaucuguagcugcggacuguauaagcaccccggcgugccggucaaauggaagcgcugaggacuaguuauaagacugacuagcccgaugggccucccaacgggcccuccuccccuccuugcaccgagauuaauaaaaaaaaaaaaaaaaaaaaaaaaaaaaaaaaaaaaaaaaaaaaaaaaaaaaaaaaaaaaaaaaaaaaaaaaaaaaaaaaaaaaaaaaaaaaaaaaaaaa

SEQ ID NO: 29716 - RNA, 1662 nt, Artificial Sequence
  mRNA product Design i-3 (A100) comprising derived and/or modified sequence from LASV(LASV035-NIG-2009;Clade II)__AIT17588__GPCmut5 (opt5)
aggagaaagcuuaccaugggccagaucauuaccuucuuucaagaggugccccacgucaucgaagagguuaugaacauugugcugaucgcccucagccugcuugcuauucugaaggggaucuacaauguggccacaugcggacucuucggccuggucuccuuucuucugcucugugggagaucuugcagcacgaccuauaaaggaguguacgaacugcagacacuggagcucgacauggcgucccugaacaugaccaugccucuuucuuguacaaagaauaacagccaucacuauaucaugguuggcaaugaaaccgggcuggagcucacacugaccaacacguccauuaucaaucauaaauucugcaaccuuucugaugcucacaagaaaaaucuguacgaccaugcccucaugagcauuaucuccaccuuucaccugagcauuccgaacuucaaucaguaugaggccaugucuugugauuuuaacggaggcaagaucuccgugcaguacaaucugagccacgcuuaugccgucgacgcugccaaccauugcggcacaauugcgaauggggugcuccaaaccuucaugcggauggccuggggaggcucuuacaucgcucuggauuccggguguggaagcugggacugcaucaugacaucuuaccaguaucuuauuauccagaacaccacgugggaagaucacugucaguuuucccgccccagcccuauuggcuaccuggggcuccugucccaaagaacacgggacaucuauauuucucgcagacuucugggaaccuucacauggacccucagcgauuccgagggcaacgaaacccccggcggguacugccugacacgguggaugcugaucgaggccgagcucaaguguuuuggaaauacggcuguugccaaaugcaacgaaaagcaugacgaggaguucugcgauaugcugcgccuuuuugacuucaauaaacaggcgaucagacggcugaaggccccugcucagaugagcauucagcucaucaacaaagccgugaaugcucugauuaacgaucaacuuaucaugaagaaucaucugcgcgacauuauguguauccccuauugcaacuacucuaaguauugguaccucaaucacaccgucacaggcaaaaccucccugccuagauguuggcuggugagcaacgggucuuaccucaaugaaacacacuucagcgacgauaucgaacagcaggccgacaacaugauuaccgagcugcuucaaaaggaguauaucgaucggcagggaaaaacgccgcugggccucguggaccuguuugucuucuccacaucuuuuuaccugauuagcaucuuccuucaccucguuaagauucccacccaucgccacgugaucgggaaaccuugccccaagccucauagacugaaucacaugggaauuuguuccugcggccuguauaaacaccccggcgugccggucaaguggaagcggugaggacuaguuauaagacugacuagcccgaugggccucccaacgggcccuccuccccuccuugcaccgagauuaauaaaaaaaaaaaaaaaaaaaaaaaaaaaaaaaaaaaaaaaaaaaaaaaaaaaaaaaaaaaaaaaaaaaaaaaaaaaaaaaaaaaaaaaaaaaaaaaaaaaa

SEQ ID NO: 29717 - RNA, 1662 nt, Artificial Sequence
  mRNA product Design i-3 (A100) comprising derived and/or modified sequence from LASV(LASV1000-NIG-2009;Clade II)__AIT17782__GPCmut5 (opt5)
aggagaaagcuuaccaugggccagaucauuaccuucuuucaagaggugccccacgucaucgaagagguuaugaacauugugcugaucgcccucagccugcuugcuauucugaaggggaucuacaauguggccacaugcggacucuucggccuggucuccuuucuucugcucugugggagaucuugcagcacgaccuauaaaggaguguacgaacugcagacacuggagcucgacauggcgucccugaacaugaccaugccucuuucuuguacaaagaauaacagccaucacuauaucaugguuggcaaugaaaccgggcuggagcucacacugaccaacacguccauuaucaaucauaaauucugcaaccuuucugaugcucacaagaaaaaucuguacgaccaugcccucaugagcauuaucuccaccuuucaccugagcauuccgaacuucaaucaguaugaggccaugucuugugauuuuaacggaggcaagaucuccgugcaguacaaucugagccacacauaugcugucgacgccgcuaaccauugcggcaccauugccaauggggugcuccaaacauucaugcggauggcguggggaggcucuuacaucgcccuggauuccggguguggaagcugggacugcaucaugaccucuuaccaguaucuuauuauccagaacacgacaugggaagaucacugucaguuuucccgccccagcccuauuggcuaccuggggcuccugucccaaagaacccgggacaucuauauuucucgcagacuucugggaacauucaccuggacccucagcgauuccgagggcaacgaaacacccggcggguacugccugacgcgguggaugcugaucgaggcugagcucaaguguuuuggaaauaccgccguugcuaaaugcaacgaaaagcaugacgaggaguucugcgauaugcugcgccuuuuugacuucaauaaacaggccaucaagagacugaaaaccccugcgcagaugagcauucagcucaucaacaaggccgugaaugcucugauuaacgaucaacuuaucaugaagaaucaucugcgggacauuauguguauccccuauugcaacuacucuaaauauugguaccucaaucacacagucacaggcaagaccucccugccucgcuguuggcuggugagcaacgggucuuaccucaaugaaacgcacuucagcgacgauaucgaacagcaggccgacaacaugauuacagagcugcuucaaaaagaguauaucgauagacagggaaagaccccgcugggccucguggaccuguuugucuucuccaccucuuuuuaccugauuagcaucuuccuucaccucguuaaaauucccacacaucggcacgugguggggaagccuugccccaaaccucaucgccugaaucacaugggaaucuguuccugcggccuguauaagcaccccggcgucccggugaaguggaaaagaugaggacuaguuauaagacugacuagcccgaugggccucccaacgggcccuccuccccuccuugcaccgagauuaauaaaaaaaaaaaaaaaaaaaaaaaaaaaaaaaaaaaaaaaaaaaaaaaaaaaaaaaaaaaaaaaaaaaaaaaaaaaaaaaaaaaaaaaaaaaaaaaaaaaa

SEQ ID NO: 29718 - RNA, 1662 nt, Artificial Sequence
  mRNA product Design i-3 (A100) comprising derived and/or modified sequence from LASV(LASV221-NIG-2010;Clade II)__AIT17624__GPCmut5 (opt5)
aggagaaagcuuaccaugggccagaucauuaccuucuuucaagaggugccccacgucaucgaagagguuaugaacauugugcugaucgcccucagccugcuugcuauucugaaggggaucuacaauguggccacaugcggacucuucggccuggucuccuuucuucugcucugugggagaucuugcagcacgaccuauaaaggaguguacgaacugcagacacuggagcucgacauggcgucccugaacaugaccaugccucuuucuuguacaaagaauaacagccaucacuauaucaugguuggcaaugaaaccgggcuggagcucacacugaccaacacguccauuaucaaucauaaauucugcaaccuuucugaugcucacaagaaaaaucuguacgaccaugcccucaugagcauuaucuccaccuuucaccugagcauuccgaacuucaaucaguaugaggccaugucuugugauuuuaacggaggcaagaucuccgugcaguacaaucugagccacacauaugcuauugacgccgcuaaccauugcggcaccaucgccaaugggguccuccaaacauucaugcggauggcguggggaggcucuuacaucgcccuggauuccggguguggaagcugggacugcauuaugaccucuuaccaguaucuuaucauucagaacacgacaugggaagaucacugucaguuuucccgccccagcccuaucggcuaccuggggcuccugucccaaagaacccgggacauuuauaucucucgcagacuucugggaacauucaccuggacccucagcgauuccgagggcaacgaaacacccggcggguacugccugacgcgguggaugcugaucgaggcugagcucaaguguuuuggaaauaccgccguggcuaaaugcaacgaaaagcaugacgaggaguucugcgauaugcugcgccuuuuugacuucaauaaacaggccauuagacggcugaagaccccugcgcagaugagcauccagcucauuaacaaagccguuaaugcucugaucaacgaucaacuuauuaugaagaaucaucugcgcgacaucauguguauccccuauugcaacuacucuaaguauugguaccucaaucacacagugacaggcaaaaccucccugccuagauguuggcuggucagcaacgggucuuaccucaaugaaacgcacuucagcgacgauauugaacagcaggccgacaacaugaucacagagaugcugcaaaaggaguauauggaucggcagggaaaaaccccgcuuggccugguggaccucuuuguguucuccaccucuuuuuaccugauuagcaucuuccugcaccuugucaagauucccacacaucgccacguuaucgggaaaccuugccccaagccucauagacucaaucacaugggaauuuguuccugcggccuguauaaacaccccggcgugccggugaaguggaagcggugaggacuaguuauaagacugacuagcccgaugggccucccaacgggcccuccuccccuccuugcaccgagauuaauaaaaaaaaaaaaaaaaaaaaaaaaaaaaaaaaaaaaaaaaaaaaaaaaaaaaaaaaaaaaaaaaaaaaaaaaaaaaaaaaaaaaaaaaaaaaaaaaaaaa

SEQ ID NO: 29719 - RNA, 1662 nt, Artificial Sequence
  mRNA product Design i-3 (A100) comprising derived and/or modified sequence from LASV(LASV237-NIG-2010;Clade II)__AIT17638__GPCmut5 (opt5)
aggagaaagcuuaccaugggccagaucauuaccuucuuucaagaggugccccacgucaucgaagagguuaugaacauugugcugaucgcccucagccugcuugcuauucugaaggggaucuacaauguggccacaugcggacucuucggccuggucuccuuucuucugcucugugggagaucuugcagcacgaccuauaaaggaguguacgaacugcagacacuggagcucgacauggcgucccugaacaugaccaugccucuuucuuguacaaagaauaacagccaucacuauaucaugguuggcaaugaaaccgggcuggagcucacacugaccaacacguccauuaucaaucauaaauucugcaaccuuucugaugcucacaagaaagaccuguacgaucaugcccucaugagcauuaucuccaccuuucaccugagcauuccgaauuucaaccaguaugaggccaugucuugugacuuuaauggaggcaagaucuccgugcaguacaaccugagccacacauaugcugucgaugccgcuaaucauugcggcaccauugccaacggggugcuccaaacauucaugcggauggcguggggaggcucuuacaucgcccuggacuccggguguggaagcugggauugcaucaugaccucuuaccaguaucuuauuauccagaauacgacaugggaagaccacugucaguuuucccgccccagcccuauuggcuaccuggggcuccugucccaaagaacccgggauaucuauauuucucgcagacuucugggaacauucaccuggacccucagcgacuccgagggcaacgaaacacccggcggguacugccugacgcgguggaugcugaucgaggcugagcucaaguguuuuggaaacaccgccguugcuaaaugcaaugaaaagcaugaugaggaguucugcgacaugcugcgccuuuuugauuucaacaaacaggccaucagacggcugaagaccccugcgcagaugagcauucagcucaucaauaaagccgugaacgcucugauuaaugaccaacuuaucaugaagaaccaucugcgcgacauuauguguauccccuauugcaauuacucuaaguauugguaccucaaccacacagucacaggcaaaaccucccugccuagauguuggcuggugagcaaugggucuuaccucaacgaaacgcacuucagcgaugacaucgaacagcaggccgauaauaugauuacagagcugcuucaaaaggaguauauggaccggcagggaaaaaccccgcugggccucguggaucuguuugucuucuccaccucuuuuuaccugaucagcauuuuccuucaccucaucaagauucccacacaucgccacaucaccgggaaaccuugccccaagccucauagacugaaccacaugggaauuuguuccugcggccuguauaaacaccccggcguuccggugaaguggaagcggugaggacuaguuauaagacugacuagcccgaugggccucccaacgggcccuccuccccuccuugcaccgagauuaauaaaaaaaaaaaaaaaaaaaaaaaaaaaaaaaaaaaaaaaaaaaaaaaaaaaaaaaaaaaaaaaaaaaaaaaaaaaaaaaaaaaaaaaaaaaaaaaaaaaa

SEQ ID NO: 29720 - RNA, 1662 nt, Artificial Sequence
  mRNA product Design i-3 (A100) comprising derived and/or modified sequence from LASV(LASV253-NIG-2011;Clade II)__AIT17670__GPCmut5 (opt5)
aggagaaagcuuaccaugggccagaucauuaccuucuuucaagaggugccccacgucaucgaagagguuaugaacauugugcugaucgcccucagccugcuugcuauucugaaggggaucuacaauguggccacaugcggacucuucggccuggucuccuuucuucugcucugugggagaucuugcagcacgaccuauaaaggaguguacgaacugcagacacuggagcucgacauggcgucccugaacaugaccaugccucuuucuuguacaaagaauaacagccaucacuauaucaugguuggcaaugaaaccgggcuggagcucacacugaccaacacguccauuaucaaucauaaauucugcaaccuuucugaugcucacaagaaaaaucuguacgaccaugcccucaugagcauuaucuccaccuuucaccugagcauuccgaacuucaaucaguaugaggccaugucuugugauuuuaacggaggcaagaucuccgugcaguacaaucugagccacacauaugcugucgacgccgcuaaccauugcggcaccauugccaauggggugcuccaaacauucaugcggauggcguggggaggcucuuacaucgcccuggauuccggguguggaagcugggacugcaucaugaccucuuaccaguaucuuauuauccagaacacgacaugggaagaucacugucaguuuucccgccccagcccuauuggcuaccuggggcuccugucccaaagaacccgggacaucuauauuucucgcagacuucugggaacauucaccuggacccucagcgauuccgagggcaacgaaacacccggcggguacugccugacgcgguggaugcugaucgaggcugagcucaaguguuuuggaaauaccgccguugcuaaaugcaacgaaaagcaugacgaggaguucugcgauaugcugcgccuuuuugacuucaauaaacaggccaucagacggcugaaggcgccugcccagaugagcauucagcucaucaacaaagcugugaaugcccugauuaacgaucaacuuaucaugaagaaucaucugcgcgacauuauguguauccccuauugcaacuacucuaaguauugguaccucaaucacacagucaccggcagaacaucccugccucgguguuggcuggugagcaacgggucuuaccucaaugaaacccacuucagcgacgauaucgaacagcaggcugacaacaugauuacggagcugcuucaaaaagaguauaucgaucgccagggaaagacaccgcugggccucguggaccuguuugucuucuccaccucuuuuuaccugauuagcaucuuccuucaccucguuaaaauucccacccauagacacaucauugggaagccuugccccaaaccucaucggcugaaucacaugggaaucuguuccugcggccuguauaagcaccccggcgugccggugaaauggaagcgcugaggacuaguuauaagacugacuagcccgaugggccucccaacgggcccuccuccccuccuugcaccgagauuaauaaaaaaaaaaaaaaaaaaaaaaaaaaaaaaaaaaaaaaaaaaaaaaaaaaaaaaaaaaaaaaaaaaaaaaaaaaaaaaaaaaaaaaaaaaaaaaaaaaaa

SEQ ID NO: 29721 - RNA, 1662 nt, Artificial Sequence
  mRNA product Design i-3 (A100) comprising derived and/or modified sequence from LASV(LASV254-NIG-2011;Clade II)__AIT17674__GPCmut5 (opt5)
aggagaaagcuuaccaugggccagaucauuaccuucuuucaagaggugccccacgucaucgaagagguuaugaacauugugcugaucgcccucagccugcuugcuauucugaaggggaucuacaauguggccacaugcggacucuucggccuggucuccuuucuucugcucugugggagaucuugcagcacgaccuauaaaggaguguacgaacugcagacacuggagcucgacaugaccaaccugaauaugacaaugccucuuuccuguaccaagaacaauucucaucacuauaucaugguuggcaacgaaacagggcuggagcucacccugacgaauaccagcauuaucaaccauaaauucugcaaucuuuccgaugcgcacaagaaaaaccuguacaaucaugcucucaugucuauuaucagcacauuucaccuguccauuccgaacuucaaucaguaugaggccaugagcugugacuuuaacggaggcaagaucucugugcaguacaaucugucccacagcuaugccgucgaugcugccaaccauugcggcaccauugcuaacggggugcuccaaacauucaugcggauggccuggggaggcucuuacaucgcgcuggacuccggguguggaaauugggauugcaucaugaccagcuaccaguaucuuauuauccagaacacgacaugggaagaccacugucaguuuucucgccccuccccuauuggcuaccuggggcuccugagccaaagaacccgggauaucuauauuucccgcagacuucugggaacauucaccuggacccucucugacagcgagggcaaugaaacacccggcggguacugccugacgcgguggaugcugaucgaggccgagcucaaguguuuuggaaacaccgcuguugccaaaugcaaugaaaagcaugaugaggaguucugcgacaugcugcgccuuuuugauuucaacaaacaggcuaucagacggcugaagaccccugcccaggcgaauauucagcucaucaacaaagccgugaaugcucugauuaacgaccaacuuaucaugaagaaucaucugcgcgauauuauguguauccccuauugcaacuacuccaaguauugguaccucaaucacacagucacaggcaaaaccagccugccuagauguuggcuggugucuaacggguccuaccucaaugaaacgcacuucagcgacgacaucgaacagcaggccgauaacaugauuacagagcugcuucaaaaggaguauauggaccggcagggaaaaaccccgcugggccucguggaucuguuugucuucucuaccagcuuuuaccugaucuccauuuuccuucaccucguuaagauccccacacaucgccacgugauugggaaaccuugccccaagccucauagacugaaccacaugggaaucuguucuugcggccuguauaaacaccccggcgugccggucaaguggaagcggugaggacuaguuauaagacugacuagcccgaugggccucccaacgggcccuccuccccuccuugcaccgagauuaauaaaaaaaaaaaaaaaaaaaaaaaaaaaaaaaaaaaaaaaaaaaaaaaaaaaaaaaaaaaaaaaaaaaaaaaaaaaaaaaaaaaaaaaaaaaaaaaaaaaa

SEQ ID NO: 29722 - RNA, 1662 nt, Artificial Sequence
  mRNA product Design i-3 (A100) comprising derived and/or modified sequence from LASV(Nig08-A19;Clade III)__ADU56618__GPCmut5 (opt5)
aggagaaagcuuaccaugggccagaucgugaccuucuuucaagaggucccccacguuauugaagaggugaugaacaucgugcugauugcccucagcauccuggcuauucuuaaggggcuguacaauaucgccacaugcggacucaucggccuggucacguuccuucugcucuccgggagaucuuguagcaugaccuauaaaggaguguacgaacugcagacacuggagcucaacaugaauacccugaacaugacaaugccucuuuccugcaccaagaauaacucucaucacuauauuaugguuggcaaugaaacagggcuggagcucacccugacgaacaccagccuucugcaucacaaauuuuguaaucucuccgacgcgcauaagaaaaaccuguacgaucacacacugaugucuaucauuagcaccuuccaccucuccaucccgaauuuuaaccaguaugaggcuaugagcugcgacuucaauggaggcaagauuacagugcaguacaaccugucucauuccuaugccaucgaugccgcuaaucacuguggcaccgucgccaacggggugcuucaaacguuuaugcggauggcuuggggaggcagcuacauugcccuggacucugggugcggaaagugggauuguaucaugacauccuaccaguaucucaucauucagaacaccacaugggaagaccauugccaguucagccgccccucuccuaucggcuaccuggggcuucugucccaaagaacccgggauauuuauaucagccgcagacuccugggaaccuuuacauggacgcuguccgacucugagggcaaugaaacccccggcggguacugucucacacgguggaugcugauugaggcggagcuuaaaugcuucggaaacaccgccguugcuaaguguaaugaaaaacacgaugaggaauuuugcgacaugcugcgccucuucgauuuuaacaagcaggccaucagacggcugaaagcuccugcccagaugagcauccagcuuauuaauaaggcggugaacgcccugaucaaugaccaacucauuaugaagaaccaucugcgcgauaucaugugcauucccuauuguaauuacuccaaauauugguaccugaaccacacaagcaccggcagaacgucucucccucggugcuggcuggucuccaaugggagcuaccuuaacgagacacacuucucugacgacaucgaacagcaggcugauaauaugaucaccgagaugcugcaaaaggaguaucucgaccgccagggaaaaaccccgcugggccugguggaucuuuucguguuuagcacauccuucuaccucauuucuaucuuucugcaucuggucaagauucccacccacagacauaucguugggaaaccuugucccaagccucaccggcucaaccacaugggaauuugcagcuguggccuguauaaacagcccggcgugccggugcgcuggaagagaugaggacuaguuauaagacugacuagcccgaugggccucccaacgggcccuccuccccuccuugcaccgagauuaauaaaaaaaaaaaaaaaaaaaaaaaaaaaaaaaaaaaaaaaaaaaaaaaaaaaaaaaaaaaaaaaaaaaaaaaaaaaaaaaaaaaaaaaaaaaaaaaaaaaa

SEQ ID NO: 29723 - RNA, 1665 nt, Artificial Sequence
  mRNA product Design i-3 (A100) comprising derived and/or modified sequence from LASV(G1180-SLE-2010;Clade IV)__AIT17168__GPCmut5 (opt5)
aggagaaagcuuaccaugggccagaucgugaccuucuuucaagaggucccccacguuauugaagaggugaugaacaucgugcugauugcccucagcauccuggcuguccuuaaggggcuguacaauuucgccacaugcggacucgugggccugcuuacguuucugcuccugugugggagauccugcaccgcgucucgguauaaaggaguuuacgaacugcagacacucgagcugaacauggaaacccuuaauaugacaaugccucugagcuguaccaagaacaauucccaucacuauauuauggugggcaacgagacagggcucgagcugacccuuacgaauaccucuaucaucaaccauaaauucugcaaucugagcgacgcucacaagaaaaaccucuacgaucaugcccugauguccauuaucucuacauuucaccugagcauuccgaauuucaaccaguaugaagccauguccugugacuuuaauggaggcaagaucagcguccaguacaaccucucucacuccuaugcuggcgaugccgcuaaucauugcgggaccguggccaacggaguucugcaaacauucaugcgcauggcguggggcgggagcuacauugcccuugacucuggauguggcuccugggauugcaucaugaccagcuaccaguaucugauuauccagaacacgacaugggaggaccacugucaguuuucuagacccuccccuaucggguaccucggacugcuuagccaacggacccgcgauauuuauaucuccagacggcugcucggcacauucaccuggacccugucugacagcgaaggcaaggauacacccgggggauacugccugacgcgcuggaugcucauugaggcugagcugaaauguuuuggcaauaccgccguggcuaagugcaacgaaaaacaugacgaggaguucugcgauaugcuuagacuguuugacuucaauaagcaggccauccagcggcucaaagcgccugcccagauguccauucaacugaucaacaaggcugucaaugcccuuaucaacgaucagcugauuaugaagaaucaccuccgcgacaucauguguauucccuauugcaacuacagcaaauauugguaccugaaucacacaaccacagggaagaccucucugccuaaauguuggcucguguccaacggaagcuaccugaaugaaacgcauuucucugacgauaucgaacagcaagcugacaacaugauuacagagaugcuucagaaggaguauauggaaagacagggcaaaaccccgcuggggcucguggaucuguuugucuucagcaccuccuuuuaccugaucucuaucuuccuucaccucguuaagauucccacacaucggcacaucgugggaaaaagcugcccuaagccccaucgccugaaucacaugggcauuuguuccugcggccuguauaagcagccuggggugcccgucaaauggaagagaugaggacuaguuauaagacugacuagcccgaugggccucccaacgggcccuccuccccuccuugcaccgagauuaauaaaaaaaaaaaaaaaaaaaaaaaaaaaaaaaaaaaaaaaaaaaaaaaaaaaaaaaaaaaaaaaaaaaaaaaaaaaaaaaaaaaaaaaaaaaaaaaaaaaa

SEQ ID NO: 29724 - RNA, 1665 nt, Artificial Sequence
  mRNA product Design i-3 (A100) comprising derived and/or modified sequence from LASV(G1442-SLE-2011;Clade IV)__AIT17180__GPCmut5 (opt5)
aggagaaagcuuaccaugggccagaucgugaccuucuuucaagaggucccccacguuauugaagaggugaugaacaucgugcugauugcccucagcauccuggcuguccuuaaggggcuguacaauguggccacaugcggacucauuggccugguuacguuccuucugcucugugggagauccugcaccacaacccuguauaaaggaguguacgaacugcagacacucgagcugaacauggaaacccuuaauaugacaaugccucugucuuguaccaagaacaauagccaucacuauauccgggucggcaacgagacggggcucgagcugacccuuacaaauaccuccaucauuaaccauaaauuuugcaaucugucugacgcgcacaagaaaaaccucuacgaucaugcucugaugagcaucauuuccacauuccaccugucuaucccgaauuuuaaccaguaugaagccaugagcugugacuucaauggaggcaagauuuccgugcaguacaaccucagccacucuuaugccggcgaugcugccaaucauugcgggaccguugcuaacggagugcugcaaacguuuaugcgcauggccuggggcggguccuacaucgcgcuugacagcggauguggcaacugggauugcauuaugacaucuuaccaguaucugaucauccagaauaccacaugggacgaucacugucaguucuccagacccagcccuauuggguaccucggacugcuuucucaacggacccgcgacgucuauaucuccagacggcugcucggcaccuuuacauggacgcugagcgauuccgagggcaaggacacccccgggggauacugccugacacgcuggaugcucauugaagccgagcugaaauguuucggcaacaccgcuguggccaagugcaaugagaaacaugaugaagaguuuugcgacaugcuuagacuguucgauuuuaacaagcaggcuauccagcggcucaaagccccugcgcagaugucuauucaacugaucaauaaggccgugaacgcucuuaucaaugaccagcugauuaugaagaaccaccuccgcgacaucauguguauucccuauugcaauuacagcaaauauugguaccugaacaauacagccaccgggaagacgucccugccuaaauguuggcucaucagcaacggaucuuaccugaaugaaacacacuucuccgaugacauugagcaggaagcugauaacaugaucaccgagaugcuucaaaaggaguauauggaaagacagggcaaaaccccgcuggggcucgucgaccuguucguuuuuagcacaucuuucuaccugaucagcauuuuucuucaucucgugaagauccccacccaccggcauauugugggaaaauccugcccuaagccccaccgccugaaucauaugggcaucuguucuugcggccuguauaagcagccugggguccccgugagauggaaacggugaggacuaguuauaagacugacuagcccgaugggccucccaacgggcccuccuccccuccuugcaccgagauuaauaaaaaaaaaaaaaaaaaaaaaaaaaaaaaaaaaaaaaaaaaaaaaaaaaaaaaaaaaaaaaaaaaaaaaaaaaaaaaaaaaaaaaaaaaaaaaaaaaaaa

SEQ ID NO: 29725 - RNA, 1665 nt, Artificial Sequence
  mRNA product Design i-3 (A100) comprising derived and/or modified sequence from LASV(G3010-SLE-2013;Clade IV)__AIT17344__GPCmut5 (opt5)
aggagaaagcuuaccaugggccagaucgugaccuucuuucaagaggucccccacguuauugaagaggugaugaacaucgugcugauugcccucagcauccuggcuguccuuaaggggcuguacaauuucgccacaugcggacucgugggccugguuacguuucuucugcucugugggagauccugcaccacaucucuguauaaaggaguguacgaacugcagacccucgagcugaacauggaaacacuuaauaugaccaugccucugagcuguacaaagaacaauucccaucacuauauuauggucggcaacgagaccgggcucgagcugacgcuuaccaauacaucuaucaucaaccauaaauucugcaaucugagcgacgcgcacaagaaaaaccucuacaaucaugcucugauguccauuaucucuaccuuucaccugagcauuccgaacuucaaucaguaugaagccauguccugugauuuuaacggaggcaagaucagcgugcaguacaaucucucucacuccuaugccggcgacgcugccagccauugcgggacaguugcuaacggagugcugcaaaccuucaugcggauggccuggggcgggucuuacauugcgcuugauuccggauguggcaagugggacugcaucaugacgagcuaccaguaucugauuauccagaacacaaccugggaggaucacugucaguuuucucgccccuccccuaucggguaccucggacugcuuagccaaagaacacgggacauuuauaucucccgcagacugcucggcaccuucaccuggacacugucugauagcgaaggcaaagacacgcccgggggauacugccugacccgguggaugcucauugaggccgagcugaaguguuuuggcaauacagcugucgccaaaugcaacgaaaagcaugaugaggaguucugcgacaugcuucgccuguuugauuucaauaaacaggcuauccagagacucaagaccccugcccagauguccauucaacugaucaacaaggcggugaaugcccuuaucaacgaccagcugauuaugaaaaaucaccuccgggauaucauguguauucccuauugcaacuacagcaaguauugguaccugaaucacacaaccacggggaaaacaucucugccuaaguguuggcucguguccaacggaagcuaccugaaugaaacccauuucucugacgacaucgaacagcaagcugauaacaugauuaccgagaugcuucagaaagaguauauggaacgccagggcaagacaccgcuggggcucgucgaccuguuuguuuucagcaccuccuuuuaccugaucucuaucuuccuucaccucgugaaaauucccacacauagacacaucgugggaaagagcugcccuaagccccaucggcugaaucacaugggcauuuguuccugcggccuguauaaacagccugggguccccgugcgcuggaagagaugaggacuaguuauaagacugacuagcccgaugggccucccaacgggcccuccuccccuccuugcaccgagauuaauaaaaaaaaaaaaaaaaaaaaaaaaaaaaaaaaaaaaaaaaaaaaaaaaaaaaaaaaaaaaaaaaaaaaaaaaaaaaaaaaaaaaaaaaaaaaaaaaaaaa
